United States Patent Application Publication US 2011/0183924 A1 - sequence listing, part 277

SEQ ID NO: 840563 - protein, 513 aa, Homo sapiens
MEGCLGQELFSNHMFLTSLSSPNRQPFVLFGNHSTRENLNAGNFNFPSEGHLVRSTGPGGSFAKHMVAQCVSPKGPLACSRTYLFGATHVPYLGGDSKLPKKTEQIRLLSQIYAAVIEAVLAGIACYAKTSSLTKAKEVAEQTLGSGLDSFELIPFKAALRSKMTFHIHAVNNQGRIVPLDSEDSLSFVKTACMAVYDIPDLLGGNGCLGSVVFSESFLTSQILVKEKDGTVTTETSSVVLTAAVPRFCSWLVEDNEVKLSEKTQQAVRGDESFLGTYLTGGEGAYLYSSNLQSWPEEGNVHFFSSGLLFSHCRHGSIIISKDHMNSISFYDGDSTSTVAALLIDFKSSLLPHLPVHFHGSSNFLMIALFPKSKIYQAFYSEVFSLWKQQDNSGISLKVIQEDGLSVEQKRLHSSAQKLFSALSQPAGEKRSSLKLLSAKLPELDWFLQHFAISSISQEPVMRTHLPVLLQQAEINTTHRIESDKVEELTRYAGNSQEDDLESLPLNLLCQLT

SEQ ID NO: 840564 - protein, 128 aa, Homo sapiens
VCVGREGEGSPPPQAGAGWSEGPSAGPEQQPQPQSKSSARFPMHTMGITVPRMRLAGVTGKLRAVRLIHLIQGKNRSLAPAPGRGGVLDRGRSNSVLRAHPQIAFLREAGTNDAAGRPWICSFLRAGA

SEQ ID NO: 840565 - protein, 123 aa, Homo sapiens
AVTLLFRGPPLGPSPCVMCSPVLCSPVCPHLGFLSHVRVRVSPAGAGLLLFVCGIAPSRRFRCLSPGGSPLVLPPLPLVLVMPRSGAPVAPSSGVVSSVFFARFALGAQECCLVGVGLFVFVL

SEQ ID NO: 840566 - protein, 285 aa, Homo sapiens
SQLREFVPLNSMAYSSSNSDIEDDSSKSNSNLSLSVGYFPCEDTPCEDTTSWEDAPSKGPSIHFLPPVQGAWGTERIGRRMKRQDQIQDEPEQFCKLSIFLAWDVDIGSDNTDSRANRLLNGDNLWIDKLPKERTKLSVGKLNNLVQEFQIFLENLKDDDAVFPETAQQDFQLSSGSPPEMVQMISQATASQRTSAPEISSILSEQPEKDDTPSHTQAQCCLNFGWAFSWLRQRILPSLLRRDHPVNATKSPHRSAPTKRLFHKTIDFNIQKIMNEDEHIIKTDF

SEQ ID NO: 840567 - protein, 86 aa, Homo sapiens
MVPSHIDAGSASSSPLTQMLTFFGNTLTNTPRNNTLHSSIKLTLHNNHIHGGIYQVSCFGVPRRRVCLGESGTLPRYAQQLWRPHG

SEQ ID NO: 840568 - protein, 109 aa, Homo sapiens
PYSKGDIQGVWWEQRGRNAPLAWRMGPVSLLSRNVEDSLHTAEGTLVKDTVCAKTQRRERQGLSHTIGEYGEIARDAFIPHISMECQLMPGTGNRNRRHIPPFKEFRDW

SEQ ID NO: 840569 - protein, 579 aa, Homo sapiens
MSTASAASSSSSSSAGEMIEAPSQVLNFEEIDYKEIEVEEVVGRGAFGVVCKAKWRAKDVAIKQIESESERKAFIVELRQLSRVNHPNIVKLYGACLNPVCLVMEYAEGGSLYNVLHGAEPLPYYTAAHAMSWCLQCSQGVAYLHSMQPKALIHRDLKPPNLLLVAGGTVLKICDFGTACDIQTHMTNNKGSAAWMAPEVFEGSNYSEKCDVFSWGIILWEVITRRKPFDEIGGPAFRIMWAVHNGTRPPLIKNLPKPIESLMTRCWSKDPSQRPSMEEIVKIMTHLMRYFPGADEPLQYPCQYSDEGQSNSATSTGSFMDIASTNTSNKSDTNMEQVPATNDTIKRLESKLLKNQAKQQSESGRLSLGASRGSSVESLPPTSEGKRMSADMSEIEARIAATTGNGQPRRRSIQDLTVTGTEPGQVSSRSSSPSVRMITTSGPTSEKPTRSHPWTPDDSTDTNGSDNSIPMAYLTLDHQLQPLAPCPNSKESMAVFEQHCKMAQEYMKVQTEIALLLQRKQELVAELDQDEKDQQNTSRLVQEHKKLLDENKSLSTYYQQCKKQLEVIRSQQQKRQGTS

SEQ ID NO: 840570 - protein, 606 aa, Homo sapiens
MSTASAASSSSSSSAGEMIEAPSQVLNFEEIDYKEIEVEEVVGRGAFGVVCKAKWRAKDVAIKQIESESERKAFIVELRQLSRVNHPNIVKLYGACLNPVCLVMEYAEGGSLYNVLHGAEPLPYYTAAHAMSWCLQCSQGVAYLHSMQPKALIHRDLKPPNLLLVAGGTVLKICDFGTACDIQTHMTNNKGSAAWMAPEVFEGSNYSEKCDVFSWGIILWEVITRRKPFDEIGGPAFRIMWAVHNGTRPPLIKNLPKPIESLMTRCWSKDPSQRPSMEEIVKIMTHLMRYFPGADEPLQYPCQYSDEGQSNSATSTGSFMDIASTNTSNKSDTNMEQVPATNDTIKRLESKLLKNQAKQQSESGRLSLGASRGSSVESLPPTSEGKRMSADMSEIEARIAATTAYSKPKRGHRKTASFGNILDVPEIVISGNGQPRRRSIQDLTVTGTEPGQVSSRSSSPSVRMITTSGPTSEKPTRSHPWTPDDSTDTNGSDNSIPMAYLTLDHQLQPLAPCPNSKESMAVFEQHCKMAQEYMKVQTEIALLLQRKQELVAELDQDEKDQQNTSRLVQEHKKLLDENKSLSTYYQQCKKQLEVIRSQQQKRQGTS

SEQ ID NO: 840571 - protein, 606 aa, Homo sapiens; identical to SEQ ID NO: 840570

SEQ ID NO: 840572 - protein, 290 aa, Homo sapiens
MSTASAASSSSSSSAGEMIEAPSQVLNFEEIDYKEIEVEEVVGRGAFGVVCKAKWRAKDVAIKQIESESERKAFIVELRQLSRVNHPNIVKLYGACLNPVCLVMEYAEGGSLYNVLHGAEPLPYYTAAHAMSWCLQCSQGVAYLHSMQPKALIHRDLKPPNLLLVAGGTVLKICDFGTACDIQTHMTNNKGSAAWMAPEVFEGSNYSEKCDVFSWGIILWEVITRRKPFDEIGGPAFRIMWAVHNGTRPPLIKNLPKPIESLMTRCWSKDPSQRPSMEEIVKIMTHLMRV

SEQ ID NO: 840573 - protein, 491 aa, Homo sapiens
MSTASAASSSSSSSAGEMIEAPSQVLNFEEIDYKEIEVEEVVGRGAFGVVCKAKWRAKDVAIKQIESESERKAFIVELRQLSRVNHPNIVKLYGACLNPVCLVMEYAEGGSLYNVLHGAEPLPYYTAAHAMSWCLQCSQGVAYLHSMQPKALIHRDLKPPNLLLVAGGTVLKICDFGTACDIQTHMTNNKGSAAWMAPEVFEGSNYSEKCDVFSWGIILWEVITRRKPFDEIGGPAFRIMWAVHNGTRPPLIKNLPKPIESLMTRCWSKDPSQRPSMEEIVKIMTHLMRYFPGADEPLQYPCQYSDEGQSNSATSTGSFMDIASTNTSNKSDTNMEQVPATNDTIKRLESKLLKNQAKQQSESGRLSLGASRGSSVESLPPTSEGKRMSADMSEIEARIAATTGNGQPRRRSIQDLTVTGTEPGQVSSRSSSPSVRMITTSGPTSEKPTRSHPWTPDDSTDTNGSDNSIPMAYLTLDHQLQARTSCRTGPG

SEQ ID NO: 840574 - protein, 476 aa, Homo sapiens
MSWCLQCSQGVAYLHSMQPKALIHRDLKPPNLLLVAGGTVLKICDFGTACDIQTHMTNNKGSAAWMAPEVFEGSNYSEKCDVFSWGIILWEVITRRKPFDEIGGPAFRIMWAVHNGTRPPLIKNLPKPIESLMTRCWSKDPSQRPSMEEIVKIMTHLMRYFPGADEPLQYPCQYSDEGQSNSATSTGSFMDIASTNTSNKSDTNMEQVPATNDTIKRLESKLLKNQAKQQSESGRLSLGASRGSSVESLPPTSEGKRMSADMSEIEARIAATTAYSKPKRGHRKTASFGNILDVPEIVISGNGQPRRRSIQDLTVTGTEPGQVSSRSSSPSVRMITTSGPTSEKPTRSHPWTPDDSTDTNGSDNSIPMAYLTLDHQLQPLAPCPNSKESMAVFEQHCKMAQEYMKVQTEIALLLQRKQELVAELDQDEKDQQNTSRLVQEHKKLLDENKSLSTYYQQCKKQLEVIRSQQQKRQGTS

SEQ ID NO: 840575 - protein, 215 aa, Homo sapiens
MSEIEARIAATTAYSKPKRGHRKTASFGNILDVPEIVISGNGQPRRRSIQDLTVTGTEPGQVSSRSSSPSVRMITTSGPTSEKPTRSHPWTPDDSTDTNGSDNSIPMAYLTLDHQLQPLAPCPNSKESMAVFEQHCKMAQEYMKVQTEIALLLQRKQELVAELDQDEKDQQNTSRLVQEHKKLLDENKSLSTYYQQCKKQLEVIRSQQQKRQGTS

SEQ ID NO: 840576 - protein, 606 aa, Homo sapiens; identical to SEQ ID NO: 840570

SEQ ID NO: 840577 - protein, 606 aa, Homo sapiens; identical to SEQ ID NO: 840570

SEQ ID NO: 840578 - protein, 606 aa, Homo sapiens; identical to SEQ ID NO: 840570

SEQ ID NO: 840579 - protein, 440 aa, Homo sapiens
MSTASAASSSSSSSAGEMIEAPSQVLNFEEIDYKEIEVEEVVGRGAFGVVCKAKWRAKDVAIKQIESESERKAFIVELRQLSRVNHPNIVKLYGACLNPVCLVMEYAEGGSLYNVLHGAEPLPYYTAAHAMSWCLQCSQGVAYLHSMQPKALIHRDLKPPNLLLVAGGTVLKICDFGTACDIQTHMTNNKGSAAWMAPEVFEGSNYSEKCDVFSWGIILWEVITRRKPFDEIGGPAFRIMWAVHNGTRPPLIKNLPKPIESLMTRCWSKDPSQRPSMEEIVKIMTHLMRYFPGADEPLQYPCQYSDEGQSNSATSTGSFMDIASTNTSNKSDTNMEQVPATNDTIKRLESKLLSGSSVESLPPTSEGKRMSADMSEIEARIAATTAYSKPKRGHRKTASFGNILDVPEIVISGNGQPRRRSIQDLTVTGTEPGQVRQHSN

SEQ ID NO: 840580 - protein, 520 aa, Homo sapiens
MCSDSACIHIVSFVICNKVLFSLCLSFAVLHGAEPLPYYTAAHAMSWCLQCSQGVAYLHSMQPKALIHRDLKPPNLLLVAGGTVLKICDFGTACDIQTHMTNNKGSAAWMAPEVFEGSNYSEKCDVFSWGIILWEVITRRKPFDEIGGPAFRIMWAVHNGTRPPLIKNLPKPIESLMTRCWSKDPSQRPSMEEIVKIMTHLMRYFPGADEPLQYPCQYSDEGQSNSATSTGSFMDIASTNTSNKSDTNMEQVPATNDTIKRLESKLLKNQAKQQSESGRLSLGASRGSSVESLPPTSEGKRMSADMSEIEARIAATTAYSKPKRGHRKTASFGNILDVPEIVISGNGQPRRRSIQDLTVTGTEPGQVSSRSSSPSVRMITTSGPTSEKPTRSHPWTPDDSTDTNGSDNSIPMAYLTLDHQLQPLAPCPNSKESMAVFEQHCKMAQEYMKVQTEIALLLQRKQELVAELDQDEKDQQNTSRLVQEHKKLLDENKSLSTYYQQCKKQLEVIRSQQQKRQGTS

SEQ ID NO: 840581 - protein, 491 aa, Homo sapiens; identical to SEQ ID NO: 840573

SEQ ID NO: 840582 - protein, 518 aa, Homo sapiens
MSTASAASSSSSSSAGEMIEAPSQVLNFEEIDYKEIEVEEVVGRGAFGVVCKAKWRAKDVAIKQIESESERKAFIVELRQLSRVNHPNIVKLYGACLNPVCLVMEYAEGGSLYNVLHGAEPLPYYTAAHAMSWCLQCSQGVAYLHSMQPKALIHRDLKPPNLLLVAGGTVLKICDFGTACDIQTHMTNNKGSAAWMAPEVFEGSNYSEKCDVFSWGIILWEVITRRKPFDEIGGPAFRIMWAVHNGTRPPLIKNLPKPIESLMTRCWSKDPSQRPSMEEIVKIMTHLMRYFPGADEPLQYPCQYSDEGQSNSATSTGSFMDIASTNTSNKSDTNMEQVPATNDTIKRLESKLLKNQAKQQSESGRLSLGASRGSSVESLPPTSEGKRMSADMSEIEARIAATTAYSKPKRGHRKTASFGNILDVPEIVISGNGQPRRRSIQDLTVTGTEPGQVSSRSSSPSVRMITTSGPTSEKPTRSHPWTPDDSTDTNGSDNSIPMAYLTLDHQLQARTSCRTGPG

SEQ ID NO: 840583 - protein, 421 aa, Homo sapiens
MTNNKGSAAWMAPEVFEGSNYSEKCDVFSWGIILWEVITRRKPFDEIGGPAFRIMWAVHNGTRPPLIKNLPKPIESLMTRCWSKDPSQRPSMEEIVKIMTHLMRYFPGADEPLQYPCQYSDEGQSNSATSTGSFMDIASTNTSNKSDTNMEQVPATNDTIKRLESKLLKNQAKQQSESGRLSLGASRGSSVESLPPTSEGKRMSADMSEIEARIAATTAYSKPKRGHRKTASFGNILDVPEIVISGNGQPRRRSIQDLTVTGTEPGQVSSRSSSPSVRMITTSGPTSEKPTRSHPWTPDDSTDTNGSDNSIPMAYLTLDHQLQPLAPCPNSKESMAVFEQHCKMAQEYMKVQTEIALLLQRKQELVAELDQDEKDQQNTSRLVQEHKKLLDENKSLSTYYQQCKKQLEVIRSQQQKRQGTS

SEQ ID NO: 840584 - protein, 606 aa, Homo sapiens; identical to SEQ ID NO: 840570

SEQ ID NO: 840585 - protein, 606 aa, Homo sapiens; identical to SEQ ID NO: 840570

SEQ ID NO: 840586 - protein, 472 aa, Homo sapiens
MSTASAASSSSSSSAGEMIEAPSQVLNFEEIDYKEIEVEEVVGRGAFGVVCKAKWRAKDVAIKQIESESERKAFIVELRQLSRVNHPNIVKLYGACLNPVCLVMEYAEGGSLYNVLHGAEPLPYYTAAHAMSWCLQCSQGVAYLHSMQPKALIHRDLKPPNLLLVAGGTVLKICDFGTACDIQTHMTNNKGSAAWMAPEVFEGSNYSEKCDVFSWGIILWEVITRRKPFDEIGGPAFRIMWAVHNGTRPPLIKNLPKPIESLMTRCWSKDPSQRPSMEEIVKIMTHLMRYFPGADEPLQYPCQYSDEGQSNSATSTGSFMDIASTNTSNKSDTNMEQVPATNDTIKRLESKLLKNQAKQQSESGRLSLGASRGSSVESLPPTSEGKRMSADMSEIEARIAATTAYSKPKRGHRKTASFGNILDVPEIVISGIIDHLSWSNSCGTGIMIPGTCKMLLAPIFTRHENGYLACSN

SEQ ID NO: 840587 - protein, 215 aa, Homo sapiens
LKSNRIPLPEKEYSGWYQDPLTRIGAQDLFDYITEKGPLGEGPSRCFFGQVVAAIQHCHSRGVVHRDIKDENILIDLRRGCAKLIDFGSGALLHDEPYTDFDGTRVYSPPEWISRHQYHALPATVWSLGILLYDMVCGDIPFERDQEILEAELHFPAHVSPDCCALIRRCLAPKPSSRPSLEEILLDPWMQTPAEDVPLNPSKGGPAPLAWSLLP

SEQ ID NO: 840588 - protein, 153 aa, Homo sapiens
ALGLARAANLNAAPSAGASGPPVSLLSTLAPPSPGSPAALPRASTPCGLSGFSGLNLRSATSMLTKPLQGPPAPPGTPTPPPGGKDREAFEAEYRLGPLLGKGGFGTVFAGHRLTDRLQVSVMRVLGGSGACGGGGGPGPGMLVDRGVSLQSV

SEQ ID NO: 840589 - protein, 86 aa, Homo sapiens
DYITEKGPLGEGPSRCFFGQVVAAIQHCHSRGVVHRDIKDENILIDLRRGCAKLIDFGSGALLHDEPYTDFDGKASLNLPGGIVFT

SEQ ID NO: 840590 - protein, 373 aa, Homo sapiens
ALGLARAANLNAAPSAGASGPPVSLLSTLAPPSPGSPAALPRASTPCGLSGFSGLNLRSATSMLTKPLQGPPAPPGTPTPPPGGKDREAFEAEYRLGPLLGKGGFGTVFAGHRLTDRLQVAIKVIPRNRVLGWSPLSDSVTCPLEVALLWKVGAGGGHPGVIRLLDWFETQEGFMLVLERPLPAQDLFDYITEKGPLGEGPSRCFFGQVVAAIQHCHSRGVVHRDIKDENILIDLRRGCAKLIDFGSGALLHDEPYTDFDGTRVYSPPEWISRHQYHALPATVWSLGILLYDMVCGDIPFERDQEILEAELHFPAHVSPDCCALIRRCLAPKPSSRPSLEEILLDPWMQTPAEDVPLNPSKGGPAPLAWSLLP

SEQ ID NO: 840591 - protein, 373 aa, Homo sapiens; identical to SEQ ID NO: 840590

SEQ ID NO: 840592 - protein, 86 aa, Homo sapiens
IFPLCFLAYRLLCPNPPVPGPQTFFPTLTGRDPAGPLDANTSRGCTPQPLQRRPCPFGLVLATLSLAWPGLAPNGQKSHPMAMSQG

SEQ ID NO: 840593 - protein, 191 aa, Homo sapiens
RAANLNAAPSAGASGPPVSLLSTLAPPSPGSPAALPRASTPCGLSGFSGLNLRSATSMLTKPLQGPPAPPGTPTPPPGEYILPYCNQTGWAGMMGCSAGGGSRGWAQHAATLTSSPPPAYGGKDREAFEAEYRLGPLLGKGGFGTVFAGHRLTDRLQVSVMRVLGGSGACGGGGGPGPGMLVDRGVSLQSV

SEQ ID NO: 840594 - protein, 47 aa, Homo sapiens
CQKEEQAHFEKYTDVGNCEYYPKKSLKGSHPHRVTSRTCHCKSLVLI

SEQ ID NO: 840595 - protein, 76 aa, Homo sapiens
GYFSERENGYPMAQTQNSPSSPNFDYRAVQFGCRFRCTHMSYISVDYSQVQMLILNSTLTFFLATQVHWFSSTERP

SEQ ID NO: 840596 - protein, 119 aa, Homo sapiens
CVYGCVFVCVCVCMCILCVCLNGCVFVCVCVCVVLRTPHISWQWTARTLLDPHGQGKPAEPLFSPRHPTSANGELEGRGLSQQQKLQKDFPRLTWTVVRTQPSLSSLSLAPHTGAVCRG

SEQ ID NO: 840597 - protein, 72 aa, Homo sapiens
EGKDTCSNTNNNFTSPLLKKSQKARSCKEPGASSQQPKPKKSRLRWEALREYSSVTETEAWRKKSMPPESGL

SEQ ID NO: 840598 - protein, 289 aa, Homo sapiens
IVGRQLNSAPGKMEAAETEAEAAALEVLAEVAGILEPVGLQEEAELPAKILVEFVVDSQKKDKLLCSQLQVADFLQNILAQEDTAKGLDPLASEDTSRQKAIAAKEQWKELKATYREHVEAIKIGLTKALTQMEEAQRKRTQLREAFEQLQAKKQMAMEKRRAVQNQWQLQQEKHLQHLAEVSAEVRERKTGTQQELDGVFQKLGNLKQQAEQERDKLQRYQTFLQLLYTLQGKLLFPEAEAEAENLPDDKPQQPTRPQEQSTGDTMGRDPGVSFKAVGLQPAGDVNLP

SEQ ID NO: 840599 - protein, 289 aa, Homo sapiens; identical to SEQ ID NO: 840598

SEQ ID NO: 840600 - protein, 289 aa, Homo sapiens; identical to SEQ ID NO: 840598

SEQ ID NO: 840601 - protein, 289 aa, Homo sapiens; identical to SEQ ID NO: 840598

SEQ ID NO: 840602 - protein, 289 aa, Homo sapiens; identical to SEQ ID NO: 840598

SEQ ID NO: 840603 - protein, 157 aa, Homo sapiens [sequence omitted]

SEQ ID NO: 840604 - protein, 242 aa, Homo sapiens
IVGRQLNSAPGKMEAAETEAEAAALEVLAEVAGILEPVGLQEEAELPAKILVEFVVDSQKKDKLLCSQLQVADFLQNILAQEDTAKGLDPLASEDTSRQKAIAAKEQWKELKATYREHVEAIKIGLTKALTQMEEAQRKRTQLREAFEQLQAKKQMAMEKRRAVQNQWQLQQEKHLQHLAEVSAEGKLLFPEAEAEAENLPDDKPQQPTRPQEQSTGDTMGRDPGVSFKAVGLQPAGDVNLP

SEQ ID NO: 840605 - protein, 242 aa, Homo sapiens; identical to SEQ ID NO: 840604

SEQ ID NO: 840606 - protein, 110 aa, Homo sapiens
MEEAQRKRTQLREAFEQLQAKKQMAMEKRRAVQNQWQLQQEKHLQHLAEVSAEGKLLFPEAEAEAENLPDDKPQQPTRPQEQSTGDTMGRDPGVSFKAVGLQPAGDVNLP

SEQ ID NO: 840607 - protein, 289 aa, Homo sapiens; identical to SEQ ID NO: 840598

SEQ ID NO: 840608 - protein, 289 aa, Homo sapiens; identical to SEQ ID NO: 840598

SEQ ID NO: 840609 - protein, 157 aa, Homo sapiens [sequence omitted]

SEQ ID NO: 840610 - protein, 214 aa, Homo sapiens
NTGPSQDLAEAGSQKQEQKQEAGQKAIAAKEQWKELKATYREHVEAIKIGLTKALTQMEEAQRKRTQLREAFEQLQAKKQMAMEKRRAVQNQWQLQQEKHLQHLAEVSAEVRERKTGTQQELDGVFQKLGNLKQQAEQERDKLQRYQTFLQLLYTLQGKLLFPEAEAEAENLPDDKPQQPTRPQEQSTGDTMGRDPGVSFKAVGLQPAGDVNLP

SEQ ID NO: 840611 - protein, 273 aa, Homo sapiens
IVGRQLNSAPGKMEAAETEAEAAALEVLAEVAGILEPVGLQEEAELPAKILVEFVVDSQKKDKLLCSQLQVADFLQNILAQEDTAKGLDPLASEDTSRQKAIAAKEQWKELKATYREHVEAIKIGLTKALTQMEEAQRKRTQLREAFEQLQAKKQMAMEKRRAVQNQWQLQQEKHLQHLAEVSAEVRERKTGTQQELDGVFQKLGNLKQQAEQERDKLQRVSCCSLRLRLRQRIFQMINPSSRLDPRSRVQETPWGETLVCPSRLLVYNLLEM

SEQ ID NO: 840612 - protein, 239 aa, Homo sapiens
IVGRQLNSAPGKMEAAETEAEAAALEVLAEVAGILEPVGLQEEAELPAKILVEFVVDSQKKDKLLCSQLQVADFLQNILAQEDTAKGLDPLASEDTSRQKAIAAKEQWKELKATYREHVEAIKIGLTKALTQMEEAQRKRTQLREAFEQLQAKKQMAMEKRRAVQNQWQLQQEKHLQHLAEVSAEVRERKTGTQQELDGVFQKLGNLKLSPPRANPCLLPQASDFPHLPTIITGKTVNS

SEQ ID NO: 840613 - protein, 89 aa, Homo sapiens
MAKGDPKKPNGKMSAYAFFVQTCREERKKKYQEVPVNFAEFSKKCSRRWKTMSRKEKSKFDKLAKVDKVRYDREMKDYGPAKGGKKKKD

SEQ ID NO: 840614 - protein, 102 aa, Homo sapiens
LQTHTYFISQMGSKTRYEDGKEQLAFHTHIPGSRNHFTFPNTSVPDLSLCAALHSTYLPNVFQHFRPWDQVETAPPFQRQAPLSMHSSPNRNLVSPLVLLQL

SEQ ID NO: 840615 - protein, 52 aa, Homo sapiens
CEALEESSSCGRECFRPSRETSNIRIRGSHSAPSARYILQLTQGGVHPLEKT

SEQ ID NO: 840616 - protein, 37 aa, Homo sapiens
EAQSALPPSLALVGISPKPESPTGHTWTSLLHTTLPL

SEQ ID NO: 840617 - protein, 253 aa, Homo sapiens
LSLGLLVADFGAMVNNPHLSDVQFQTDSGEVLYAHKFVLYARCPLLIQYVNNEGFSAVEDGVLTQRVLLGDVSTEAARTFLHYLYTADTGLPPGLSSELSSLAHRFGVSELVHLCEQVPIATDSEGKPWEEKEAENCESRAENFQELLRSMWADEEEEAETLLKSKDHEEDQENVNEAEMEEIYEFAATQRKLLQEERAAGAGEDADWLEGGSPVSGQLLAGVQVQKQWDKVEEMEPLEPGRDEAATTWEKMG

SEQ ID NO: 840618 - protein, 69 aa, Homo sapiens
CGCHHRGGGSPRMLLITHRAWGSPTTEGGPGDAKSCAFHRLGSRAPTAAGCRSVFVYMPSPGGSPAFIS

SEQ ID NO: 840619 - protein, 33 aa, Homo sapiens
YTEKNMGYLIYIWGSGDVSWKSSLKYFEIYVKT

SEQ ID NO: 840620 - protein, 68 aa, Homo sapiens
MKLQTLMDWEEAHEKNRKNKRKAEALVAALQTCRVQDPPGTSTDCYLLPVLKPGHFKKNCPSHKKKPP

SEQ ID NO: 840621 - protein, 129 aa, Homo sapiens
KSCRSRKTQSNPASQVTFPLLCCPTGPPPCDIQKLKLLNLSKLSILFCTCGPVSPLEPQFSDMCNERINYRLKGLHADTHRYKHIHTTHRVTHRHAHNTQKYTKRYSSRRATQTHIVRSPRLNEENCEA

SEQ ID NO: 840622 - protein, 32 aa, Homo sapiens
GNSNRALLDTYYVPAPSTSRNNSKSIYLLNTY

SEQ ID NO: 840623 - protein, 82 aa, Homo sapiens
FNLFFKVFLDKVRHLITWKVTAERNKKRNCTYSKISPTSSSAAPVTGRSSPLTNKKRNPTGGEHTITAGTRLRGFPLHGKQD

SEQ ID NO: 840624 - protein, 126 aa, Homo sapiens
QFPSLLSLSPAPFTLKRARCGALVNRPHSAPSTPQHSGIVKAFGLSETDGTVATSCWSVVSIWILKIGLVIKMWPFNSLPGNILYMHREKFRDAGSTTRARDPSGTIVNIPGETNQEFPGGEGTGL

SEQ ID NO: 840625 - protein, 1834 aa, Homo sapiens
MSAGGRDEERRKLADIIHHWNANRLDLFEISQPTEDLEFHGVMRFYFQDKAAGNFATKCIRVSSTATTQDVIETLAEKFRPDMRMLSSPKYSLYEVHVSGERRLDIDEKPLVVQLNWNKDDREGRFVLKNENDAIPPKAQSNGPEKQEKEGVIQNFKRTLSKKEKKEKKKREKEALRQASDKDDRPFQGEDVENSRLAAEVYKDMPETSFTRTISNPEVVMKRRRQQKLEKRMQEFRSSDGRPDSGGTLRIYADSLKPNIPYKTILLSTTDPADFAVAEALEKYGLEKENPKDYCIARVMLPPGAQHSDEKGAKEIILDDDECPLQIFREWPSDKGILVFQLKRRPPDHIPKKTKKHLEGKTPKGKERADGSGYGSTLPPEKLPYLVELSPGRRNHFAYYNYHTYEDGSDSRDKPKLYRLQLSVTEVGTEKLDDNSIQLFGPGIQPHHCDLTNMDGVVTVTPRSMDAETYVEGQRISETTMLQSGMKVQFGASHVFKFVDPSQDHALAKRSVDGGLMVKGPRHKPGIVQETTFDLGGDIHSGTALPTSKSTTRLDSDRVSSASSTAERGMVKPMIRVEQQPDYRRQESRTQDASGPELILPASIEFRESSEDSFLSAIINYTNSSTVHFKLSPTYVLYMACRYVLSNQYRPDISPTERTHKVIAVVNKMVSMMEGVIQKQKNIAGALAFWMANASELLNFIKQDRDLSRITLDAQDVLAHLVQMAFKYLVHCLQSELNNYMPAFLDDPEENSLQRPKIDDVLHTLTGAMSLLRRCRVNAALTIQLFSQLFHFINMWLFNRLVTDPDSGLCSHYWGAIIRQQLGHIEAWAEKQGLELAADCHLSRIVQATTLLTMDKYAPDDIPNINSTCFKLNSLQLQALLQNYHCAPDEPFIPTDLIENVVTVAENTADELARSDGREVQLEEDPDLQLPFLLPEDGYSCDVVRNIPNGLQEFLDPLCQRGFCRLIPHTRSPGTWTIYFEGADYESHLLRENTELAQPLRKEPEIITVTLKKQNGMGLSIVAAKGAGQDKLGIYVKSVVKGGAADVDGRLAAGDQLLSVDGRSLVGLSQERAAELMTRTSSVVTLEVAKQGAIYHGLATLLNQPSPMMQRISDRRGSGKPRPKSEGFELYNNSTQNGSPESPQLPWAEYSEPKKLPGDDRLMKNRADHRSSPNVANQPPSPGGKSAYASGTTAKITSVSTGNLCTEEQTPPPRPEAYPIPTQTYTREYFTFPASKSQDRMAPPQNQWPNYEEKPHMHTDSNHSSIAIQRVTRSQEELREDKAYQLERHRIEAAMDRKSDSDMWINQSSSLDSSTSSQEHLNHSSKSVTPASTLTKSGPGRWKTPAAIPATPVAVSQPIRTDLPPPPPPPPVHYAGDFDGMSMDLPLPPPPSANQIGLPSAQVAAAERRKREEHQRWYEKEKARLEEERERKRREQERKLGQMRTQSLNPAPFSPLTAQQMKPEKPSTLQRPQETVIRELQPQQQPRTIERRDLQYITVSKEELSSGDSLSPDPWKRDAKEKLEKQQQMHIVDMLSKEIQELQSKPDRSAEESDRLRKLMLEWQFQKRLQESKQKDEDDEEEEDDDVDTMLIMQRLEAERRARTAMPAISVLDLLQDEERRRQQQLEEMRKREAEDRARQEEERRRQEEERTKRDAEEKRRQEEGYYSRLEAERRRQHDEAARRLLEPEAPGLCRPPLPRDYEPPSPSPAPGAPPPPPQRNASYLKTQVLSPDSLFTAKFVAYNEEEEEEDCSLAGPNSYPGSTGAAVGAHDACRDAKEKRSKSQDADSPGSSGAPENLTFKERQRLFSQGQDVSNKVKASRKLTELENELNTK

SEQ ID NO: 840626 - protein, 1595 aa, Homo sapiens
MTCVRCSVDIETVLSMSKSQFPYKTFRSSTTDPADCAVAAARQKSGSYLENPCGYCIARVMLPPGAQHSDEKGAKEIILDDDECPLQIFREWPSDKGILVFQLKRRPPDHIPKKTKKHLEGKTPKGKERADGSGYGSTLPPEKLPYLVELSPGRRNHFAYYNYHTYEDGSDSRDKPKLYRLQLSVTEVGTEKLDDNSIQLFGPGIQPHHCDLTNMDGVVTVTPRSMDAETYVEGQRISETTMLQSGMKVQFGASHVFKFVDPSQDHALAKRSVDGGLMVKGPRHKPGIVQETTFDLGGDIHSGTALPTSKSTTRLDSDRVSSASSTAERGMVKPMIRVEQQPDYRRQESRTQDASGPELILPASIEFRESSEDSFLSAIINYTNSSTVHFKLSPTYVLYMACRYVLSNQYRPDISPTERTHKVIAVVNKMVSMMEGVIQKQKNIAGALAFWMANASELLNFIKQDRDLSRITLDAQDVLAHLVQMAFKYLVHCLQSELNNYMPAFLDDPEENSLQRPKIDDVLHTLTGAMSLLRRCRVNAALTIQLFSQLFHFINMWLFNRLVTDPDSGLCSHYWGAIIRQQLGHIEAWAEKQGLELAADCHLSRIVQATTLLTMDKYAPDDIPNINSTCFKLNSLQLQALLQNYHCAPDEPFIPTDLIENVVTVAENTADELARSDGREVQLEEDPDLQLPFLLPEDGYSCDVVRNIPNGLQEFLDPLCQRGFCRLIPHTRSPGTWTIYFEGADYESHLLRENTELAQPLRKEPEIITVTLKKQNGMGLSIVAAKGAGQDKLGIYVKSVVKGGAADVDGRLAAGDQLLSVDGRSLVGLSQERAAELMTRTSSVVTLEVAKQGAIYHGLATLLNQPSPMMQRISDRRGSGKPRPKSEGFELYNNSTQNGSPESPQLPWAEYSEPKKLPGDDRLMKNRADHRSSPNVANQPPSPGGKSAYASGTTAKITSVSTGNLCTEEQTPPPRPEAYPIPTQTYTREYFTFPASKSQDRMAPPQNQWPNYEEKPHMHTDSNHSSIAIQRVTRSQEELREDKAYQLERHRIEAAMDRKSDSDMWINQSSSLDSSTSSQEHLNHSSKSVTPASTLTKSGPGRWKTPAAIPATPVAVSQPIRTDLPPPPPPPPVHYAGDFDGMSMDLPLPPPPSANQIGLPSAQVAAAERRKREEHQRWYEKEKARLEEERERKRREQERKLGQMRTQSLNPAPFSPLTAQQMKPEKPSTLQRPQETVIRELQPQQQPRTIERRDLQYITVSKEELSSGDSLSPDPWKRDAKEKLEKQQQMHIVDMLSKEIQELQSKPDRSAEESDRLRKLMLEWQFQKRLQESKQKDEDDEEEEDDDVDTMLIMQRLEAERRARTAMPAISVLDLLQDEERRRQQQLEEMRKREAEDRARQEEERRRQEEERTKRDAEEKRRQEEGYYSRLEAERRRQHDEAARRLLEPEAPGLCRPPLPRDYEPPSPSPAPGAPPPPPQRNASYLKTQVLSPDSLFTAKFVAYNEEEEEEDCSLAGPNSYPGSTGAAVGAHDACRDAKEKRSKSQDADSPGSSGAPENLTFKERQRLFSQGQDVSNKVKASRKLTELENELNTK

SEQ ID NO: 840627 - protein, 1890 aa, Homo sapiens
MSAGGRDEERRKLADIIHHWNANRLDLFEISQPTEDLEFHGVMRFYFQDKAAGNFATKCIRVSSTATTQDVIETLAEKFRPDMRMLSSPKYSLYEVHVSGERRLDIDEKPLVVQLNWNKDDREGRFVLKNENDAIPPKAQSNGPEKQEKEGVIQNFKRTLSKKEKKEKKKREKEALRQASDKDDRPFQGEDVENSRLAAEVYKDMPETSFTRTISNPEVVMKRRRQQKLEKRMQEFRSSDGRPDSGGTLRIYADSLKPNIPYKTILLSTTDPADFAVAEALEKYGLEKENPKDYCIARVMLPPGAQHSDEKGAKEIILDDDECPLQIFREWPSDKGILVFQLKRRPPDHIPKKTKKHLEGKTPKGKERADGSGYGSTLPPEKLPYLVELSPDGSDSRDKPKLYRLQLSVTEVGTEKLDDNSIQLFGPGIQPHHCDLTNMDGVVTVTPRSMDAETYVEGQRISETTMLQSGMKVQFGASHVFKFVDPSQDHALAKRSVDGGLMVKGPRHKPGIVQETTFDLGGDIHSGTALPTSKSTTRLDSDRVSSASSTAERGMVKPMIRVEQQPDYRRQESRTQDASGPELILPASIEFRESSEDSFLSAIINYTNSSTVHFKLSPTYVLYMACRYVLSNQYRPDISPTERTHKVIAVVNKMVSMMEGVIQEVCSVYKKQKNIAGALAFWMANASELLNFIKQDRDLSRITLDAQDVLAHLVQMAFKYLVHCLQSELNNYMPAFLDDPEENSLQRPKIDDVLHTLTGAMSLLRRCRVNAALTIQLFSQLFHFINMWLFNRLVTDPDSGLCSHYWGAIIRQQLGHIEAWAEKQGLELAADCHLSRIVQATTLLTMDKYAPDDIPNINSTCFKLNSLQLQALLQNYHCAPDEPFIPTDLIENVVTVAENTADELARSDGREVQLEEDPDLQLPFLLPEDGYSCDVVRNIPNGLQEFLDPLCQRGFCRLIPHTRSPGTWTIYFEGADYESHLLRENTELAQPLRKEPEIITVTLKKQNGMGLSIVAAKGAGQDKLGIYVKSVVKGGAADVDGRLAAGDQLLSVDGRSLVGLSQERAAELMTRTSSVVTLEVAKQGAIYHGLATLLNQPSPMMQRISDRRGSGKPRPKSEGFELYNNSTQNGSPESPQLPWAEYSEPKKLPGDDRLMKNRADHRSSPNVANQPPSPGGKSAYASGTTAKITSVSTGNLCTEEQTPPPRPEAYPIPTQTYTREYFTFPASKSQDRMAPPQNQWPNYEEKPHMHTDSNHSSIAIQRVTRSQEELREDKAYQLERHRIEAAMDRKSDSDMWINQSSSLDSSTSSQEHLNHSSKSVTPASTLTKSGPGRWKTPAAIPATPVAVSQPIRTDLPPPPPPPPVHYAGDFDGMSMDLPLPPPPSANQIGLPSAQVAAAERRKREEHQRWYEKEKARLEEERERKRREQERKLGQMRTQSLNPAPFSPLTAQQMKPEKPSTLQRPQETVIRELQPQQQPRTIERRDLQYITVSKEELSSGDSLSPDPWKRDAKEKLEKQQQMHIVDMLSKEIQELQSKPDRSAEESDRLRKLMLEWQFQKRLQESKQKDEDDEEEEDDDVDTMLIMQRLEAERRARLQDEERRRQQQLEEMRKREAEDRARQEEERRRQEEERTKRDAEEKRRQEEGYYSRLEAERRRQHDEAARRLLEPEAPGLCRPPLPRDYEPPSPSPAPGAPPPPPQRNASYLKTQVLSPDSLFTAKFVAYNEEEEEEDCSLAGQDKYSSTRKSHGDLLPAPLKPRPPPCQPRPASDGVFLSNSFQPPSAKANSTAHKKGQPLPPPKKSSSYHPSHCKGPNSYPGSTGAAVGAHDACRDAKEKRSKSQDADSPGSSGAPENLTFKERQRLFSQGQDVSNKVKASRKLTELENELNTK

SEQ ID NO: 840628 - protein, 1883 aa, Homo sapiens [sequence omitted]

SEQ ID NO: 840629 - protein, 804 aa, Homo sapiens
SVSGLGYHVNLLTWSPHFSDRRGSGKPRPKSEGFELYNNSTQNGSPESPQLPWAEYSEPKKLPGDDRLMKNRADHRSSPNVANQPPSPGGKSAYASGTTAKITSVSTGNLCTEEQTPPPRPEAYPIPTQTYTREYFTFPASKSQDRMAPPQNQWPNYEEKPHMHTDSNHSSIAIQRVTRSQEELREDKAYQLERHRIEAAMDRKSDSDMWINQSSSLDSSTSSQEHLNHSSKSVTPASTLTKSGPGRWKTPAAIPATPVAVSQPIRTDLPPPPPPPPVHYAGDFDGMSMDLPLPPPPSANQIGLPSAQVAAAERRKREEHQRWYEKEKARLEEERERKRREQERKLGQMRTQSLNPAPFSPLTAQQMKPEKPSTLQRPQETVIRELQPQQQPRTIERRDLQYITVSKEELSSGDSLSPDPWKRDAKEKLEKQQQMHIVDMLSKEIQELQSKPDRSAEESDRLRKLMLEWQFQKRLQESKQKDEDDEEEEDDDVDTMLIMQRLEAERRARLQDEERRRQQQLEEMRKREAEDRARQEEERRRQEEERTKRDAEEKRRQEEGYYSRLEAERRRQHDEAARRLLEPEAPGLCRPPLPRDYEPPSPSPAPGAPPPPPQRNASYLKTQVLSPDSLFTAKFVAYNEEEEEEDCSLAGQDKYSSTRKSHGDLLPAPLKPRPPPCQPRPASDGVFLSNSFQPPSAKANSTAHKKGQPLPPPKKSSSYHPSHCKGPNSYPGSTGAAVGAHDACRDAKEKRSKSQDADSPGSSGAPENLTFKERQRLFSQGQDVSNKVKASRKLTELENELNTK

SEQ ID NO: 840630 - protein, 604 aa, Homo sapiens [sequence omitted]

SEQ ID NO: 840631 - protein, 129 aa, Homo sapiens
MTLVVRLLSLLLPTRVPSDTSAKANSTAHKKGQPLPPPKKSSSYHPSHCKGPNSYPGSTGAAVGAHDACRDAKEKRSKSQDADSPGSSGAPENLTFKERQRLFSQGQDVSNKVKASRKLTELENELNTK

SEQ ID NO: 840632 - protein, 1883 aa, Homo sapiens [sequence omitted]

SEQ ID NO: 840633 - protein, 1817 aa, Homo sapiens
MSAGGRDEERRKLADIIHHWNANRLDLFEISQPTEDLEFHGVMRFYFQDKAAGNFATKCIRVSSTATTQDVIETLAEKFRPDMRMLSSPKYSLYEVHVSGERRLDIDEKPLVVQLNWNKDDREGRFVLKNENDAIPPKAQSNGPEKQEKEGVIQNFKRTLSKKEKKEKKKREKEALRQASDKDDRPFQGEDVENSRLAAEVYKDMPETSFTRTISNPEVVMKRRRQQKLEKRMQEFRSSDGRPDSGGTLRIYADSLKPNIPYKTILLSTTDPADFAVAEALEKYGLEKENPKDYCIARVMLPPGAQHSDEKGAKEIILDDDECPLQIFREWPSDKGILVFQLKRRPPDHIPKKTKKHLEGKTPKGKERADGSGYGSTLPPEKLPYLVELSPDGSDSRDKPKLYRLQLSVTEVGTEKLDDNSIQLFGPGIQPHHCDLTNMDGVVTVTPRSMDAETYVEGQRISETTMLQSGMKVQFGASHVFKFVDPSQDHALAKRSVDGGLMVKGPRHKPGIVQETTFDLGGDIHSGTALPTSKSTTRLDSDRVSSASSTAERGMVKPMIRVEQQPDYRRQESRTQDASGPELILPASIEFRESSEDSFLSAIINYTNSSTVHFKLSPTYVLYMACRYVLSNQYRPDISPTERTHKVIAVVNKMVSMMEGVIQKQKNIAGALAFWMANASELLNFIKQDRDLSRITLDAQDVLAHLVQMAFKYLVHCLQSELNNYMPAFLDDPEENSLQRPKIDDVLHTLTGAMSLLRRCRVNAALTIQLFSQLFHFINMWLFNRLVTDPDSGLCSHYWGAIIRQQLGHIEAWAEKQGLELAADCHLSRIVQATTLLTMDKYAPDDIPNINSTCFKLNSLQLQALLQNYHCAPDEPFIPTDLIENVVTVAENTADELARSDGREVQLEEDPDLQLPFLLPEDGYSCDVVRNIPNGLQEFLDPLCQRGFCRLIPHTRSPGTWTIYFEGADYESHLLRENTELAQPLRKEPEIITVTLKKQNGMGLSIVAAKGAGQDKLGIYVKSVVKGGAADVDGRLAAGDQLLSVDGRSLVGLSQERAAELMTRTSSVVTLEVAKQGAIYHGLATLLNQPSPMMQRISDRRGSGKPRPKSEGFELYNNSTQNGSPESPQLPWAEYSEPKKLPGDDRLMKNRADHRSSPNVANQPPSPGGKSAYASGTTAKITSVSTGNLCTEEQTPPPRPEAYPIPTQTYTREYFTFPASKSQDRMAPPQNQWPNYEEKPHMHTDSNHSSIAIQRVTRSQEELREDKAYQLERHRIEAAMDRKSDSDMWINQSSSLDSSTSSQEHLNHSSKSVTPASTLTKSGPGRWKTPAAIPATPVAVSQPIRTDLPPPPPPPPVHYAGDFDGMSMDLPLPPPPSANQIGLPSAQVAAAERRKREEHQRWYEKEKARLEEERERKRREQERKLGQMRTQSLNPAPFSPLTAQQMKPEKPSTLQRPQETVIRELQPQQQPRTIERRDLQYITVSKEELSSGDSLSPDPWKRDAKEKLEKQQQMHIVDMLSKEIQELQSKPDRSAEESDRLRKLMLEWQFQKRLQESKQKDEDDEEEEDDDVDTMLIMQRLEAERRARLQDEERRRQQQLEEMRKREAEDRARQEEERRRQEEERTKRDAEEKRRQEEGYYSRLEAERRRQHDEAARRLLEPEAPGLCRPPLPRDYEPPSPSPAPGAPPPPPQRNASYLKTQVLSPDSLFTAKFVAYNEEEEEEDCSLAGQDKYSSTRKSHGDLLPAPLKPRPPPCQPRPASDGVFLSNSFQPPSAKANSTAHKKGQPLPPPKKSSSYHPSHCKGRGKRVTNQLSLS

SEQ ID NO: 840634 - protein, 1613 aa, Homo sapiens
MSAGGRDEERRKLADIIHHWNANRLDLFEISQPTEDLEFHGVMRFYFQDKAAGNFATKCIRVSSTATTQDVIETLAEKFRPDMRMLSSPKYSLYEVHVSGERRLDIDEKPLVVQLNWNKDDREGRFVLKNENDAIPPKAQSNGPEKQEKEGVIQNFKRTLSKKEKKEKKKREKEALRQASDKDDRPFQGEDVENSRLAAEVYKDMPETSFTRTISNPEVVMKRRRQQKLEKRMQEFRSSDGRPDSGGTLRIYADSLKPNIPYKTILLSTTDPADFAVAEALEKYGLEKENPKDYCIARVMLPPGAQHSDEKGAKEIILDDDECPLQIFREWPSDKGILVFQLKRRPPDHIPKKTKKHLEGKTPKGKERADGSGYGSTLPPEKLPYLVELSPDGSDSRDKPKLYRLQLSVTEVGTEKLDDNSIQLFGPGIQPHHCDLTNMDGVVTVTPRSMDAETYVEGQRISETTMLQSGMKVQFGASHVFKFVDPSQDHALAKRSVDGGLMVKGPRHKPGIVQETTFDLGGDIHSGTALPTSKSTTRLDSDRVSSASSTAERGMVKPMIRVEQQPDYRRQESRTQDASGPELILPASIEFRESSEDSFLSAIINYTNSSTVHFKLSPTYVLYMACRYVLSNQYRPDISPTERTHKVIAVVNKMVSMMEGVIQKQKNIAGALAFWMANASELLNFIKQDRDLSRITLDAQDVLAHLVQMAFKYLVHCLQSELNNYMPAFLDDPEENSLQRPKIDDVLHTLTGAMSLLRRCRVNAALTIQLFSQLFHFINMWLFNRLVTDPDSGLCSHYWGAIIRQQLGHIEAWAEKQGLELAADCHLSRIVQATTLLTMDKYAPDDIPNINSTCFKLNSLQLQALLQNYHCAPDEPFIPTDLIENVVTVAENTADELARSDGREVQLEEDPDLQLPFLLPEDGYSCDVVRNIPNGLQEFLDPLCQRGFCRLIPHTRSPGTWTIYFEGADYESHLLRENTELAQPLRKEPEIITVTLKKQNGMGLSIVAAKGAGQDKLGIYVKSVVKGGAADVDGRLAAGDQLLSVDGRSLVGLSQERAAELMTRTSSVVTLEVAKQGAIYHGLATLLNQPSPMMQRISDRRGSGKPRPKSEGFELYNNSTQNGSPESPQLPWAEYSEPKKLPGDDRLMKNRADHRSSPNVANQPPSPGGKSAYASGTTAKITSVSTGNLCTEEQTPPPRPEAYPIPTQTYTREYFTFPASKSQDRMAPPQNQWPNYEEKPHMHTDSNHSSIAIQRVTRSQEELREDKAYQLERHRIEAAMDRKSDSDMWINQSSSLDSSTSSQEHLNHSSKSVTPASTLTKSGPGRWKTPAAIPATPVAVSQPIRTDLPPPPPPPPVHYAGDFDGMSMDLPLPPPPSANQIGLPSAQVAAAERRKREEHQRWYEKEKARLEEERERKRREQERKLGQMRTQSLNPAPFSPLTAQQMKPEKPSTLQRPQETVIRELQPQQQPRTIERRDLQYITVSKEELSSGDSLSPDPWKRDAKEKLEKQQQMHIVDMLSKEIQELQSKPDRSAEESDRLRKLMLEWQFQKRLQESKQKDEDDEEEEDDDVDTMLIMQRLEAERRARTAMPAISVLDLVCSCFFPFGTFFLS

SEQ ID NO: 840635 - protein, 988 aa, Homo sapiens
MSAGGRDEERRKLADIIHHWNANRLDLFEISQPTEDLEFHGVMRFYFQDKAAGNFATKCIRVSSTATTQDVIETLAEKFRPDMRMLSSPKYSLYEVHVSGERRLDIDEKPLVVQLNWNKDDREGRFVLKNENDAIPPKAQSNGPEKQEKEGVIQNFKRTLSKKEKKEKKKREKEALRQASDKDDRPFQGEDVENSRLAAEVYKDMPETSFTRTISNPEVVMKRRRQQKLEKRMQEFRSSDGRPDSGGTLRIYADSLKPNIPYKTILLSTTDPADFAVAEALEKYGLEKENPKDYCIARVMLPPGAQHSDEKGAKEIILDDDECPLQIFREWPSDKGILVFQLKRRPPDHIPKKTKKHLEGKTPKGKERADGSGYGSTLPPEKLPYLVELSPDGSDSRDKPKLYRLQLSVTEVGTEKLDDNSIQLFGPGIQPHHCDLTNMDGVVTVTPRSMDAETYVEGQRISETTMLQSGMKVQFGASHVFKFVDPSQDHALAKRSVDGGLMVKGPRHKPGIVQETTFDLGGDIHSGTALPTSKSTTRLDSDRVSSASSTAERGMVKPMIRVEQQPDYRRQESRTQDASGPELILPASIEFRESSEDSFLSAIINYTNSSTVHFKLSPTYVLYMACRYVLSNQYRPDISPTERTHKVIAVVNKMVSMMEGVIQKQKNIAGALAFWMANASELLNFIKQDRDLSRITLDAQDVLAHLVQMAFKYLVHCLQSELNNYMPAFLDDPEENSLQRPKIDDVLHTLTGAMSLLRRCRVNAALTIQLFSQLFHFINMWLFNRLVTDPDSGLCSHYWGAIIRQQLGHIEAWAEKQGLELAADCHLSRIVQATTLLTMDKYAPDDIPNINSTCFKLNSLQLQALLQNYHCAPDEPFIPTDLIENVVTVAENTADELARSDGREVQLEEDPDLQLPFLLPEDGYSCDVVRNIPNGLQEFLDPLCQRGFCRLIPHTRSPGTWTIYFEGADYESHLLRENTELASILRVP

SEQ ID NO: 840636 - protein, 674 aa, Homo sapiens
MSAGGRDEERRKLADIIHHWNANRLDLFEISQPTEDLEFHGVMRFYFQDKAAGNFATKCIRVSSTATTQDVIETLAEKFRPDMRMLSSPKYSLYEVHVSGERRLDIDEKPLVVQLNWNKDDREGRFVLKNENDAIPPKAQSNGPEKQEKEGVIQNFKRTLSKKEKKEKKKREKEALRQASDKDDRPFQGEDVENSRLAAEVYKDMPETSFTRTISNPEVVMKRRRQQKLEKRMQEFRSSDGRPDSGGTLRIYADSLKPNIPYKTILLSTTDPADFAVAEALEKYGLEKENPKDYCIARVMLPPGAQHSDEKGAKEIILDDDECPLQIFREWPSDKGILVFQLKRRPPDHIPKKTKKHLEGKTPKGKERADGSGYGSTLPPEKLPYLVELSPDGSDSRDKPKLYRLQLSVTEVGTEKLDDNSIQLFGPGIQPHHCDLTNMDGVVTVTPRSMDAETYVEGQRISETTMLQSGMKVQFGASHVFKFVDPSQDHALAKRSVDGGLMVKGPRHKPGIVQETTFDLGGDIHSGTALPTSKSTTRLDSDRVSSASSTAERGMVKPMIRVEQQPDYRRQESRTQDASGPELILPASIEFRESSEDSFLSAIINYTNSSTVHFKLSPTYVLYMACRYVLSNQYRPDISPTERTHKVIAVVNKMVSMMEGVIQVRSSRPAMLLQ

SEQ ID NO: 840637 - protein, 113 aa, Homo sapiens
MSAGGRDEERRKLADIIHHWNANRLDLFEISQPTEDLEFHGVMRFYFQDKAAGNFATKCIRVSSTATTQDVIETLAEKFRPDMRMLSSPKYSLYEVHVSGGQCIQEGFARGMT

SEQ ID NO: 840638 - protein, 1612 aa, Homo sapiens
MSAGGRDEERRKLADIIHHWNANRLDLFEISQPTEDLEFHGVMRFYFQDKAAGNFATKCIRVSSTATTQDVIETLAEKFRPDMRMLSSPKYSLYEVHVSGERRLDIDEKPLVVQLNWNKDDREGRFVLKNENDAIPPKAQSNGPEKQEKEGVIQNFKRTLSKKEKKEKKKREKEALRQASDKDDRPFQGEDVENSRLAAEVYKDMPETSFTRTISNPEVVMKRRRQQKLEKRMQEFRSSDGRPDSGGTLRIYADSLKPNIPYKTILLSTTDPADFAVAEALEKYGLEKENPKDYCIARVMLPPGAQHSDEKGAKEIILDDDECPLQIFREWPSDKGILVFQLKRRPPDHIPKKTKKHLEGKTPKGKERADGSGYGSTLPPEKLPYLVELSPDGSDSRDKPKLYRLQLSVTEVGTEKLDDNSIQLFGPGIQPHHCDLTNMDGVVTVTPRSMDAETYVEGQRISETTMLQSGMKVQFGASHVFKFVDPSQDHALAKRSVDGGLMVKGPRHKPGIVQETTFDLGGDIHSGTALPTSKSTTRLDSDRVSSASSTAERGMVKPMIRVEQQPDYRRQESRTQDASGPELILPASIEFRESSEDSFLSAIINYTNSSTVHFKLSPTYVLYMACRYVLSNQYRPDISPTERTHKVIAVVNKMVSMMEGVIQKQKNIAGALAFWMANASELLNFIKQDRDLSRITLDAQDVLAHLVQMAFKYLVHCLQSELNNYMPAFLDDPEENSLQRPKIDDVLHTLTGAMSLLRRCRVNAALTIQLFSQLFHFINMWLFNRLVTDPDSGLCSHYWGAIIRQQLGHIEAWAEKQGLELAADCHLSRIVQATTLLTMDKYAPDDIPNINSTCFKLNSLQLQALLQNYHCAPDEPFIPTDLIENVVTVAENTADELARSDGREVQLEEDPDLQLPFLLPEDGYSCDVVRNIPNGLQEFLDPLCQRGFCRLIPHTRSPGTWTIYFEGADYESHLLRENTELAQPLRKEPEIITVTLKKQNGMGLSIVAAKGAGQDKLGIYVKSVVKGGAADVDGRLAAGDQLLSVDGRSLVGLSQERAAELMTRTSSVVTLEVAKQGAIYHGLATLLNQPSPMMQRISDRRGSGKPRPKSEGFELYNNSTQNGSPESPQLPWAEYSEPKKLPGDDRLMKNRADHRSSPNVANQPPSPGGKSAYASGTTAKITSVSTGNLCTEEQTPPPRPEAYPIPTQTYTREYFTFPASKSQDRMAPPQNQWPNYEEKPHMHTDSNHSSIAIQRVTRSQEELREDKAYQLERHRIEAAMDRKSDSDMWINQSSSLDSSTSSQEHLNHSSKSVTPASTLTKSGPGRWKTPAAIPATPVAVSQPIRTDLPPPPPPPPVHYAGDFDGMSMDLPLPPPPSANQIGLPSAQVAAAERRKREEHQRWYEKEKARLEEERERKRREQERKLGQMRTQSLNPAPFSPLTAQQMKPEKPSTLQRPQETVIRELQPQQQPRTIERRDLQYITVSKEELSSGDSLSPDPWKRDAKEKLEKQQQMHIVDMLSKEIQELQSKPDRSAEESDRLRKLMLEWQFQKRLQESKQKDEDDEEEEDDDVDTMLIMQRLEAERRARVKGGVLWLCPSVVPILASACFPWG

SEQ ID NO: 840639 - protein, 1870 aa, Homo sapiens
PTPGLLNRPNPLLALPPVRPHGPQDKDQAVESAQAEDYSQLPGEDHILEHLPARLNEGAHLRDGRRGGEAGWKEREERDRFYFQDKAAGNFATKCIRVSSTATTQDVIETLAEKFRPDMRMLSSPKYSLYEVHVSGERRLDIDEKPLVVQLNWNKDDREGRFVLKNENDAIPPKAQSNGPEKQEKEGVIQNFKRTLSKKEKKEKKKREKEALRQASDKDDRPFQGEDVENSRLAAEVYKDMPETSFTRTISNPEVVMKRRRQQKLEKRMQEFRSSDGRPDSGGTLRIYADSLKPNIPYKTILLSTTDPADFAVAEALEKYGLEKENPKDYCIARVMLPPGAQHSDEKGAKEIILDDDECPLQIFREWPSDKGILVFQLKRRPPDHIPKKTKKHLEGKTPKGKERADGSGYGSTLPPEKLPYLVELSPGRRNHFAYYNYHTYEDGSDSRDKPKLYRLQLSVTEVGTEKLDDNSIQLFGPGIQPHHCDLTNMDGVVTVTPRSMDAETYVEGQRISETTMLQSGMKVQFGASHVFKFVDPSQDHALAKRSVDGGLMVKGPRHKPGIVQETTFDLGGDIHSGTALPTSKSTTRLDSDRVSSASSTAERGMVKPMIRVEQQPDYRRQESRTQDASGPELILPASIEFRESSEDSFLSAIINYTNSSTVHFKLSPTYVLYMACRYVLSNQYRPDISPTERTHKVIAVVNKMVSMMEGVIQKQKNIAGALAFWMANASELLNFIKQDRDLSRITLDAQDVLAHLVQMAFKYLVHCLQSELNNYMPAFLDDPEENSLQRPKIDDVLHTLTGAMSLLRRCRVNAALTIQLFSQLFHFINMWLFNRLVTDPDSGLCSHYWGAIIRQQLGHIEAWAEKQGLELAADCHLSRIVQATTLLTMDKYAPDDIPNINSTCFKLNSLQLQALLQNYHCAPDEPFIPTDLIENVVTVAENTADELARSDGREVQLEEDPDLQLPFLLPEDGYSCDVVRNIPNGLQEFLDPLCQRGFCRLIPHTRSPGTWTIYFEGADYESHLLRENTELAQPLRKEPEIITVTLKKQNGMGLSIVAAKGAGQDKLGIYVKSVVKGGAADVDGRLAAGDQLLSVDGRSLVGLSQERAAELMTRTSSVVTLEVAKQGAIYHGLATLLNQPSPMMQRISDRRGSGKPRPKSEGFELYNNSTQNGSPESPQLPWAEYSEPKKLPGDDRLMKNRADHRSSPNVANQPPSPGGKSAYASGTTAKITSVSTGNLCTEEQTPPPRPEAYPIPTQTYTREYFTFPASKSQDRMAPPQNQWPNYEEKPHMHTDSNHSSIAIQRVTRSQEELREDKAYQLERHRIEAAMDRKSDSDMWINQSSSLDSSTSSQEHLNHSSKSVTPASTLTKSGPGRWKTPAAIPATPVAVSQPIRTDLPPPPPPPPVHYAGDFDGMSMDLPLPPPPSANQIGLPSAQVAAAERRKREEHQRWYEKEKARLEEERERKRREQERKLGQMRTQSLNPAPFSPLTAQQMKPEKPSTLQRPQETVIRELQPQQQPRTIERRDLQYITVSKEELSSGDSLSPDPWKRDAKEKLEKQQQMHIVDMLSKEIQELQSKPDRSAEESDRLRKLMLEWQFQKRLQESKQKDEDDEEEEDDDVDTMLIMQRLEAERRARTAMPAISVLDLLQDEERRRQQQLEEMRKREAEDRARQEEERRRQEEERTKRDAEEKRRQEEGYYSRLEAERRRQHDEAARRLLEPEAPGLCRPPLPRDYEPPSPSPAPGAPPPPPQRNASYLKTQVLSPDSLFTAKFVAYNEEEEEEDCSLAGPNSYPGSTGAAVGAHDACRDAKEKRSKSQDADSPGSSGAPENLTFKERQRLFSQGQDVSNKVKASRKLTELENELNTK

SEQ ID NO: 840640 - protein, 1883 aa, Homo sapiens [sequence omitted]

SEQ ID NO: 840641 - protein, 736 aa, Homo sapiens
MKNRADHRSSPNVANQPPSPGGKSAYASGTTAKITSVSTGNLCTEEQTPPPRPEAYPIPTQTYTREYFTFPASKSQDRMAPPQNQWPNYEEKPHMHTDSNHSSIAIQRVTRSQEELREDKAYQLERHRIEAAMDRKSDSDMWINQSSSLDSSTSSQEHLNHSSKSVTPASTLTKSGPGRWKTPAAIPATPVAVSQPIRTDLPPPPPPPPVHYAGDFDGMSMDLPLPPPPSANQIGLPSAQVAAAERRKREEHQRWYEKEKARLEEERERKRREQERKLGQMRTQSLNPAPFSPLTAQQMKPEKPSTLQRPQETVIRELQPQQQPRTIERRDLQYITVSKEELSSGDSLSPDPWKRDAKEKLEKQQQMHIVDMLSKEIQELQSKPDRSAEESDRLRKLMLEWQFQKRLQESKQKDEDDEEEEDDDVDTMLIMQRLEAERRARLQDEERRRQQQLEEMRKREAEDRARQEEERRRQEEERTKRDAEEKRRQEEGYYSRLEAERRRQHDEAARRLLEPEAPGLCRPPLPRDYEPPSPSPAPGAPPPPPQRNASYLKTQVLSPDSLFTAKFVAYNEEEEEEDCSLAGQDKYSSTRKSHGDLLPAPLKPRPPPCQPRPASDGVFLSNSFQPPSAKANSTAHKKGQPLPPPKKSSSYHPSHCKGPNSYPGSTGAAVGAHDACRDAKEKRSKSQDADSPGSSGAPENLTFKERQRLFSQGQDVSNKVKASRKLTELENELNTK

SEQ ID NO: 840642 - protein, 1883 aa, Homo sapiens [sequence omitted]

SEQ ID NO: 840643 - protein, 281 aa, Homo sapiens
MRKREAEDRARQEEERRRQEEERTKRDAEEKRRQEEGYYSRLEAERRRQHDEAARRLLEPEAPGLCRPPLPRDYEPPSPSPAPGAPPPPPQRNASYLKTQVLSPDSLFTAKFVAYNEEEEEEDCSLAGQDKYSSTRKSHGDLLPAPLKPRPPPCQPRPASDGVFLSNSFQPPSAKANSTAHKKGQPLPPPKKSSSYHPSHCKGPNSYPGSTGAAVGAHDACRDAKEKRSKSQDADSPGSSGAPENLTFKERQRLFSQGQDVSNKVKASRKLTELENELNTK

SEQ ID NO: 840644 - protein, 1883 aa, Homo sapiens [sequence omitted]

SEQ ID NO: 840645 - protein, 1637 aa, Homo sapiens
MSAGGRDEERRKLADIIHHWNANRLDLFEISQPTEDLEFHGVMRFYFQDKAAGNFATKCIRVSSTATTQDVIETLAEKFRPDMRMLSSPKYSLYEVHVSGERRLDIDEKPLVVQLNWNKDDREGRFVLKNENDAIPPKAQSNGPEKQEKEGVIQNFKRTLSKKEKKEKKKREKEALRQASDKDDRPFQGEDVENSRLAAEVYKDMPETSFTRTISNPEVVMKRRRQQKLEKRMQEFRSSDGRPDSGGTLRIYADSLKPNIPYKTILLSTTDPADFAVAEALEKYGLEKENPKDYCIARVMLPPGAQHSDEKGAKEIILDDDECPLQIFREWPSDKGILVFQLKRRPPDHIPKKTKKHLEGKTPKGKERADGSGYGSTLPPEKLPYLVELSPDGSDSRDKPKLYRLQLSVTEVGTEKLDDNSIQLFGPGIQPHHCDLTNMDGVVTVTPRSMDAETYVEGQRISETTMLQSGMKVQFGASHVFKFVDPSQDHALAKRSVDGGLMVKGPRHKPGIVQETTFDLGGDIHSGTALPTSKSTTRLDSDRVSSASSTAERGMVKPMIRVEQQPDYRRQESRTQDASGPELILPASIEFRESSEDSFLSAIINYTNSSTVHFKLSPTYVLYMACRYVLSNQYRPDISPTERTHKVIAVVNKMVSMMEGVIQKQKNIAGALAFWMANASELLNFIKQDRDLSRITLDAQDVLAHLVQMAFKYLVHCLQSELNNYMPAFLDDPEENSLQRPKIDDVLHTLTGAMSLLRRCRVNAALTIQLFSQLFHFINMWLFNRLVTDPDSGLCSHYWGAIIRQQLGHIEAWAEKQGLELAADCHLSRIVQATTLLTMDKYAPDDIPNINSTCFKLNSLQLQALLQNYHCAPDEPFIPTDLIENVVTVAENTADELARSDGREVQLEEDPDLQLPFLLPEDGYSCDVVRNIPNGLQEFLDPLCQRGFCRLIPHTRSPGTWTIYFEGADYESHLLRENTELAQPLRKEPEIITVTLKKQNGMGLSIVAAKGAGQDKLGIYVKSVVKGGAADVDGRLAAGDQLLSVDGRSLVGLSQERAAELMTRTSSVVTLEVAKQGAIYHGLATLLNQPSPMMQRISDRRGSGKPRPKSEGFELYNNSTQNGSPESPQLPWAEYSEPKKLPGDDRLMKNRADHRSSPNVANQPPSPGGKSAYASGTTAKITSVSTGNLCTEEQTPPPRPEAYPIPTQTYTREYFTFPASKSQDRMAPPQNQWPNYEEKPHMHTDSNHSSIAIQRVTRSQEELREDKAYQLERHRIEAAMDRKSDSDMWINQSSSLDSSTSSQEHLNHSSKSVTPASTLTKSGPGRWKTPAAIPATPVAVSQPIRTDLPPPPPPPPVHYAGDFDGMSMDLPLPPPPSANQIGLPSAQVAAAERRKREEHQRWYEKEKARLEEERERKRREQERKLGQMRTQSLNPAPFSPLTAQQMKPEKPSTLQRPQETVIRELQPQQQPRTIERRDLQYITVSKEELSSGDSLSPDPWKRDAKEKLEKQQQMHIVDMLSKEIQELQSKPDRSAEESDRLRKLMLEWQFQKRLQESKQKDEDDEEEEDDDVDTMLIMQRLEAERRARLQDEERRRQQQLEEMRKREAEDRARQEEERRRQEEERTKRDAEEKVMVL

SEQ ID NO: 840646 - protein, 674 aa, Homo sapiens; identical to SEQ ID NO: 840636

SEQ ID NO: 840647 - protein, 511 aa, Homo sapiens
MSAGGRDEERRKLADIIHHWNANRLDLFEISQPTEDLEFHGVMRFYFQDKAAGNFATKCIRVSSTATTQDVIETLAEKFRPDMRMLSSPKYSLYEVHVSGERRLDIDEKPLVVQLNWNKDDREGRFVLKNENDAIPPKAQSNGPEKQEKEGVIQNFKRTLSKKEKKEKKKREKEALRQASDKDDRPFQGEDVENSRLAAEVYKDMPETSFTRTISNPEVVMKRRRQQKLEKRMQEFRSSDGRPDSGGTLRIYADSLKPNIPYKTILLSTTDPADFAVAEALEKYGLEKENPKDYCIARVMLPPGAQHSDEKGAKEIILDDDECPLQIFREWPSDKGILVFQLKRRPPDHIPKKTKKHLEGKTPKGKERADGSGYGSTLPPEKLPYLVELSPDGSDSRDKPKLYRLQLSVTEVGTEKLDDNSIQLFGPGIQPHHCDLTNMDGVVTVTPRSMDAETYVEGQRISETTMLQSGMKVQFGASHVFKFVDPSQDHALAKRSVDGGLMVKGPRHKPG

SEQ ID NO: 840648 - protein, 137 aa, Homo sapiens
MPQAGWKKARDCPIDVGRGRLDSVMLTVFSAGPCGSPQRPWVPSHSRSPMCVYIYYIYMYLLTLESPQGGLVSAWTVSVHSVSFLSSIKEIQKQAVTPGVCTLGTRVTPSLRAPDPRSRGQDTVVFTGPGKGALPCV

SEQ ID NO: 840649 - protein, 110 aa, Homo sapiens
HENIVRKRNKSCHKCALCIIWNNRCSDTSQGVLQPVINIYSNIFLLYNTLGHSCLGKLPTHHVGKEHFLPDCNVIAKNQSQNQEIKPPKFFNCSCCFWAMWQVHISIHMV

SEQ ID NO: 840650 - protein, 2063 aa, Homo sapiens
MVLDDLPNLEDIYTSLCSSTMEDSEMDFDSGLEDDDTKSDSILEDSTIFVAFKGNIDDKDFKWKLDAILKNVPNLLHMESSKLKVQKVEPWNSVRVTFNIPREAAERLRILAQSNNQQLRDLGILSVQIEGEGAINLALAQNRSQDVRMNGPMGAGNSVRMEAGFPMASGPGIIRMNNPATVMIPPGGNVSSSMMAPGPNPELQPRTPRPASQSDAMDPLLSGLHIQQQSHPSGSLAPPHHPMQPVSVNRQMNPANFPQLQQQQQQQQQQQQQQQQQQQQQQQQQLQARPPQQHQQQQPQGIRPQFTAPTQVPVPPGWNQLPSGALQPPPAQGSLGTMTANQGWKKAPLPGPMQQQLQARPSLATVQTPSHPPPPYPFGSQQASQAHTNFPQMSNPGQFTAPQMKSLQGGPSRVPTPLQQPHLTNKSPASSPSSFQQGSPASSPTVNQTQQQMGPRPPQNNPLPQGFQQPVSSPGRNPMVQQGNVPPNFMVMQQQPPNQGPQSLHPGLGGMPKRLPPGFSAGQANPNFMQGQVPSTTATTPGNSGAPQLQANQNVQHAGGQGAGPPQNQMQVSHGPPNMMQPSLMGIHGNMNNQQAGTSGVPQVNLSNMQGQPQQGPPSQLMGMHQQIVPSQGQMVQQQGTLNPQNPMILSRAQLMPQGQMMVNPPSQNLGPSPQRMTPPKQMLSQQGPQMMAPHNQMMGPQGQVLLQQNPMIEQIMTNQMQGNKQQFNTQNQSNVMPGPAQIMRGPTPNMQGNMVQFTGQMSGQMLPQQGPVNNSPSQVMGIQGQVLRPPGPSPHMAQQHGDPATTANNDVSLSQMMPDVSIQQTNMVPPHVQAMQGNSASGNHFSGHGMSFNAPFSGAPNGNQMSCGQNPGFPVNKDVTLTSPLLVNLLQSDISAGHFGVNNKQNNTNANKPKKKKPPRKKKNSQQDLNTPDTRPAGLEEADQPPLPGEQGINLDNSGPKLPEFSNRPPGYPSQPVEQRPLQQMPPQLMQHVAPPPQPPQQQPQPQLPQQQQPPPPSQPQSQQQQQQQQQMMMMLMMQQDPKSVRLPVSQNVHPPRGPLNPDSQRMPMQQSGSVPVMVSLQGPASVPPSPDKQRMPMPVNTPLGSNSRKMVYQESPQNPSSSPLAEMASLPEASGSEAPSVPGGPNNMPSHVVLPQNQLMMTGPKPGPSPLSATQGATPQQPPVNSLPSSHGHHFPNVAAPTQTSRPKTPNRASPRPYYPQTPNNRPPSTEPSEISLSPERLNASIAGLFPPQINIPLPPRPNLNRGFDQQGLNPTTLKAIGQAPSNLTMNPSNFATPQTHKLDSVVVNSGKQSNSGATKRASPSNSRRSSPGSSRKTTPSPGRQNSKAPKLTLASQTNAALLQNVELPRNVLVSPTPLANPPVPGSFPNNSGLNPQNSTVSVAAVGGVVEDNKESLNVPQDSDCQNSQSRKEQVNIELKAVPAQEVKMVVPEDQSKKDGQPSDPNKLPSVEENKNLVSPAMREAPTSLSQLLDNSGAPNVTIKPPGLTDLEVTPPVVSGEDLKKASVIPTLQDLSSSKEPSNSLNLPHSNELCSSLVHPELSEVSSNVAPSIPPVMSRPVSSSSISTPLPPNQITVFVTSNPITTSANTSAALPTHLQSALMSTVVTMPNAGSKVMVSEGQSAAQSNARPQFITPVFINSSSIIQVMKGSQPSTIPAAPLTTNSGLMPPSVAVVGPLHIPQNIKFSSAPVPPNALSSSPAPNIQTGRPLVLSSRATPVQLPSPPCTSSPVVPSHPPVQQVKELNPDEASPQVNTSADQNTLPSSQSTTMVSPLLTNSPGSSGNRRSPVSSSKGKGKVDKIGQILLTKACKKVTGSLEKGEEQYGADGETEGQGLDTTAPGLMGTEQLSTELDSKTPTPPAPTLLKMTSSPVGPGTASAGPSLPGGALPTSVRSIVTTLVPSELISAVPTTKSNHGGIASESLAGGLVEEKVGSHPELLPSIAPSQNLVSKETSTTALQASVARPELEVNAAIVSGQSSEPKEIVEKSKIPGRRNSRTEEPTVASESVENGHRKRSSRPASASSSTKDITSAVQSKRRKSK

SEQ ID NO: 840651 - protein, 2063 aa, Homo sapiens; identical to SEQ ID NO: 840650

SEQ ID NO: 840652 - protein, 1745 aa, Homo sapiens
MKIHRIGKYYVGSLYHDYTKYKSLSSKNIAVLNPMQQQLQARPSLATVQTPSHPPPPYPFGSQQASQAHTNFPQMSNPGQFTAPQMKSLQGGPSRVPTPLQQPHLTNKSPASSPSSFQQGSPASSPTVNQTQQQMGPRPPQNNPLPQGFQQPVSSPGRNPMVQQGNVPPNFMVMQQQPPNQGPQSLHPGLGGMPKRLPPGFSAGQANPNFMQGQVPSTTATTPGNSGAPQLQANQNVQHAGGQGAGPPQNQMQVSHGPPNMMQPSLMGIHGNMNNQQAGTSGVPQVNLSNMQGQPQQGPPSQLMGMHQQIVPSQGQMVQQQGTLNPQNPMILSRAQLMPQGQMMVNPPSQNLGPSPQRMTPPKQMLSQQGPQMMAPHNQMMGPQGQVLLQQNPMIEQIMTNQMQGNKQQFNTQNQSNVMPGPAQIMRGPTPNMQGNMVQFTGQMSGQMLPQQGPVNNSPSQVMGIQGQVLRPPGPSPHMAQQHGDPATTANNDVSLSQMMPDVSIQQTNMVPPHVQAMQGNSASGNHFSGHGMSFNAPFSGAPNGNQMSCGQNPGFPVNKDVTLTSPLLVNLLQSDISAGHFGVNNKQNNTNANKPKKKKPPRKKKNSQQDLNTPDTRPAGLEEADQPPLPGEQGINLDNSGPKLPEFSNRPPGYPSQPVEQRPLQQMPPQLMQHVAPPPQPPQQQPQPQLPQQQQPPPPSQPQSQQQQQQQQQMMMMLMMQQDPKSVRLPVSQNVHPPRGPLNPDSQRMPMQQSGSVPVMVSLQGPASVPPSPDKQRMPMPVNTPLGSNSRKMVYQESPQNPSSSPLAEMASLPEASGSEAPSVPGGPNNMPSHVVLPQNQLMMTGPKPGPSPLSATQGATPQQPPVNSLPSSHGHHFPNVAAPTQTSRPKTPNRASPRPYYPQTPNNRPPSTEPSEISLSPERLNASIAGLFPPQINIPLPPRPNLNRGFDQQGLNPTTLKAIGQAPSNLTMNPSNFATPQTHKLDSVVVNSGKQSNSGATKRASPSNSRRSSPGSSRKTTPSPGRQNSKAPKLTLASQTNAALLQNVELPRNVLVSPTPLANPPVPGSFPNNSGLNPQNSTVSVAAVGGVVEDNKESLNVPQDSDCQNSQSRKEQVNIELKAVPAQEVKMVVPEDQSKKDGQPSDPNKLPSVEENKNLVSPAMREAPTSLSQLLDNSGAPNVTIKPPGLTDLEVTPPVVSGEDLKKASVIPTLQDLSSSKEPSNSLNLPHSNELCSSLVHPELSEVSSNVAPSIPPVMSRPVSSSSISTPLPPNQITVFVTSNPITTSANTSAALPTHLQSALMSTVVTMPNAGSKVMVSEGQSAAQSNARPQFITPVFINSSSIIQVMKGSQPSTIPAAPLTTNSGLMPPSVAVVGPLHIPQNIKFSSAPVPPNALSSSPAPNIQTGRPLVLSSRATPVQLPSPPCTSSPVVPSHPPVQQVKELNPDEASPQVNTSADQNTLPSSQSTTMVSPLLTNSPGSSGNRRSPVSSSKGKGKVDKIGQILLTKACKKVTGSLEKGEEQYGADGETEGQGLDTTAPGLMGTEQLSTELDSKTPTPPAPTLLKMTSSPVGPGTASAGPSLPGGALPTSVRSIVTTLVPSELISAVPTTKSNHGGIASESLAGGLVEEKVGSHPELLPSIAPSQNLVSKETSTTALQASVARPELEVNAAIVSGQSSEPKEIVEKSKIPGRRNSRTEEPTVASESVENGHRKRSSRPASASSSTKDITSAVQSKRRKSK

SEQ ID NO: 840653 - protein, 485 aa, Homo sapiens
MSRPVSSSSISTPLPPNQITVFVTSNPITTSANTSAALPTHLQSALMSTVVTMPNAGSKVMVSEGQSAAQSNARPQFITPVFINSSSIIQVMKGSQPSTIPAAPLTTNSGLMPPSVAVVGPLHIPQNIKFSSAPVPPNALSSSPAPNIQTGRPLVLSSRATPVQLPSPPCTSSPVVPSHPPVQQVKELNPDEASPQVNTSADQNTLPSSQSTTMVSPLLTNSPGSSGNRRSPVSSSKGKGKVDKIGQILLTKACKKVTGSLEKGEEQYGADGETEGQGLDTTAPGLMGTEQLSTELDSKTPTPPAPTLLKMTSSPVGPGTASAGPSLPGGALPTSVRSIVTTLVPSELISAVPTTKSNHGGIASESLAGGLVEEKVGSHPELLPSIAPSQNLVSKETSTTALQASVARPELEVNAAIVSGQSSEPKEIVEKSKIPGRRNSRTEEPTVASESVENGHRKRSSRPASASSSTKDITSAVQSKRRKSK

SEQ ID NO: 840654 - protein, 1969 aa, Homo sapiens
MVLDDLPNLEDIYTSLCSSTMEDSEMDFDSGLEDDDTKSDSILEDSTIFVAFKGNIDDKDFKWKLDAILKNVPNLLHMESSKLKVQKVEPWNSVRVTFNIPREAAERLRILAQSNNQQLRDLGILSVQIEGEGAINLALAQNRSQDVRMNGPMGAGNSVRMEAGFPMASGPGIIRMNNPATVMIPPGGNVSSSMMAPGPNPELQPRTPRPASQSDAMDPLLSGLHIQQQSHPSGSLAPPHHPMQPVSVNRQMNPANFPQLQQQQQQQQQQQQQQQQQQQQQQQQQLQARPPQQHQQQQPQGIRPQFTAPTQVPVPPGWNQLPSGALQPPPAQGSLGTMTANQGWKKAPLPGPMQQQLQARPSLATVQTPSHPPPPYPFGSQQASQAHTNFPQMSNPGQFTAPQMKSLQGGPSRVPTPLQQPHLTNKSPASSPSSFQQGSPASSPTVNQTQQQMGPRPPQNNPLPQGFQQPVSSPGRNPMVQQGNVPPNFMVMQQQPPNQGPQSLHPGLGGMPKRLPPGFSAGQANPNFMQGQVPSTTATTPGNSGAPQLQANQNVQHAGGQGAGPPQNQMQVSHGPPNMMQPSLMGIHGNMNNQQAGTSGVPQVNLSNMQGQPQQGPPSQLMGMHQQIVPSQGQMVQQQGTLNPQNPMILSRAQLMPQGQMMVNPPSQNLGPSPQRMTPPKQMLSQQGPQMMAPHNQMMGPQGQVLLQQNPMIEQIMTNQMQGNKQQFNTQNQSNVMPGPAQIMRGPTPNMQGNMVQFTGQMSGQMLPQQGPVNNSPSQVMGIQGQVLRPPGPSPHMAQQHGDPATTANNDVSLSQMMPDVSIQQTNMVPPHVQAMQGNSASGNHFSGHGMSFNAPFSGAPNGNQMSCGQNPGFPVNKDVTLTSPLLVNLLQSDISAGHFGVNNKQNNTNANKPKKKKPPRKKKNSQQDLNTPDTRPAGLEEADQPPLPGEQGINLDNSGPKLPEFSNRPPGYPSQPVEQRPLQQMPPQLMQHVAPPPQPPQQQPQPQLPQQQQPPPPSQPQSQQQQQQQQQMMMMLMMQQDPKSVRLPVSQNVHPPRGPLNPDSQRMPMQQSGSVPVMVSLQGPASVPPSPDKQRMPMPVNTPLGSNSRKMVYQESPQNPSSSPLAEMASLPEASGSEAPSVPGGPNNMPSHVVLPQNQLMMTGPKPGPSPLSATQGATPQQPPVNSLPSSHGHHFPNVAAPTQTSRPKTPNRASPRPYYPQTPNNRPPSTEPSEISLSPERLNASIAGLFPPQINIPLPPRPNLNRGFDQQGLNPTTLKAIGQAPSNLTMNPSNFATPQTHKLDSVVVNSGKQSNSGATKRASPSNSRRSSPGSSRKTTPSPGRQNSKAPKLTLASQTNAALLQNVELPRNVLVSPTPLANPPVPGSFPNNSGLNPQNSTVSVAAVGGVVEDNKESLNVPQDSDCQNSQSRKEQVNIELKAVPAQEVKMVVPEDQSKKDGQPSDPNKLPSVEENKNLVSPAMREAPTSLSQLLDNSGAPNVTIKPPGLTDLEVTPPVVSGEDLKKASVIPTLQDLSSSKEPSNSLNLPHSNELCSSLVHPELSEVSSNVAPSIPPVMSRPVSSSSISTPLPPNQITVFVTSNPITTSANTSAALPTHLQSALMSTVVTMPNAGSKVMVSEGQSAAQSNARPQFITPVFINSSSIIQVMKGSQPSTIPAAPLTTNSGLMPPSVAVVGPLHIPQNIKFSSAPVPPNALSSSPAPNIQTGRPLVLSSRATPVQLPSPPCTSSPVVPSHPPVQQVKELNPDEASPQVNTSADQNTLPSSQSTTMVSPLLTNSPGSSGNRRSPVSSSKGKGKVDKIGQILLTKACKKVTGSLEKGEEQYGADGETEGQGLDTTAPGLMGTEQLSTELDSKTPTPPAPTLLKMTSSPVGPGTASAGPSLPGGALPTSVRSIVTTLVPSELISAVPTTKSNHGGIASESLAGGLVEEKVGSHPELLPSIVAGRN

SEQ ID NO: 840655 - protein, 125 aa, Homo sapiens
GSGGTAWNQNAKPSLTVRSGDLVDTAAPSQNLVSKETSTTALQASVARPELEVNAAIVSGQSSEPKEIVEKSKIPGRRNSRTEEPTVASESVENGHRKRSSRPASASSSTKDITSAVQSKRRKSK

SEQ ID NO: 840656 - protein, 2063 aa, Homo sapiens; identical to SEQ ID NO: 840650

SEQ ID NO: 840657 - protein, 2063 aa, Homo sapiens; identical to SEQ ID NO: 840650

SEQ ID NO: 840658 - protein, 1847 aa, Homo sapiens
MDPLLSGLHIQQQSHPSGSLAPPHHPMQPVSVNRQMNPANFPQLQQQQQQQQQQQQQQQQQQQQQQQQQLQARPPQQHQQQQPQGIRPQFTAPTQVPVPPGWNQLPSGALQPPPAQGSLGTMTANQGWKKAPLPGPMQQQLQARPSLATVQTPSHPPPPYPFGSQQASQAHTNFPQMSNPGQFTAPQMKSLQGGPSRVPTPLQQPHLTNKSPASSPSSFQQGSPASSPTVNQTQQQMGPRPPQNNPLPQGFQQPVSSPGRNPMVQQGNVPPNFMVMQQQPPNQGPQSLHPGLGGMPKRLPPGFSAGQANPNFMQGQVPSTTATTPGNSGAPQLQANQNVQHAGGQGAGPPQNQMQVSHGPPNMMQPSLMGIHGNMNNQQAGTSGVPQVNLSNMQGQPQQGPPSQLMGMHQQIVPSQGQMVQQQGTLNPQNPMILSRAQLMPQGQMMVNPPSQNLGPSPQRMTPPKQMLSQQGPQMMAPHNQMMGPQGQVLLQQNPMIEQIMTNQMQGNKQQFNTQNQSNVMPGPAQIMRGPTPNMQGNMVQFTGQMSGQMLPQQGPVNNSPSQVMGIQGQVLRPPGPSPHMAQQHGDPATTANNDVSLSQMMPDVSIQQTNMVPPHVQAMQGNSASGNHFSGHGMSFNAPFSGAPNGNQMSCGQNPGFPVNKDVTLTSPLLVNLLQSDISAGHFGVNNKQNNTNANKPKKKKPPRKKKNSQQDLNTPDTRPAGLEEADQPPLPGEQGINLDNSGPKLPEFSNRPPGYPSQPVEQRPLQQMPPQLMQHVAPPPQPPQQQPQPQLPQQQQPPPPSQPQSQQQQQQQQQMMMMLMMQQDPKSVRLPVSQNVHPPRGPLNPDSQRMPMQQSGSVPVMVSLQGPASVPPSPDKQRMPMPVNTPLGSNSRKMVYQESPQNPSSSPLAEMASLPEASGSEAPSVPGGPNNMPSHVVLPQNQLMMTGPKPGPSPLSATQGATPQQPPVNSLPSSHGHHFPNVAAPTQTSRPKTPNRASPRPYYPQTPNNRPPSTEPSEISLSPERLNASIAGLFPPQINIPLPPRPNLNRGFDQQGLNPTTLKAIGQAPSNLTMNPSNFATPQTHKLDSVVVNSGKQSNSGATKRASPSNSRRSSPGSSRKTTPSPGRQNSKAPKLTLASQTNAALLQNVELPRNVLVSPTPLANPPVPGSFPNNSGLNPQNSTVSVAAVGGVVEDNKESLNVPQDSDCQNSQSRKEQVNIELKAVPAQEVKMVVPEDQSKKDGQPSDPNKLPSVEENKNLVSPAMREAPTSLSQLLDNSGAPNVTIKPPGLTDLEVTPPVVSGEDLKKASVIPTLQDLSSSKEPSNSLNLPHSNELCSSLVHPELSEVSSNVAPSIPPVMSRPVSSSSISTPLPPNQITVFVTSNPITTSANTSAALPTHLQSALMSTVVTMPNAGSKVMVSEGQSAAQSNARPQFITPVFINSSSIIQVMKGSQPSTIPAAPLTTNSGLMPPSVAVVGPLHIPQNIKFSSAPVPPNALSSSPAPNIQTGRPLVLSSRATPVQLPSPPCTSSPVVPSHPPVQQVKELNPDEASPQVNTSADQNTLPSSQSTTMVSPLLTNSPGSSGNRRSPVSSSKGKGKVDKIGQILLTKACKKVTGSLEKGEEQYGADGETEGQGLDTTAPGLMGTEQLSTELDSKTPTPPAPTLLKMTSSPVGPGTASAGPSLPGGALPTSVRSIVTTLVPSELISAVPTTKSNHGGIASESLAGGLVEEKVGSHPELLPSIAPSQNLVSKETSTTALQASVARPELEVNAAIVSGQSSEPKEIVEKSKIPGRRNSRTEEPTVASESVENGHRKRSSRPASASSSTKDITSAVQSKRRKSK

SEQ ID NO: 840659 - protein, 1151 aa, Homo sapiens
SRVSPCAPRKKKNSQQDLNTPDTRPAGLEEADQPPLPGEQGINLDNSGPKLPEFSNRPPGYPSQPVEQRPLQQMPPQLMQHVAPPPQPPQQQPQPQLPQQQQPPPPSQPQSQQQQQQQQQMMMMLMMQQDPKSVRLPVSQNVHPPRGPLNPDSQRMPMQQSGSVPVMVSLQGPASVPPSPDKQRMPMPVNTPLGSNSRKMVYQESPQNPSSSPLAEMASLPEASGSEAPSVPGGPNNMPSHVVLPQNQLMMTGPKPGPSPLSATQGATPQQPPVNSLPSSHGHHFPNVAAPTQTSRPKTPNRASPRPYYPQTPNNRPPSTEPSEISLSPERLNASIAGLFPPQINIPLPPRPNLNRGFDQQGLNPTTLKAIGQAPSNLTMNPSNFATPQTHKLDSVVVNSGKQSNSGATKRASPSNSRRSSPGSSRKTTPSPGRQNSKAPKLTLASQTNAALLQNVELPRNVLVSPTPLANPPVPGSFPNNSGLNPQNSTVSVAAVGGVVEDNKESLNVPQDSDCQNSQSRKEQVNIELKAVPAQEVKMVVPEDQSKKDGQPSDPNKLPSVEENKNLVSPAMREAPTSLSQLLDNSGAPNVTIKPPGLTDLEVTPPVVSGEDLKKASVIPTLQDLSSSKEPSNSLNLPHSNELCSSLVHPELSEVSSNVAPSIPPVMSRPVSSSSISTPLPPNQITVFVTSNPITTSANTSAALPTHLQSALMSTVVTMPNAGSKVMVSEGQSAAQSNARPQFITPVFINSSSIIQVMKGSQPSTIPAAPLTTNSGLMPPSVAVVGPLHIPQNIKFSSAPVPPNALSSSPAPNIQTGRPLVLSSRATPVQLPSPPCTSSPVVPSHPPVQQVKELNPDEASPQVNTSADQNTLPSSQSTTMVSPLLTNSPGSSGNRRSPVSSSKGKGKVDKIGQILLTKACKKVTGSLEKGEEQYGADGETEGQGLDTTAPGLMGTEQLSTELDSKTPTPPAPTLLKMTSSPVGPGTASAGPSLPGGALPTSVRSIVTTLVPSELISAVPTTKSNHGGIASESLAGGLVEEKVGSHPELLPSIAPSQNLVSKETSTTALQASVARPELEVNAAIVSGQSSEPKEIVEKSKIPGRRNSRTEEPTVASESVENGHRKRSSRPASASSSTKDITSAVQSKRRKSK

SEQ ID NO: 840660 - protein, 1070 aa, Homo sapiens
MVLDDLPNLEDIYTSLCSSTMEDSEMDFDSGLEDDDTKSDSILEDSTIFVAFKGNIDDKDFKWKLDAILKNVPNLLHMESSKLKVQKVEPWNSVRVTFNIPREAAERLRILAQSNNQQLRDLGILSVQIEGEGAINLALAQNRSQDVRMNGPMGAGNSVRMEAGFPMASGPGIIRMNNPATVMIPPGGNVSSSMMAPGPNPELQPRTPRPASQSDAMDPLLSGLHIQQQSHPSGSLAPPHHPMQPVSVNRQMNPANFPQLQQQQQQQQQQQQQQQQQQQQQQQQQLQARPPQQHQQQQPQGIRPQFTAPTQVPVPPGWNQLPSGALQPPPAQGSLGTMTANQGWKKAPLPGPMQQQLQARPSLATVQTPSHPPPPYPFGSQQASQAHTNFPQMSNPGQFTAPQMKSLQGGPSRVPTPLQQPHLTNKSPASSPSSFQQGSPASSPTVNQTQQQMGPRPPQNNPLPQGFQQPVSSPGRNPMVQQGNVPPNFMVMQQQPPNQGPQSLHPGLGGMPKRLPPGFSAGQANPNFMQGQVPSTTATTPGNSGAPQLQANQNVQHAGGQGAGPPQNQMQVSHGPPNMMQPSLMGIHGNMNNQQAGTSGVPQVNLSNMQGQPQQGPPSQLMGMHQQIVPSQGQMVQQQGTLNPQNPMILSRAQLMPQGQMMVNPPSQNLGPSPQRMTPPKQMLSQQGPQMMAPHNQMMGPQGQVLLQQNPMIEQIMTNQMQGNKQQFNTQNQSNVMPGPAQIMRGPTPNMQGNMVQFTGQMSGQMLPQQGPVNNSPSQVMGIQGQVLRPPGPSPHMAQQHGDPATTANNDVSLSQMMPDVSIQQTNMVPPHVQAMQGNSASGNHFSGHGMSFNAPFSGAPNGNQMSCGQNPGFPVNKDVTLTSPLLVNLLQSDISAGHFGVNNKQNNTNANKPKKKKPPRKKKNSQQDLNTPDTRPAGLEEADQPPLPGEQGINLDNSGPKLPEFSNRPPAPSQNLVSKETSTTALQASVARPELEVNAAIVSGQSSEPKEIVEKSKIPGRRNSRTEEPTVASESVENGHRKRSSRPASASSSTKDITSAVQSKRRKSK

SEQ ID NO: 840661 - protein, 437 aa, Homo sapiens
MAGGPPKALPSTGPHSLRDMPHPLAGSSSEEAVGGDSTPSPDLLMARSFGDKDLILPNGGTPAGTSSPASSSSLLNRLQLDDDIDGETRDLFVIVDDPKKHVCTMETYITYRITTKSTRVEFDLPEYSVRRRYQDFDWLRSKLEESQPTHLIPPLPEKFVVKGVVDRFSEEFVETRRKALDKFLKRITDHPVLSFNEHFNIFLTAKDLNAYKKQGIALLTRMGESVKHVTGGYKLRTRPLEFAAIGDYLDTFALKLGTIDRIAQRIIKEEIEYLVELREYGPVYSTWSALEGELAEPLEGVSACIGNCSTALEELTDDMTEDFLPVLREYILYSDSMKSVLKKRDQVQAEYEAKLEAVALRKEDRPKVPADVEKCQDRMECFNADLKADMERWQNNKRQDFRQLLMGMADKNIQYYEKCLMAWESIIPLLQEKQEAK

SEQ ID NO: 840662 - protein, 424 aa, Homo sapiens
MAGGPPKALPSTGPHSLRDMPHPLAGSSSEEAVGGDSTPSPDLLMARSFGDKDLILPNGGTPAGTSSPASSSSLLNRLQLDDDIDGETRDLFVIVDDPKKHVCTMETYITYRITTKSTRVEFDLPEYSVRRRYQDFDWLRSKLEESQPTHLIPPLPEKFVVKGVVDRFSEEFVETRRKALDKFLKRITDHPVLSFNEHFNIFLTAKDLNAYKKQGIALLTRMGESVKHVTGGYKLRTRPLEFAAIGDYLDTFALKLGTIDRIAQRIIKEEIEYLVELREYGPVYSTWSALEGELAEPLEGVSACIGNCSTALEELTDDMTEDFLPVLREYILYSDSMKSVLKKRDQVQAEYEAKLEAVALRKEDRPKVPADVEKCQDRMECFNADLKADMERWQNNKRQDFRQLLMGMADKNIQYYEKSIADLK

SEQ ID NO: 840663 - protein, 142 aa, Homo sapiens
MPECGSTFQRTSPAPFTVWLLGLWIPAVSEQELKGQPHHGGSALEAVTTSPTDATIFQEHRGREPTTAQWPRTVTLGLKEPTDVVFFGDILHATPDFKLFWRSRQSGNSRFGFSEGNKEQLPPSEGHGGCPVLPELPTRLSS

SEQ ID NO: 840664 - protein, 31 aa, Homo sapiens
MCTLKMFPKNATKGPLLCAVKTLPKYVAKGP

SEQ ID NO: 840665 - protein, 475 aa, Homo sapiens
MSATSVDTQRTKGQDNKVQNGSLHQKDTVHDNDFEPYLTGQSNQSNSYPSMSDPYLSSYYPPSIGFPYSLNEAPWSTAGDPPIPYLTTYGQLSNGDHHFMHDAVFGQPGGLGNNIYQHRFNFFPENPAFSAWGTSGSQGQQTQSSAYGSSYTYPPSSLGGTVVDGQPGFHSDTLSKAPPPIKHNMDIGTWDNKGPVPKAPVPQQAPSPQAAPQPQQVAQPLPAQPPALAQPQYQSPQQPPQTRWVAPRNRNAAFGQSGGAGSDSNSPGNVQPNSAPSVESHPVLEKLKAAHSYNPKEFEWNLKSGRVFIIKSYSEDDIHRSIKYSIWCSTEHGNKRLDSAFRCMSSKGPVYLLFSVNGSGHFCGVAEMKSPVDYGTSAGVWSQDKWKGKFDVQWIFVKDVPNNQLRHIRLENNDNKPVTNSRDTQEVPLEKAKQVLKIISSYKHTTSIFDDFAHYEKRQEEEEVVRKERQSRNKQ

SEQ ID NO: 840666 - protein, 559 aa, Homo sapiens
MSATSVDTQRTKGQDNKVQNGSLHQKDTVHDNDFEPYLTGQSNQSNSYPSMSDPYLSSYYPPSIGFPYSLNEAPWSTAGDPPIPYLTTYGQLSNGDHHFMHDAVFGQPGGLGNNIYQHRFNFFPENPAFSAWGTSGSQGQQTQSSAYGSSYTYPPSSLGGTVVDGQPGFHSDTLSKAPGMNSLEQGMVGLKIGDVSSSAVKTVGSVVSSVALTGVLSGNGGTNVNMPVSKPTSWAAIASKPAKPQPKMKTKSGPVMGGGLPPPPIKHNMDIGTWDNKGPVPKAPVPQQAPSPQAAPQPQQVAQPLPAQPPALAQPQYQSPQQPPQTRWVAPRNRNAAFGQSGGAGSDSNSPGNVQPNSAPSVESHPVLEKLKAAHSYNPKEFEWNLKSGRVFIIKSYSEDDIHRSIKYSIWCSTEHGNKRLDSAFRCMSSKGPVYLLFSVNGSGHFCGVAEMKSPVDYGTSAGVWSQDKWKGKFDVQWIFVKDVPNNQLRHIRLENNDNKPVTNSRDTQEVPLEKAKQVLKIISSYKHTTSIFDDFAHYEKRQEEEEVVRKERQSRNKQ

SEQ ID NO: 840667 - protein, 106 aa, Homo sapiens
RSVAARRGAPGLPRVHADAAQSRPLPPPSPLLSPPPPPLESTPPQCVRVPGSPPLPPRQGPARPAAAAAARPAPGELAAGPGAARARVTGPASRGGPSRRAPRPRV

SEQ ID NO: 840668 - protein, 559 aa, Homo sapiens; identical to SEQ ID NO: 840666

SEQ ID NO: 840669 - protein, 559 aa, Homo sapiens; identical to SEQ ID NO: 840666

SEQ ID NO: 840670 - protein, 185 aa, Homo sapiens
MSATSVDTQRTKGQDNKVQNGSLHQKDTVHDNDFEPYLTGQSNQSNSYPSMSDPYLSSYYPPSIGFPYSLNEAPWSTAGDPPIPYLTTYGQLSNGDHHFMHDAVFGQPGGLGNNIYQHRFNFFPENPAFSAWGTSGSQGQQTQSSAYGSSYTYPPSSLGGTVVDGQPGFHSDTLSKAPGMNSAGE

SEQ ID NO: 840671 - protein, 559 aa, Homo sapiens; identical to SEQ ID NO: 840666

SEQ ID NO: 840672 - protein, 474 aa, Homo sapiens
KTKSGPVMGGGLPPPPIKHNMDIGILGNNIYQHRFNFFPENPAFSAWGTSGSQGQQTQSSAYGSSYTYPPSSLGGTVVDGQPGFHSDTLSKAPGMNSLEQGMVGLKIGDVSSSAVKTVGSVVSSVALTGVLSGNGGTNVNMPVSKPTSWAAIASKPAKPQPKMKTKSGPVMGGGLPPPPIKHNMDIGTWDNKGPVPKAPVPQQAPSPQAAPQPQQVAQPLPAQPPALAQPQYQSPQQPPQTRWVAPRNRNAAFGQSGGAGSDSNSPGNVQPNSAPSVESHPVLEKLKAAHSYNPKEFEWNLKSGRVFIIKSYSEDDIHRSIKYSIWCSTEHGNKRLDSAFRCMSSKGPVYLLFSVNGSGHFCGVAEMKSPVDYGTSAGVWSQDKWKGKFDVQWIFVKDVPNNQLRHIRLENNDNKPVTNSRDTQEVPLEKAKQVLKIISSYKHTTSIFDDFAHYEKRQEEEEVVRKERQSRNKQ

SEQ ID NO: 840673 - protein, 106 aa, Homo sapiens; identical to SEQ ID NO: 840667

SEQ ID NO: 840674 - protein, 559 aa, Homo sapiens; identical to SEQ ID NO: 840666

SEQ ID NO: 840675 - protein, 559 aa, Homo sapiens; identical to SEQ ID NO: 840666

SEQ ID NO: 840676 - protein, 104 aa, Homo sapiens
MWHCGRSFGSRPHTLPRLWASAQAGLSQGCPTHFPTWHTHWDLPGRNAESPLPRSLLQPLGTSDSSSSISFHAPLPHISVDTIPCHWARGMRKLLSARWSPQAM

SEQ ID NO: 840677 - protein, 898 aa, Homo sapiens
MVWALRCHPALLDLRCKVSIHLGLPQILQMSPMQYLGSSTGHRQLFQEGLTGGKGAFMEHLPFASILLSSMSYYLLASLFADKQEMRPDWVTHPKHHSGGARLPVCSFCLEAHSIAISLITSSLSNKARLCTSFRLLFCFLTQSLALSPRLESSGAISAHGNLCLPGSSNSPVLASWVAGITGARHMPSNFFGFLVEMGFYHIGQAGLKLLHSGDPTTLASQSAGITGMSHPAWPLASVLTFVLLPVPHEAEHEVRSQVSKESSNSVGTEILPSAVCRCHVSRDVPQFSCQPWKPKQELSAFVGLHFPSLIQDWVKPNPRCREKHSHLASSDVNDVIWSRFPGLLIFSVQSHDLVYVDFKISLLENLKAAEVIQLLLKNYRLSGLTWWLTPVIPHFGRLRQANPLRLGVRGQPGKHGETPSLLKIQKLAACDGMYLYPQVLRRLRQENHMNLAEGGCSEPRSCHCTPAWVTQRDSVSTKKKKKIYRLSIPNLKIQMLQNLKLAEHQHDTTMENFTHKSTLTLCNAQMYLKYFYKLPLASMFKIYMKHKMNFMLRFGSHLKDSLLIYVNIPKSEKIQTLLILSISDKGYSTYINKVACISQPEKQPKNTLPFPMPMPPLSSDHQYSIDHCVLSFFLSDDSCPNGMGRVSKASQQVSCHLRKQRPPVITVPPFRVSQVCTVMLSALVAAFRLKLRCDPWLNRGLDCDENHHEYKESFEGLLSELSVSGGAQGCMGPGALCLPTHPLCIIFRRVSCILISLNNANMFLFISELLDLPGILFAADRNPSSRFPANSSVKHFAHEPPKLIRAGVVKSPHHRNTGVEGNSGFACLVGIRILDLRRLYEKLAPSNLVVTYSCLSQQAMPFSAFPPSRRWEEAITLRNHQYHHLPFSDEETKASDC

SEQ ID NO: 840678 - protein, 85 aa, Homo sapiens
HLGTSFISDFFFLSEYKKVSAAKQGQKGDHLVNEDSKSHLKNTRVKEANFQLIDRLLTDLFEVVVVLAKRSRGGPWTWNGPRRWI

SEQ ID NO: 840679 - protein, 176 aa, Homo sapiens
MTLAYIPHSALRRRPLPDVCLAPEEKTAPLSRPGHLVGRAEAGALGSARPAAIRGGTRRRATIMPGHLQEGFGCVVTNRFDQLFDDESDPFEVLKAAENKKKEAGGGGVGGPGAKSAAQAAAQTNSNAAGKQLRKESQKDRKNPLPPSVGVVDKKEETQPPVALKNRRNKTSWKKT

SEQ ID NO: 840680 - protein, 113 aa, Homo sapiens
MPGHLQEGFGCVVTNRFDQLFDDESDPFEVLKAAENKKKEAGGGGVGGPGAKSAAQAAAQTNSNAAGKQLRKESQKDRKNPLPPSVGVVDKKEETQPPVALKNRRNKTSWKKT

SEQ ID NO: 840681 - protein, 176 aa, Homo sapiens; identical to SEQ ID NO: 840679

SEQ ID NO: 840682 - protein, 176 aa, Homo sapiens; identical to SEQ ID NO: 840679

SEQ ID NO: 840683 - protein, 176 aa, Homo sapiens; identical to SEQ ID NO: 840679

SEQ ID NO: 840684 - protein, 176 aa, Homo sapiens; identical to SEQ ID NO: 840679

SEQ ID NO: 840685 - protein, 176 aa, Homo sapiens; identical to SEQ ID NO: 840679

SEQ ID NO: 840686 - protein, 153 aa, Homo sapiens
  misc_feature (2)..(2): Xaa can be any naturally occurring amino acid
KXRGRTKLGLGTRLGVEEAGALGSARPAAIRGGTRRRATIMPGHLQEGFGCVVTNRFDQLFDDESDPFEVLKAAENKKKEAGGGGVGGPGAKSAAQAAAQTNSNAAGKQLRKESQKDRKNPLPPSVGVVDKKEETQPPVALKNRRNKTSWKKT

SEQ ID NO: 840687 - protein, 149 aa, Homo sapiens
TRLVRGLRVNRHEEAGALGSARPAAIRGGTRRRATIMPGHLQEGFGCVVTNRFDQLFDDESDPFEVLKAAENKKKEAGGGGVGGPGAKSAAQAAAQTNSNAAGKQLRKESQKDRKNPLPPSVGVVDKKEETQPPVALKNRRNKTSWKKT

SEQ ID NO: 840688 - protein, 176 aa, Homo sapiens; identical to SEQ ID NO: 840679

SEQ ID NO: 840689 - protein, 121 aa, Homo sapiens [sequence omitted]

SEQ ID NO: 840690 - protein, 195 aa, Homo sapiens
MTLAYIPHSALRRRPLPDVCLAPEEKTAPLSRPGHLVGRAEAGALGSARPAAIRGGTRRRATIMPGHLQEGFGCVVTNRFDQLFDDESDPFEVLKAAENKKKEAGGGGVGGPGAKSAAQAAAQTNSNAAGKQLRKESQKDRKNPLPPSVGVVDKKEETQPRPGLGGGPPGAPFKKEGIRRVGRRPDQQLQGEGNN

SEQ ID NO: 840691 - protein, 176 aa, Homo sapiens; identical to SEQ ID NO: 840679

SEQ ID NO: 840692 - protein, 121 aa, Homo sapiens [sequence omitted]

SEQ ID NO: 840693 - protein, 121 aa, Homo sapiens [sequence omitted]

SEQ ID NO: 840694 - protein, 121 aa, Homo sapiens [sequence omitted]

SEQ ID NO: 840695 - protein, 121 aa, Homo sapiens [sequence omitted]

SEQ ID NO: 840696 - protein, 176 aa, Homo sapiens; identical to SEQ ID NO: 840679

SEQ ID NO: 840697 - protein, 236 aa, Homo sapiens
IVQIVQNISSPPSGRRTRKTTEYQLSTLERERYKENQEDSNIVLQVADLTTGELVKDELTESPKYIQKQISYNYSDLDQSNVTEETPEGEEHHPVADTENKENEVEEVKEEGPKEMTLDEWKAIQNKDRAKVEFNIRKPNEGADGQWKKGFVLHKSKSEEAHAEDSVMDHHFRKPANDITSQLEINFGDLGRPGRGGRGGRGGRGRGGRPNRGSRTDKSSASAPDVDDPEAFPALA

SEQ ID NO: 840698 - protein, 171 aa, Homo sapiens
WVDRGLWVDRDLDQSNVTEETPEGEEHHPVADTENKENEVEEVKEEGPKEMTLDEWKAIQNKDRAKVEFNIRKPNEGADGQWKKGFVLHKSKSEEAHAEDSVMDHHFRKPANDITSQLEINFGDLGRPGRGGRGGRGGRGRGGRPNRGSRTDKSSASAPDVDDPEAFPALA

SEQ ID NO: 840699 - protein, 176 aa, Homo sapiens; identical to SEQ ID NO: 840679

SEQ ID NO: 840700 - protein, 176 aa, Homo sapiens; identical to SEQ ID NO: 840679

SEQ ID NO: 840701 - protein, 176 aa, Homo sapiens; identical to SEQ ID NO: 840679

SEQ ID NO: 840702 - protein, 176 aa, Homo sapiens; identical to SEQ ID NO: 840679

SEQ ID NO: 840703 - protein, 176 aa, Homo sapiens; identical to SEQ ID NO: 840679

SEQ ID NO: 840704 - protein, 176 aa, Homo sapiens; identical to SEQ ID NO: 840679

SEQ ID NO: 840705 - protein, 176 aa, Homo sapiens; identical to SEQ ID NO: 840679

SEQ ID NO: 840706 - protein, 176 aa, Homo sapiens; identical to SEQ ID NO: 840679

SEQ ID NO: 840707 - protein, 176 aa, Homo sapiens; identical to SEQ ID NO: 840679

SEQ ID NO: 840708 - protein, 176 aa, Homo sapiens; identical to SEQ ID NO: 840679

SEQ ID NO: 840709 - protein, 176 aa, Homo sapiens; identical to SEQ ID NO: 840679

SEQ ID NO: 840710 - protein, 176 aa, Homo sapiens; identical to SEQ ID NO: 840679

SEQ ID NO: 840711 - protein, 176 aa, Homo sapiens; identical to SEQ ID NO: 840679

SEQ ID NO: 840712 - protein, 126 aa, Homo sapiens
GTVKDELTDLDQSNVTEETPEGEEHHPVADTENKENEVEEVPERRPPRERRFEKPLEEHTGEGGEFSVDRPIIDRPIRGRGGLGKEVEGRAVDVEWAEEMDLILVANVNLIGIVEVIDLLFHITVA

SEQ ID NO: 840713 - protein, 121 aa, Homo sapiens [sequence omitted]

SEQ ID NO: 840714 - protein, 121 aa, Homo sapiens [sequence omitted]

SEQ ID NO: 840715 - protein, 189 aa, Homo sapiens [sequence omitted]

SEQ ID NO: 840716 - protein, 121 aa, Homo sapiens [sequence omitted]

SEQ ID NO: 840717 - protein, 294 aa, Homo sapiens
SSAQLSSAQLSSVSSAQLSSAQLSSAAQLSSAQLSSAQSAQLSSAQLSSAQQLSSAQLSSAQLSQLSSAQLSSAQLSSSAQLSSAQLSSVSSAQLSSAQLSSAAQLSSAQLSSAQSAQLSSAQLSSAQQLSSAQLSSAQLSQLSSAQLSSAQLSSSAQLSSAQLSSVSSAQLSSAQLSSAAQLSSAQLSSAQSAQLSSAQLSSAQQLSSAQLSSAQLSSSAQLSSAQLSSQSVSLSWRSILETLAAQDVAAGEDEVDVGVVGAQTVAAGPTSQVLLLLMWMTQRHSQLWLNWMP

SEQ ID NO: 840718 - protein, 75 aa, Homo sapiens
EAVHPRKGSCPASSLSAGTPRAPPPHCPCLGPRQAPRSHGVTSGAQEPGLSRWSRVSTAKNPVRVAPQGGTGGRI

SEQ ID NO: 840719 - protein, 41 aa, Homo sapiens
MNQTEPWGIPLQTFLQVDSLDQLFPFVPLRGSQSLRDRVRH

SEQ ID NO: 840720 - protein, 99 aa, Homo sapiens
VQGESEVKGQRGGAEEAISHQEQTAGGLRLGWSCVGDGRGLSMGLHLHCPLLPSPWLCPPSGIVGFQQLAPQVLLRLRKAIPVSCLLDSRVAVARSRTR

SEQ ID NO: 840721 - protein, 141 aa, Homo sapiens [sequence omitted]

SEQ ID NO: 840722 - protein, 70 aa, Homo sapiens
INEMSSCWPREIANCHVVERATEKGPKINLSELRGVPGQQPVGNRGKRDLGCVITRNEFYNNLSECGRGL

SEQ ID NO: 840723 - protein, 255 aa, Homo sapiens
MEAEEAQRGASPPISAIEEFSIIPEAPMRSSQVSALGLEAQEDEDPSYKWREEHRLSATQQSELRDVCDYAIETMPSFPKEGSADVEPNQESLVAEACDTPEHWEAVPQSLAGRQARTLAPPELWACPIQSEHLDMAPFSSDLGSEEEEVEFWPGLTSLTLGSGQAEEEEETSSDNSGQTRYYSPCEEHPAETNQNEGSESGTIRQGEELPPEELQESQGLLHPQEVQVLEEQGQQEAGFRGEGTLREDVCADGL

SEQ ID NO: 840724 - protein, 145 aa, Homo sapiens
MDTESSLLLMWFSNLVPACSRSTWLPPNTWSSVSSLAHSLHSPEPLSPCTTQALRAALVLAPGARSWHLSRAPLSTALWNHPPCTSERAPHNYPGMCILQPENQKSGRPADPSPTPHHNPAHHPHEHNVLHSLCTSHTSLHPCTH

SEQ ID NO: 840725 - protein, 109 aa, Homo sapiens
ASQCCQFHLAPLTDHQLAVLHMELKSLSSGFSPLVLVPPLKDTRNSFDFSSPGQAAHYRKLMCAELSLIQAQIPSTIPSPHPTKQGAMVARLEMALLWMGWSGQTSRRR

SEQ ID NO: 840726 - protein, 371 aa, Homo sapiens
KVASWGQRRPRGCRSKRSLCGELANGSFQPCLVGGHWRSAGGSPRQPWGQVRASTLPRALRVASPPLLSVPWCLEGGCGGVPALHGPPPGQPSGLVFHLTLASCTVVKGNHCIMSRYSYQSLLDWLYGGVDPSFAGNGGPDCAAFLSWQQRLLESVVVLTLALLEILVALRHILRQTKEDGRGSPGSQPEQVTQRPEEGKESLSKNLLLVALCLTFGVEVGFKFATKTVIYLLNPCHLVTMMHLPFELEIYYIQHVMLYVVPIYLLWKGGAYTPEPLSSFRWALLSTGLMFFYHFSVLQILGLVTEVNLNNMLCPAISDPFYGPWYRIWASGHQTLMTMTHGKLVILFSYMAGPLCKYLLDLLRLPAKKID

SEQ ID NO: 840727 - protein, 138 aa, Homo sapiens
MMHIFLLACPPCRGAIVVFKLQMHMLNGALLALLFPVVNTRLLPFELEIYYIQHVMLYVVPIYLLWKGGAYTPEPLSSFRWALLSTGLMFFYHFSVLQILGLVTEVNLNNMLCPAISDPFLEDSVDLFLGFTGPVLFP

SEQ ID NO: 840728 - protein, 378 aa, Homo sapiens
KVASWGQRRPRGCRSKRSLCGELANGSFQPCLVGGHWRSAGGSPRQPWGQVRASTLPRALRVASPPLLSVPWCLEGGCGGVPALHGPPPGQPSGLVFHLTLASCTVVKGNHCIMSRYSYQSLLDWLYGGVDPSFAGNGGPDCAAFLSWQQRLLESVVVLTLALLEILVALRHILRQTKEDGRGSPGSQPEQVTQRPEEGKESLSKNLLLVALCLTFGVEVGFKFATKTVIYLLNPCHLVTMMHIFLLACPPCRGAIVVFKLQMHMLNGALLALLFPVVNTRLLPFELEIYYIQHVMLYVVPIYLLWKGGAYTPEPLSSFRWALLSTGLMFFYHFSVLQILGLVTEVNLNNMLCPAISDPFLEDSVDLFLGFTGPVLFP

SEQ ID NO: 840729 - protein, 116 aa, Homo sapiens
MHMLNGALLALLFPVVNTRLLPFELEIYYIQHVMLYVVPIYLLWKGGAYTPEPLSSFRWALLSTGLMFFYHFSVLQILGLVTEVNLNNMLCPAISDPFLEDSVDLFLGFTGPVLFP

SEQ ID NO: 840730 - protein, 137 aa, Homo sapiens [sequence omitted]

SEQ ID NO: 840731 - protein, 138 aa, Homo sapiens; identical to SEQ ID NO: 840727

SEQ ID NO: 840732 - protein, 138 aa, Homo sapiens; identical to SEQ ID NO: 840727

SEQ ID NO: 840733 - protein, 371 aa, Homo sapiens; identical to SEQ ID NO: 840726

SEQ ID NO: 840734 - protein, 139 aa, Homo sapiens
GRQGNRAPGAESAGAEQQPDPGPRAELPQRLLESVVVLTLALLEILVALRHILRQTKEDGRGSPGSQPEQVTQRPEEGKESLSKNLLLVALCLTFGVEVGFKFATKTVIYLLNPCHLVTMMHIFLLACPPCRGAIVVFK

SEQ ID NO: 840735 - protein, 146 aa, Homo sapiens
MCSLQLGPLPKIFLLACPPCRGAIVVFKLQMHMLNGALLALLFPVVNTRLLPFELEIYYIQHVMLYVVPIYLLWKGGAYTPEPLSSFRWALLSTGLMFFYHFSVLQILGLVTEVNLNNMLCPAISDPFLEDSVDLFLGFTGPVLFP

SEQ ID NO: 840736 - protein, 138 aa, Homo sapiens; identical to SEQ ID NO: 840727

SEQ ID NO: 840737 - protein, 138 aa, Homo sapiens; identical to SEQ ID NO: 840727

SEQ ID NO: 840738 - protein, 260 aa, Homo sapiens
KVASWGQRRPRGCRSKRSLCGELANGSFQPCLVGGHWRSAGGSPRQPWGQVRASTLPRALRVASPPLLSVPWCLEGGCGGVPALHGPPPGQPSGLVFHLTLASCTVVKGNHCIMSRYSYQSLLDWLYGGVDPSFAGNGGPDCAAFLSWQQRLLESVVVLTLALLEILVALRHILRQTKEDGRGSPGSQPEQVTQRPEEGKESLSKNLLLVALCLTFGVEVGFKFATKTVIYLLNPCHLVTMMHIFLLACPPCRGAIVVFK

SEQ ID NO: 840739 - protein, 41 aa, Homo sapiens
EYPTVERVDRLAEGACCDSVGPHNEFWFVSVIENAAFALLS

SEQ ID NO: 840740 - protein, 59 aa, Homo sapiens
VFSGGLSLLPEHEVLWVEDANGEWTLHIEAHTCRCRPPGQPLLGNLSSHLATLTAMLMV

SEQ ID NO: 840741 - protein, 111 aa, Homo sapiens
SASQVTGTAGTHPIRWTPPHLVNLFFVDKGFCHVAQAGLKLLGSSNPPNSASQSARIIDRHEPPCPAFTNFLQIISSFHSYCCLPQFRPSKTFTWSIINSLLADVPNDSSS

SEQ ID NO: 840742 - protein, 59 aa, Homo sapiens
SQSAGIIGMSHHTRPGCQFFIRYVFRKYVLPVCGCLFSFPSSGCSLLDEFGPVILQDVP

SEQ ID NO: 840743 - protein, 116 aa, Homo sapiens
MPTNCVWLDGLSSNVSDQYLTRHFCRYGPVVKVVFDRLKGMALVLYNEIEYAQAAVKETKGRKIGGNKIKVDFANRESQLAFYHCMEKSGQDIRDFYEMLAERRVSLCHPDWSAVA

SEQ ID NO: 840744 - protein, 3731 aa, Homo sapiens
SCEARESEPGGEGWSLHGGEPEEPPPLPTPPPQPPPPPPRHPPPGADGLVRSRRGGASSGGAGTPPSMVRETRHLWVGNLPENVREEKIIEHFKRYGRVESVKILPKRGSEGGVAAFVDFVDIKSAQKAHNSVNKMGDRDLRTDYNEPGTIPSAARGLDDTVSIASRSREVSGFRGGGGGPAYGPPPSLHAREGRYERRLDGASDNRERAYEHSAYGHHERGTGGFDRTRHYDQDYYRDPRERTLQHGLYYASRSRSPNRFDAHDPRYEPRAREQFTLPSVVHRDIYRDDITREVRGRRPERNYQHSRSRSPHSSQSRNQSPQRLASQASRPTRSPSGSGSRSRSSSSDSISSSSSTSSDSSDSSSSSSDDSPARSVQSAAVPAPTSQLLSSLEKDEPRKSFGIKVQNLPVRSTDTSLKDGLFHEFKKFGKVTSVQIHGTSEERYGLVFFRQQEDQEKALTASKGKLFFGMQIEVTAWIGPETESENEFRPLDERIDEFHPKATRTLFIGNLEKTTTYHDLRNIFQRFGEIVDIDIKKVNGVPQYAFLQYCDIASVCKAIKKMDGEYLGNNRLKLGFGKSMPTNCVWLDGLSSNVSDQYLTRHFCRYGPVVKVVFDRLKGMALVLYNEIEYAQAAVKETKGRKIGGNKIKVDFANRESQLAFYHCMEKSGQDIRDFYEMLAERREERRASYDYNQDRTYYESVRTPGTYPEDSRRDYPARGREFYSEWETYQGDYYESRYYDDPREYRDYRNDPYEQDIREYSYRQRERERERERFESDRDRDHERRPIERSQSPVHLRRPQSPGASPSQAERLPSDSERRLYSRSSDRSGSCSSLSPPRYEKLDKSRLERYTKNEKTDKERTFDPERVERERRLIRKEKVEKDKTDKQKRKGKVHSPSSQSSETDQENEREQSPEKPRSCNKLSREKADKEGIAKNRLELMPCVVLTRVKEKEGKVIDHTPVEKLKAKLDNDTVKSSALDQKLQVSQTEPAKSDLSKLESVRMKVPKEKGLSSHVEVVEKEGRLKARKHLKPEQPADGVSAVDLEKLEARKRRFADSNLKAEKQKPEVKKSSPEMEDARVLSKKQPDVSSREVILLREGEAERKPVRKEILKRESKKIKLDRLNTVASPKDCQELASISVGSGSRPSSDLQARLGEPAGESVENQEVQSKKPIPSKPQLKQLQVLDDQGPEREDVRKNYCSLRDETPERKSGQEKSHSVNTEEKIGIDIDHTQSYRKQMEQSRRKQQMEMEIAKSEKFGSPKKDVDEYERRSLVHEVGKPPQDVTDDSPPSKKKRMDHVDFDICTKRERNYRSSRQISEDSERTGGSPSVRHGSFHEDEDPIGSPRLLSVKGSPKVDEKVLPYSNITVREESLKFNPYDSSRREQMADMAKIKLSVLNSEDELNRWDSQMKQDAGRFDVSFPNSIIKRDSLRKRSVRDLEPGEVPSDSDEDGEHKSHSPRASALYESSRLSFLLRDREDKLRERDERLSSSLERNKFYSFALDKTITPDTKALLERAKSLSSSREENWSFLDWDSRFANFRNNKDKEKVDSAPRPIPSWYMKKKKIRTDSEGKMDDKKEDHKEEEQERQELFASRFLHSSIFEQDSKRLQHLERKEEDSDFISGRIYGKQTSEGANSTTDSIQEPVVLFHSRFMELTRMQQKEKEKDQKPKEVEKQEDTENHPKTPESAPENKDSELKTPPSVGPPSVTVVTLESAPSALEKTTGDKTVEAPLVTEEKTVEPATVSEEAKPASEPAPAPVEQLEQVDLPPGADPDKEAAMMPAGVEEGSSGDQPPYLDAKPPTPGASFSQAESNVDPEPDSTQPLSKPAQKSEEANEPKAEKPDATADAEPDANQKAEAAPESQPPASEDLEVDPPVAAKDKKPNKSKRSKTPVQAAAVSIVEKPVTRKSERIDREKLKRSNSPRGEAQKLLELKMEAEKITRTASKNSAADLEHPEPSLPLSRTRRRNVRSVYATMGDHENRSPVKEPVEQPRVTRKRLERELQEAAAVPTTPRRGRPPKTRRRADEEEENEAKEPAETLKPPEGWRSPRSQKTAAGGGPQGKKGKNEPKVDATRPEATTEVGPQIGVKESSMEPKAAEEEAGSEQKRDRKDAGTDKNPPETAPVEVVEKKPAPEKNSKSKRGRSRNSRLAVDKSASLKNVDAAVSPRGAAAQAGERESGVVAVSPEKSESPQKEDGLSSQLKSDPVDPDKEPEKEDVSASGPSPEATQLAKQMELEQAVEHIAKLAEASASAAYKADAPEGLAPEDRDKPAHQASETELAAAIGSIINDISGEPENFPAPPPYPGESQTDLQPPAGAQALQPSEEGMETDEAVSGILETEAATESSRPPVNAPDPSAGPTDTKEARGNSSETSHSVPEAKGSKEVEVTLVRKDKGRQKTTRSRRKRNTNKKVVAPVESHVPESNQAQGESPAANEGTTVQHPEAPQEEKQSEKPHSTPPQSCTSDLSKIPSTENSSQEISVEERTPTKASVPPDLPPPPQPAPVDEEPQARFRVHSIIESDPVTPPSDPSIPIPTLPSVTAAKLSPPVASGGIPHQSPPTKVTEWITRQEEPRAQSTPSPALPPDTKASDVDTSSSTLRKILMDPKYVSATSVTSTSVTTAIAEPVSAAPCLHEAPPPPVDSKKPLEEKTAPPVTNNSEIQASEVLVAADKEKVAPVIAPKITSVISRMPVSIDLENSQKITLAKPAPQTLTGLVSALTGLVNVSLVPVNALKGPVKGSVTTLKSLVSTPAGPVNVLKGPVNVLTGPVNVLTTPVNATVGTVNAAPGTVNAAASAVNATASAVTVTAGAVTAASGGVTATTGTVTMAGAVIAPSTKCKQRASANENSRFHPGSMPVIDDRPADAGSGAGLRVNTSEGVVLLSYSGQKTEGPQRISAKISQIPPASAMDIEFQQSVSKSQVKPDSVTASQPPSKGPQAPAGYANVATHSTLVLTAQTYNASPVISSVKADRPSLEKPEPIHLSVSTPVTQGGTVKVLTQGINTPPVLVHNQLVLTPSIVTTNKKLADPVTLKIETKVLQPANLGSTLTPHHPPALPSKLPTEVNHVPSGPSIPADRTVSHLAAAKLDAHSPRPSGPGPSSFPRASHPSSTASTALSTNATVMLAAGIPVPQFISSIHPEQSVIMPPHSITQTVSLSHLSQGEVRMNTPTLPSITYSIRPEALHSPRAPLQPQQIEVRAPQRASTPQPAPAGVPALASQHPPEEEVHYHLPVARATAPVQSEVLVMQSEYRLHPYTVPRDVRIMVHPHVTAVSEQPRAADGVVKVPPASKAPQQPGKEAAKTPDAKAAPTPTPAPVPVPVPLPAPAPAPHGEARILTVTPSNQLQGLPLTPPVVVTHGVQIVHSSGELFQEYRYGDIRTYHPPAQLTHTQFPAASSVGLPSRTKTAAQGPPPEGEPLQPPQPVQSTQPAQPAPPCPPSQLGQPGQPPSSKMPQVSQEAKGTQTGVEQPRLPAGPANRPPEPHTQVQRAQAETGPTSFPSPVSVSMKPDLPVSLPTQTAPKQPLFVPTTSGPSTPPGLVLPHTEFQPAPKQDSSPHLTSQRPVDMVQLLKKYPIVWQGLLALKNDTAAVQLHFVSGNNVLAHRSLPLSEGGPPLRIAQRMRLEATQLEGVARRMTVETDYCLLLALPCGRDQEDVVSQTESLKAAFITYLQAKQAAGIINVPNPGSNQPAYVLQIFPPCEFSESHLSRLAPDLLASISNISPHLMIVIASV

SEQ ID NO: 840745 - protein, 3151 aa, Homo sapiens
MPTNCVWLDGLSSNVSDQYLTRHFCRYGPVVKVVFDRLKGMALVLYNEIEYAQAAVKETKGRKIGGNKIKVDFANRESQLAFYHCMEKSGQDIRDFYEMLAERREERRASYDYNQDRTYYESVRTPGTYPEDSRRDYPARGREFYSEWETYQGDYYESRYYDDPREYRDYRNDPYEQDIREYSYRQRERERERERFESDRDRDHERRPIERSQSPVHLRRPQSPGASPSQAERLPSDSERRLYSRSSDRSGSCSSLSPPRYEKLDKSRLERYTKNEKTDKERTFDPERVERERRLIRKEKVEKDKTDKQKRKGKVHSPSSQSSETDQENEREQSPEKPRSCNKLSREKADKEGIAKNRLELMPCVVLTRVKEKEGKVIDHTPVEKLKAKLDNDTVKSSALDQKLQVSQTEPAKSDLSKLESVRMKVPKEKGLSSHVEVVEKEGRLKARKHLKPEQPADGVSAVDLEKLEARKRRFADSNLKAEKQKPEVKKSSPEMEDARVLSKKQPDVSSREVILLREGEAERKPVRKEILKRESKKIKLDRLNTVASPKDCQELASISVGSGSRPSSDLQARLGEPAGESVENQEVQSKKPIPSKPQLKQLQVLDDQGPEREDVRKNYCSLRDETPERKSGQEKSHSVNTEEKIGIDIDHTQSYRKQMEQSRRKQQMEMEIAKSEKFGSPKKDVDEYERRSLVHEVGKPPQDVTDDSPPSKKKRMDHVDFDICTKRERNYRSSRQISEDSERTGGSPSVRHGSFHEDEDPIGSPRLLSVKGSPKVDEKVLPYSNITVREESLKFNPYDSSRREQMADMAKIKLSVLNSEDELNRWDSQMKQDAGRFDVSFPNSIIKRDSLRKRSVRDLEPGEVPSDSDEDGEHKSHSPRASALYESSRLSFLLRDREDKLRERDERLSSSLERNKFYSFALDKTITPDTKALLERAKSLSSSREENWSFLDWDSRFANFRNNKDKEKVDSAPRPIPSWYMKKKKIRTDSEGKMDDKKEDHKEEEQERQELFASRFLHSSIFEQDSKRLQHLERKEEDSDFISGRIYGKQTSEGANSTTDSIQEPVVLFHSRFMELTRMQQKEKEKDQKPKEVEKQEDTENHPKTPESAPENKDSELKTPPSVGPPSVTVVTLESAPSALEKTTGDKTVEAPLVTEEKTVEPATVSEEAKPASEPAPAPVEQLEQVDLPPGADPDKEAAMMPAGVEEGSSGDQPPYLDAKPPTPGASFSQAESNVDPEPDSTQPLSKPAQKSEEANEPKAEKPDATADAEPDANQKAEAAPESQPPASEDLEVDPPVAAKDKKPNKSKRSKTPVQAAAVSIVEKPVTRKSERIDREKLKRSNSPRGEAQKLLELKMEAEKITRTASKNSAADLEHPEPSLPLSRTRRRNVRSVYATMGDHENRSPVKEPVEQPRVTRKRLERELQEAAAVPTTPRRGRPPKTRRRADEEEENEAKEPAETLKPPEGWRSPRSQKTAAGGGPQGKKGKNEPKVDATRPEATTEVGPQIGVKESSMEPKAAEEEAGSEQKRDRKDAGTDKNPPETAPVEVVEKKPAPEKNSKSKRGRSRNSRLAVDKSASLKNVDAAVSPRGAAAQAGERESGVVAVSPEKSESPQKEDGLSSQLKSDPVDPDKEPEKEDVSASGPSPEATQLAKQMELEQAVEHIAKLAEASASAAYKADAPEGLAPEDRDKPAHQASETELAAAIGSIINDISGEPENFPAPPPYPGESQTDLQPPAGAQALQPSEEGMETDEAVSGILETEAATESSRPPVNAPDPSAGPTDTKEARGNSSETSHSVPEAKGSKEVEVTLVRKDKGRQKTTRSRRKRNTNKKVVAPVESHVPESNQAQGESPAANEGTTVQHPEAPQEEKQSEKPHSTPPQSCTSDLSKIPSTENSSQEISVEERTPTKASVPPDLPPPPQPAPVDEEPQARFRVHSIIESDPVTPPSDPSIPIPTLPSVTAAKLSPPVASGGIPHQSPPTKVTEWITRQEEPRAQSTPSPALPPDTKASDVDTSSSTLRKILMDPKYVSATSVTSTSVTTAIAEPVSAAPCLHEAPPPPVDSKKPLEEKTAPPVTNNSEIQASEVLVAADKEKVAPVIAPKITSVISRMPVSIDLENSQKITLAKPAPQTLTGLVSALTGLVNVSLVPVNALKGPVKGSVTTLKSLVSTPAGPVNVLKGPVNVLTGPVNVLTTPVNATVGTVNAAPGTVNAAASAVNATASAVTVTAGAVTAASGGVTATTGTVTMAGAVIAPSTKCKQRASANENSRFHPGSMPVIDDRPADAGSGAGLRVNTSEGVVLLSYSGQKTEGPQRISAKISQIPPASAMDIEFQQSVSKSQVKPDSVTASQPPSKGPQAPAGYANVATHSTLVLTAQTYNASPVISSVKADRPSLEKPEPIHLSVSTPVTQGGTVKVLTQGINTPPVLVHNQLVLTPSIVTTNKKLADPVTLKIETKVLQPANLGSTLTPHHPPALPSKLPTEVNHVPSGPSIPADRTVSHLAAAKLDAHSPRPSGPGPSSFPRASHPSSTASTALSTNATVMLAAGIPVPQFISSIHPEQSVIMPPHSITQTVSLSHLSQGEVRMNTPTLPSITYSIRPEALHSPRAPLQPQQIEVRAPQRASTPQPAPAGVPALASQHPPEEEVHYHLPVARATAPVQSEVLVMQSEYRLHPYTVPRDVRIMVHPHVTAVSEQPRAADGVVKVPPASKAPQQPGKEAAKTPDAKAAPTPTPAPVPVPVPLPAPAPAPHGEARILTVTPSNQLQGLPLTPPVVVTHGVQIVHSSGELFQEYRYGDIRTYHPPAQLTHTQFPAASSVGLPSRTKTAAQGPPPEGEPLQPPQPVQSTQPAQPAPPCPPSQLGQPGQPPSSKMPQVSQEAKGTQTGVEQPRLPAGPANRPPEPHTQVQRAQAETGPTSFPSPVSVSMKPDLPVSLPTQTAPKQPLFVPTTSGPSTPPGLVLPHTEFQPAPKQDSSPHLTSQRPVDMVQLLKKYPIVWQGLLALKNDTAAVQLHFVSGNNVLAHRSLPLSEGGPPLRIAQRMRLEATQLEGVARRMTVETDYCLLLALPCGRDQEDVVSQTESLKAAFITYLQAKQAAGIINVPNPGSNQPAYVLQIFPPCEFSESHLSRLAPDLLASISNISPHLMIVIASV

SEQ ID NO: 840746 - protein, 3712 aa, Homo sapiens
SCEARESEPGGEGWSLHGGEPEEPPPLPTPPPQPPPPPPRHPPPGADGLVRSRRGGASSGGAGTPPSMVRETRHLWVGNLPENVREEKIIEHFKRYGRVESVKILPKRGSEGGVAAFVDFVDIKSAQKAHNSVNKMGDRDLRTDYNEPGTIPSAARGLDDTVSIASRSREVSGFRGGGGGPAYGPPPSLHAREGRYERRLDGASDNRERAYEHSAYGHHERGTGGFDRTRHYDQDYYRDPRERTLQHGLYYASRSRSPNRFDAHDPRYEPRAREQFTLPSVVHRDIYRDDITREVRGRRPERNYQHSRSRSPHSSQSRNQSPQRLASQASRPTRSPSGSGSRSRSSSSDSISSSSSTSSDSSDSSSSSSDDSPARSVQSAAVPAPTSQLLSSLEKDEPRKSFGIKVQNLPVRSTDTSLKDGLFHEFKKFGKVTSVQIHGTSEERYGLVFFRQQEDQEKALTASKGKLFFGMQIEVTAWIGPETESENEFRPLDERIDEFHPKATRTLFIGNLEKTTTYHDLRNIFQRFGEIVDIDIKKVNGVPQYAFLQYCDIASVCKAIKKMDGEYLGNNRLKLGFGKSMPTNCVWLDGLSSNVSDQYLTRHFCRYGPVVKVVFDRLKGMALVLYNEIEYAQAAVKETKGRKIGGNKIKVDFANRESQLAFYHCMEKSGQDIRDFYEMLAERREERRASYDYNQDRTYYESVRTPGTYPEDSRRDYPARGREFYSEWETYQGDYYEQDIREYSYRQRERERERERFESDRDRDHERRPIERSQSPVHLRRPQSPGASPSQAERLPSDSERRLYSRSSDRSGSCSSLSPPRYEKLDKSRLERYTKNEKTDKERTFDPERVERERRLIRKEKVEKDKTDKQKRKGKVHSPSSQSSETDQENEREQSPEKPRSCNKLSREKADKEGIAKNRLELMPCVVLTRVKEKEGKVIDHTPVEKLKAKLDNDTVKSSALDQKLQVSQTEPAKSDLSKLESVRMKVPKEKGLSSHVEVVEKEGRLKARKHLKPEQPADGVSAVDLEKLEARKRRFADSNLKAEKQKPEVKKSSPEMEDARVLSKKQPDVSSREVILLREGEAERKPVRKEILKRESKKIKLDRLNTVASPKDCQELASISVGSGSRPSSDLQARLGEPAGESVENQEVQSKKPIPSKPQLKQLQVLDDQGPEREDVRKNYCSLRDETPERKSGQEKSHSVNTEEKIGIDIDHTQSYRKQMEQSRRKQQMEMEIAKSEKFGSPKKDVDEYERRSLVHEVGKPPQDVTDDSPPSKKKRMDHVDFDICTKRERNYRSSRQISEDSERTGGSPSVRHGSFHEDEDPIGSPRLLSVKGSPKVDEKVLPYSNITVREESLKFNPYDSSRREQMADMAKIKLSVLNSEDELNRWDSQMKQDAGRFDVSFPNSIIKRDSLRKRSVRDLEPGEVPSDSDEDGEHKSHSPRASALYESSRLSFLLRDREDKLRERDERLSSSLERNKFYSFALDKTITPDTKALLERAKSLSSSREENWSFLDWDSRFANFRNNKDKEKVDSAPRPIPSWYMKKKKIRTDSEGKMDDKKEDHKEEEQERQELFASRFLHSSIFEQDSKRLQHLERKEEDSDFISGRIYGKQTSEGANSTTDSIQEPVVLFHSRFMELTRMQQKEKEKDQKPKEVEKQEDTENHPKTPESAPENKDSELKTPPSVGPPSVTVVTLESAPSALEKTTGDKTVEAPLVTEEKTVEPATVSEEAKPASEPAPAPVEQLEQVDLPPGADPDKEAAMMPAGVEEGSSGDQPPYLDAKPPTPGASFSQAESNVDPEPDSTQPLSKPAQKSEEANEPKAEKPDATADAEPDANQKAEAAPESQPPASEDLEVDPPVAAKDKKPNKSKRSKTPVQAAAVSIVEKPVTRKSERIDREKLKRSNSPRGEAQKLLELKMEAEKITRTASKNSAADLEHPEPSLPLSRTRRRNVRSVYATMGDHENRSPVKEPVEQPRVTRKRLERELQEAAAVPTTPRRGRPPKTRRRADEEEENEAKEPAETLKPPEGWRSPRSQKTAAGGGPQGKKGKNEPKVDATRPEATTEVGPQIGVKESSMEPKAAEEEAGSEQKRDRKDAGTDKNPPETAPVEVVEKKPAPEKNSKSKRGRSRNSRLAVDKSASLKNVDAAVSPRGAAAQAGERESGVVAVSPEKSESPQKEDGLSSQLKSDPVDPDKEPEKEDVSASGPSPEATQLAKQMELEQAVEHIAKLAEASASAAYKADAPEGLAPEDRDKPAHQASETELAAAIGSIINDISGEPENFPAPPPYPGESQTDLQPPAGAQALQPSEEGMETDEAVSGILETEAATESSRPPVNAPDPSAGPTDTKEARGNSSETSHSVPEAKGSKEVEVTLVRKDKGRQKTTRSRRKRNTNKKVVAPVESHVPESNQAQGESPAANEGTTVQHPEAPQEEKQSEKPHSTPPQSCTSDLSKIPSTENSSQEISVEERTPTKASVPPDLPPPPQPAPVDEEPQARFRVHSIIESDPVTPPSDPSIPIPTLPSVTAAKLSPPVASGGIPHQSPPTKVTEWITRQEEPRAQSTPSPALPPDTKASDVDTSSSTLRKILMDPKYVSATSVTSTSVTTAIAEPVSAAPCLHEAPPPPVDSKKPLEEKTAPPVTNNSEIQASEVLVAADKEKVAPVIAPKITSVISRMPVSIDLENSQKITLAKPAPQTLTGLVSALTGLVNVSLVPVNALKGPVKGSVTTLKSLVSTPAGPVNVLKGPVNVLTGPVNVLTTPVNATVGTVNAAPGTVNAAASAVNATASAVTVTAGAVTAASGGVTATTGTVTMAGAVIAPSTKCKQRASANENSRFHPGSMPVIDDRPADAGSGAGLRVNTSEGVVLLSYSGQKTEGPQRISAKISQIPPASAMDIEFQQSVSKSQVKPDSVTASQPPSKGPQAPAGYANVATHSTLVLTAQTYNASPVISSVKADRPSLEKPEPIHLSVSTPVTQGGTVKVLTQGINTPPVLVHNQLVLTPSIVTTNKKLADPVTLKIETKVLQPANLGSTLTPHHPPALPSKLPTEVNHVPSGPSIPADRTVSHLAAAKLDAHSPRPSGPGPSSFPRASHPSSTASTALSTNATVMLAAGIPVPQFISSIHPEQSVIMPPHSITQTVSLSHLSQGEVRMNTPTLPSITYSIRPEALHSPRAPLQPQQIEVRAPQRASTPQPAPAGVPALASQHPPEEEVHYHLPVARATAPVQSEVLVMQSEYRLHPYTVPRDVRIMVHPHVTAVSEQPRAADGVVKVPPASKAPQQPGKEAAKTPDAKAAPTPTPAPVPVPVPLPAPAPAPHGEARILTVTPSNQLQGLPLTPPVVVTHGVQIVHSSGELFQEYRYGDIRTYHPPAQLTHTQFPAASSVGLPSRTKTAAQGPPPEGEPLQPPQPVQSTQPAQPAPPCPPSQLGQPGQPPSSKMPQVSQEAKGTQTGVEQPRLPAGPANRPPEPHTQVQRAQAETGPTSFPSPVSVSMKPDLPVSLPTQTAPKQPLFVPTTSGPSTPPGLVLPHTEFQPAPKQDSSPHLTSQRPVDMVQLLKKYPIVWQGLLALKNDTAAVQLHFVSGNNVLAHRSLPLSEGGPPLRIAQRMRLEATQLEGVARRMTVETDYCLLLALPCGRDQEDVVSQTESLKAAFITYLQAKQAAGIINVPNPGSNQPAYVLQIFPPCEFSESHLSRLAPDLLASISNISPHLMIVIASV

SEQ ID NO: 840747 - protein, 3322 aa, Homo sapiens
SCEARESEPGGEGWSLHGGEPEEPPPLPTPPPQPPPPPPRHPPPGADGLVRSRRGGASSGGAGTPPSMVRETRHLWVGNLPENVREEKIIEHFKRYGRVESVKILPKRGSEGGVAAFVDFVDIKSAQKAHNSVNKMGDRDLRTDYNEPGTIPSAARGLDDTVSIASRSREVSGFRGGGGGPAYGPPPSLHAREGRYERRLDGASDNRERAYEHSAYGHHERGTGGFDRTRHYDQDYYRDPRERTLQHGLYYASRSRSPNRFDAHDPRYEPRAREQFTLPSVVHRDIYRDDITREVRGRRPERNYQHSRSRSPHSSQSRNQSPQRLASQASRPTRSPSGSGSRSRSSSSDSISSSSSTSSDSSDSSSSSSDDSPARSVQSAAVPAPTSQLLSSLEKDEPRKSFGIKVQNLPVRSTDTSLKDGLFHEFKKFGKVTSVQIHGTSEERYGLVFFRQQEDQEKALTASKGKLFFGMQIEVTAWIGPETESENEFRPLDERIDEFHPKATRTLFIGNLEKTTTYHDLRNIFQRFGEIVDIDIKKVNGVPQYAFLQYCDIASVCKAIKKMDGEYLGNNRLKLGFGKSMPTNCVWLDGLSSNVSDQYLTRHFCRYGPVVKVVFDRLKGMALVLYNEIEYAQAAVKETKGRKIGGNKIKVDFANRESQLAFYHCMEKSGQDIRDFYEMLAERREERRASYDYNQDRTYYESVRTPGTYPEDSRRDYPARGREFYSEWETYQGDYYESRYYDDPREYRDYRNDPYEQDIREYSYRQRERERERERFESDRDRDHERRPIERSQSPVHLRRPQSPGASPSQAERLPSDSERRLYSRSSDRSGSCSSLSPPRYEKLDKSRLERYTKNEKTDKERTFDPERVERERRLIRKEKVEKDKTDKQKRKGKVHSPSSQSSETDQENEREQSPEKPRSCNKLSREKADKEGIAKNRLELMPCVVLTRVKEKEGKVIDHTPVEKLKAKLDNDTVKSSALDQKLQVSQTEPAKSDLSKLESVRMKVPKEKGLSSHVEVVEKEGRLKARKHLKPEQPADGVSAVDLEKLEARKRRFADSNLKAEKQKPEVKKSSPEMEDARVLSKKQPDVSSREVILLREGEAERKPVRKEILKRESKKIKLDRLNTVASPKDCQELASISVGSGSRPSSDLQARLGEPAGESVENQEVQSKKPIPSKPQLKQLQVLDDQGPEREDVRKNYCSLRDETPERKSGQEKSHSVNTEEKIGIDIDHTQSYRKQMEQSRRKQQMEMEIAKSEKFGSPKKDVDEYERRSLVHEVGKPPQDVTDDSPPSKKKRMDHVDFDICTKRERNYRSSRQISEDSERTGGSPSVRHGSFHEDEDPIGSPRLLSVKGSPKVDEKVLPYSNITVREESLKFNPYDSSRREQMADMAKIKLSVLNSEDELNRWDSQMKQDAGRFDVSFPNSIIKRDSLRKRSVRDLEPGEVPSDSDEDGEHKSHSPRASALYESSRLSFLLRDREDKLRERDERLSSSLERNKFYSFALDKTITPDTKALLERAKSLSSSREENWSFLDWDSRFANFRNNKDKEKVDSAPRPIPSWYMKKKKIRTDSEGKMDDKKEDHKEEEQERQELFASRFLHSSIFEQDSKRLQHLERKEEDSDFISGRIYGKQTSEGANSTTDSIQEPVVLFHSRFMELTRMQQKEKEKDQKPKEVEKQEDTENHPKTPESAPENKDSELKTPPSVGPPSVTVVTLESAPSALEKTTGDKTVEAPLVTEEKTVEPATVSEEAKPASEPAPAPVEQLEQVDLPPGADPDKEAAMMPAGVEEGSSGDQPPYLDAKPPTPGASFSQAESNVDPEPDSTQPLSKPAQKSEEANEPKAEKPDATADAEPDANQKAEAAPESQPPASEDLEVDPPVAAKDKKPNKSKRSKTPVQAAAVSIVEKPVTRKSERIDREKLKRSNSPRGEAQKLLELKMEAEKITRTASKNSAADLEHPEPSLPLSRTRRRNVRSVYATMGDHENRSPVKEPVEQPRVTRKRLERELQEAAAVPTTPRRGRPPKTRRRADEEEENEAKEPAETLKPPEGWRSPRSQKTAAGGGPQGKKGKNEPKVDATRPEATTEVGPQIGVKESSMEPKAAEEEAGSEQKRDRKDAGTDKNPPETAPVEVVEKKPAPEKNSKSKRGRSRNSRLAVDKSASLKNVDAAVSPRGAAAQAGERESGVVAVSPEKSESPQKEDGLSSQLKSDPVDPDKEPEKEDVSASGPSPEATQLAKQMELEQAVEHIAKLAEASASAAYKADAPEGLAPEDRDKPAHQASETELAAAIGSIINDISGEPENFPAPPPYPGESQTDLQPPAGAQALQPSEEGMETDEAVSGILETEAATESSRPPVNAPDPSAGPTDTKEARGNSSETSHSVPEAKGSKEVEVTLVRKDKGRQKTTRSRRKRNTNKKVVAPVESHVPESNQAQGESPAANEGTTVQHPEAPQEEKQSEKPHSTPPQSCTSDLSKIPSTENSSQEISVEERTPTKASVPPDLPPPPQPAPVDEEPQARFRVHSIIESDPVTPPSDPSIPIPTLPSVTAAKLSPPVASGGIPHQSPPTKVTEWITRQEEPRAQSTPSPALPPDTKASDVDTSSSTLRKILMDPKYVSATSVTSTSVTTAIAEPVSAAPCLHEAPPPPVDSKKPLEEKTAPPVTNNSEIQASEVLVAADKEKVAPVIAPKITSVISRMPVSIDLENSQKITLAKPAPQTLTGLVSALTGLVNVSLVPVNALKGPVKGSVTTLKSLVSTPAGPVNVLKGPVNVLTGPVNVLTTPVNATVGTVNAAPGTVNAAASAVNATASAVTVTAGAVTAASGGVTATTGTVTMAGAVIAPSTKCKQRASANENSRFHPGSMPVIDDRPADAGSGAGLRVNTSEGVVLLSYSGQKTEGPQRISAKISQIPPASAMDIEFQQSVSKSQVKPDSVTASQPPSKGPQAPAGYANVATHSTLVLTAQTYNASPVISSVKADRPSLEKPEPIHLSVSTPVTQGGTVKVLTQGINTPPVLVHNQLVLTPSIVTTNKKLADPVTLKIETKVLQPANLGSTLTPHHPPALPSKLPTEVNHVPSGPSIPADRTVSHLAAAKLDAHSPRPSGPGPSSFPRASHPSSTASTALSTNATVMLAAGIPVPQFISSIHPEQSVIMPPHSITQTVSLSHLSQGEVRMNTPTLPSITYSIRPEALHSPRAPLQPQQIEVRAPQRASTPQPAPAGVPALASQHPPEEEVHYHLPVARATAPVQSEVLVMQSEYRLHPYTVPRDVRIMVHPHVTAVSEQPRAADGVVKVPPASKAPQQPGKEAAKTPDAKAAPTPISLAHLDASP

SEQ ID NO: 840748 - protein, 3731 aa, Homo sapiens; identical to SEQ ID NO: 840744

SEQ ID NO: 840749 - protein, 2529 aa, Homo sapiens
SCEARESEPGGEGWSLHGGEPEEPPPLPTPPPQPPPPPPRHPPPGADGLVRSRRGGASSGGAGTPPSMVRETRHLWVGNLPENVREEKIIEHFKRYGRVESVKILPKRGSEGGVAAFVDFVDIKSAQKAHNSVNKMGDRDLRTDYNEPGTIPSAARGLDDTVSIASRSREVSGFRGGGGGPAYGPPPSLHAREGRYERRLDGASDNRERAYEHSAYGHHERGTGGFDRTRHYDQDYYRDPRERTLQHGLYYASRSRSPNRFDAHDPRYEPRAREQFTLPSVVHRDIYRDDITREVRGRRPERNYQHSRSRSPHSSQSRNQSPQRLASQASRPTRSPSGSGSRSRSSSSDSISSSSSTSSDSSDSSSSSSDDSPARSVQSAAVPAPTSQLLSSLEKDEPRKSFGIKVQNLPVRSTDTSLKDGLFHEFKKFGKVTSVQIHGTSEERYGLVFFRQQEDQEKALTASKGKLFFGMQIEVTAWIGPETESENEFRPLDERIDEFHPKATRTLFIGNLEKTTTYHDLRNIFQRFGEIVDIDIKKVNGVPQYAFLQYCDIASVCKAIKKMDGEYLGNNRLKLGFGKSMPTNCVWLDGLSSNVSDQYLTRHFCRYGPVVKVVFDRLKGMALVLYNEIEYAQAAVKETKGRKIGGNKIKVDFANRESQLAFYHCMEKSGQDIRDFYEMLAERREERRASYDYNQDRTYYESVRTPGTYPEDSRRDYPARGREFYSEWETYQGDYYESRYYDDPREYRDYRNDPYEQDIREYSYRQRERERERERFESDRDRDHERRPIERSQSPVHLRRPQSPGASPSQAERLPSDSERRLYSRSSDRSGSCSSLSPPRYEKLDKSRLERYTKNEKTDKERTFDPERVERERRLIRKEKVEKDKTDKQKRKGKVHSPSSQSSETDQENEREQSPEKPRSCNKLSREKADKEGIAKNRLELMPCVVLTRVKEKEGKVIDHTPVEKLKAKLDNDTVKSSALDQKLQVSQTEPAKSDLSKLESVRMKVPKEKGLSSHVEVVEKEGRLKARKHLKPEQPADGVSAVDLEKLEARKRRFADSNLKAEKQKPEVKKSSPEMEDARVLSKKQPDVSSREVILLREGEAERKPVRKEILKRESKKIKLDRLNTVASPKDCQELASISVGSGSRPSSDLQARLGEPAGESVENQEVQSKKPIPSKPQLKQLQVLDDQGPEREDVRKNYCSLRDETPERKSGQEKSHSVNTEEKIGIDIDHTQSYRKQMEQSRRKQQMEMEIAKSEKFGSPKKDVDEYERRSLVHEVGKPPQDVTDDSPPSKKKRMDHVDFDICTKRERNYRSSRQISEDSERTGGSPSVRHGSFHEDEDPIGSPRLLSVKGSPKVDEKVLPYSNITVREESLKFNPYDSSRREQMADMAKIKLSVLNSEDELNRWDSQMKQDAGRFDVSFPNSIIKRDSLRKRSVRDLEPGEVPSDSDEDGEHKSHSPRASALYESSRLSFLLRDREDKLRERDERLSSSLERNKFYSFALDKTITPDTKALLERAKSLSSSREENWSFLDWDSRFANFRNNKDKEKVDSAPRPIPSWYMKKKKIRTDSEGKMDDKKEDHKEEEQERQELFASRFLHSSIFEQDSKRLQHLERKEEDSDFISGRIYGKQTSEGANSTTDSIQEPVVLFHSRFMELTRMQQKEKEKDQKPKEVEKQEDTENHPKTPESAPENKDSELKTPPSVGPPSVTVVTLESAPSALEKTTGDKTVEAPLVTEEKTVEPATVSEEAKPASEPAPAPVEQLEQVDLPPGADPDKEAAMMPAGVEEGSSGDQPPYLDAKPPTPGASFSQAESNVDPEPDSTQPLSKPAQKSEEANEPKAEKPDATADAEPDANQKAEAAPESQPPASEDLEVDPPVAAKDKKPNKSKRSKTPVQAAAVSIVEKPVTRKSERIDREKLKRSNSPRGEAQKLLELKMEAEKITRTASKNSAADLEHPEPSLPLSRTRRRNVRSVYATMGDHENRSPVKEPVEQPRVTRKRLERELQEAAAVPTTPRRGRPPKTRRRADEEEENEAKEPAETLKPPEGWRSPRSQKTAAGGGPQGKKGKNEPKVDATRPEATTEVGPQIGVKESSMEPKAAEEEAGSEQKRDRKDAGTDKNPPETAPVEVVEKKPAPEKNSKSKRGRSRNSRLAVDKSASLKNVDAAVSPRGAAAQAGERESGVVAVSPEKSESPQKEDGLSSQLKSDPVDPDKEPEKEDVSASGPSPEATQLAKQMELEQAVEHIAKLAEASASAAYKADAPEGLAPEDRDKPAHQASETELAAAIGSIINDISGEPENFPAPPPYPGESQTDLQPPAGAQALQPSEEGMETDEAVSGILETEAATESSRPPVNAPDPSAGPTDTKEARGNSSETSHSVPEAKGSKEVEVTLVRKDKGRQKTTRSRRKRNTNKKVVAPVESHVPESNQAQGESPAANEGTTVQHPEAPQEEKQSEKPHSTPPQSCTSDLSKIPSGWASGPACGDFLLEEVILRSQNAAQDKLLANLVFCCCVMNCHTLSSLNQRPFTLS

SEQ ID NO: 840750 - protein, 269 aa, Homo sapiens
MITPSLARGPAGPANRPPEPHTQVQRAQAETGPTSFPSPVSVSMKPDLPVSLPTQTAPKQPLFVPTTSGPSTPPGLVLPHTEFQPAPKQDSSPHLTSQRPVDMVQLLKKYPIVWQGLLALKNDTAAVQLHFVSGNNVLAHRSLPLSEGGPPLRIAQRMRLEATQLEGVARRMTVETDYCLLLALPCGRDQEDVVSQTESLKAAFITYLQAKQAAGIINVPNPGSNQPAYVLQIFPPCEFSESHLSRLAPDLLASISNISPHLMIVIASV

SEQ ID NO: 840751 - protein, 202 aa, Homo sapiens
TACLHWAKVQVTNLVQRQCCDTLDVLVCVDTHCRLLTQEGLQTSAETLGSRNISLVFFVHPHLPCSFGCVTLILLLPPSLIHRDVQFTVEEQTERFSLGGICRTWDVCIYKYIIYINIYNTDLKNQIPRHTFFLICAKNVFSEEILFSYSDFVLPTHLYKCASVQHGSCSRDVEVSHGTCTKRLANPSSYYLDLFPQLPNTY

SEQ ID NO: 840752 - protein, 202 aa, Homo sapiens
SCEARESEPGGEGWSLHGGEPEEPPPLPTPPPQPPPPPPRHPPPGADGLVRSRRGGASSGGAGTPPSMVRETRHLWVGNLPENVREEKIIEHFKRYGRVESVKILPKRGSEGGVAAFVDFVDIKSAQKAHNSVNKMGDRDLRTDYNEPGTIPSAARGLDDTVSIASRSREVSGFRGGGGGPAYGPPPSLHAREGRYERRLDG

SEQ ID NO: 840753 - protein, 200 aa, Homo sapiens
PLPIKKVDYPHKRGQNWGSYVHNSLPRFNWDYRSCFHTWKRASDNRERAYEHSAYGHHERGTGGFDRTRHYDQDYYRDPRERTLQHGLYYASRSRSPNRFDAHDPRYEPRAREQFTLPSVVHRDIYRDDITREVRGRRPERNYQHSRSRSPHSSQSRNQSPQRLASQASRPTRSPSGSGSRSRSSSSDSISSSSSTSSDR

SEQ ID NO: 840754 - protein, 3731 aa, Homo sapiens; identical to SEQ ID NO: 840744

SEQ ID NO: 840755 - protein, 3066 aa, Homo sapiens
MEKSGQDIRDFYEMLAERREERRASYDYNQDRTYYESVRTPGTYPEDSRRDYPARGREFYSEWETYQGDYYESRYYDDPREYRDYRNDPYEQDIREYSYRQRERERERERFESDRDRDHERRPIERSQSPVHLRRPQSPGASPSQAERLPSDSERRLYSRSSDRSGSCSSLSPPRYEKLDKSRLERYTKNEKTDKERTFDPERVERERRLIRKEKVEKDKTDKQKRKGKVHSPSSQSSETDQENEREQSPEKPRSCNKLSREKADKEGIAKNRLELMPCVVLTRVKEKEGKVIDHTPVEKLKAKLDNDTVKSSALDQKLQVSQTEPAKSDLSKLESVRMKVPKEKGLSSHVEVVEKEGRLKARKHLKPEQPADGVSAVDLEKLEARKRRFADSNLKAEKQKPEVKKSSPEMEDARVLSKKQPDVSSREVILLREGEAERKPVRKEILKRESKKIKLDRLNTVASPKDCQELASISVGSGSRPSSDLQARLGEPAGESVENQEVQSKKPIPSKPQLKQLQVLDDQGPEREDVRKNYCSLRDETPERKSGQEKSHSVNTEEKIGIDIDHTQSYRKQMEQSRRKQQMEMEIAKSEKFGSPKKDVDEYERRSLVHEVGKPPQDVTDDSPPSKKKRMDHVDFDICTKRERNYRSSRQISEDSERTGGSPSVRHGSFHEDEDPIGSPRLLSVKGSPKVDEKVLPYSNITVREESLKFNPYDSSRREQMADMAKIKLSVLNSEDELNRWDSQMKQDAGRFDVSFPNSIIKRDSLRKRSVRDLEPGEVPSDSDEDGEHKSHSPRASALYESSRLSFLLRDREDKLRERDERLSSSLERNKFYSFALDKTITPDTKALLERAKSLSSSREENWSFLDWDSRFANFRNNKDKEKVDSAPRPIPSWYMKKKKIRTDSEGKMDDKKEDHKEEEQERQELFASRFLHSSIFEQDSKRLQHLERKEEDSDFISGRIYGKQTSEGANSTTDSIQEPVVLFHSRFMELTRMQQKEKEKDQKPKEVEKQEDTENHPKTPESAPENKDSELKTPPSVGPPSVTVVTLESAPSALEKTTGDKTVEAPLVTEEKTVEPATVSEEAKPASEPAPAPVEQLEQVDLPPGADPDKEAAMMPAGVEEGSSGDQPPYLDAKPPTPGASFSQAESNVDPEPDSTQPLSKPAQKSEEANEPKAEKPDATADAEPDANQKAEAAPESQPPASEDLEVDPPVAAKDKKPNKSKRSKTPVQAAAVSIVEKPVTRKSERIDREKLKRSNSPRGEAQKLLELKMEAEKITRTASKNSAADLEHPEPSLPLSRTRRRNVRSVYATMGDHENRSPVKEPVEQPRVTRKRLERELQEAAAVPTTPRRGRPPKTRRRADEEEENEAKEPAETLKPPEGWRSPRSQKTAAGGGPQGKKGKNEPKVDATRPEATTEVGPQIGVKESSMEPKAAEEEAGSEQKRDRKDAGTDKNPPETAPVEVVEKKPAPEKNSKSKRGRSRNSRLAVDKSASLKNVDAAVSPRGAAAQAGERESGVVAVSPEKSESPQKEDGLSSQLKSDPVDPDKEPEKEDVSASGPSPEATQLAKQMELEQAVEHIAKLAEASASAAYKADAPEGLAPEDRDKPAHQASETELAAAIGSIINDISGEPENFPAPPPYPGESQTDLQPPAGAQALQPSEEGMETDEAVSGILETEAATESSRPPVNAPDPSAGPTDTKEARGNSSETSHSVPEAKGSKEVEVTLVRKDKGRQKTTRSRRKRNTNKKVVAPVESHVPESNQAQGESPAANEGTTVQHPEAPQEEKQSEKPHSTPPQSCTSDLSKIPSTENSSQEISVEERTPTKASVPPDLPPPPQPAPVDEEPQARFRVHSIIESDPVTPPSDPSIPIPTLPSVTAAKLSPPVASGGIPHQSPPTKVTEWITRQEEPRAQSTPSPALPPDTKASDVDTSSSTLRKILMDPKYVSATSVTSTSVTTAIAEPVSAAPCLHEAPPPPVDSKKPLEEKTAPPVTNNSEIQASEVLVAADKEKVAPVIAPKITSVISRMPVSIDLENSQKITLAKPAPQTLTGLVSALTGLVNVSLVPVNALKGPVKGSVTTLKSLVSTPAGPVNVLKGPVNVLTGPVNVLTTPVNATVGTVNAAPGTVNAAASAVNATASAVTVTAGAVTAASGGVTATTGTVTMAGAVIAPSTKCKQRASANENSRFHPGSMPVIDDRPADAGSGAGLRVNTSEGVVLLSYSGQKTEGPQRISAKISQIPPASAMDIEFQQSVSKSQVKPDSVTASQPPSKGPQAPAGYANVATHSTLVLTAQTYNASPVISSVKADRPSLEKPEPIHLSVSTPVTQGGTVKVLTQGINTPPVLVHNQLVLTPSIVTTNKKLADPVTLKIETKVLQPANLGSTLTPHHPPALPSKLPTEVNHVPSGPSIPADRTVSHLAAAKLDAHSPRPSGPGPSSFPRASHPSSTASTALSTNATVMLAAGIPVPQFISSIHPEQSVIMPPHSITQTVSLSHLSQGEVRMNTPTLPSITYSIRPEALHSPRAPLQPQQIEVRAPQRASTPQPAPAGVPALASQHPPEEEVHYHLPVARATAPVQSEVLVMQSEYRLHPYTVPRDVRIMVHPHVTAVSEQPRAADGVVKVPPASKAPQQPGKEAAKTPDAKAAPTPTPAPVPVPVPLPAPAPAPHGEARILTVTPSNQLQGLPLTPPVVVTHGVQIVHSSGELFQEYRYGDIRTYHPPAQLTHTQFPAASSVGLPSRTKTAAQGPPPEGEPLQPPQPVQSTQPAQPAPPCPPSQLGQPGQPPSSKMPQVSQEAKGTQTGVEQPRLPAGPANRPPEPHTQVQRAQAETGPTSFPSPVSVSMKPDLPVSLPTQTAPKQPLFVPTTSGPSTPPGLVLPHTEFQPAPKQDSSPHLTSQRPVDMVQLLKKYPIVWQGLLALKNDTAAVQLHFVSGNNVLAHRSLPLSEGGPPLRIAQRMRLEATQLEGVARRMTVETDYCLLLALPCGRDQEDVVSQTESLKAAFITYLQAKQAAGIINVPNPGSNQPAYVLQIFPPCEFSESHLSRLAPDLLASISNISPHLMIVIASV

SEQ ID NO: 840756 - protein, 3595 aa, Homo sapiens
SCEARESEPGGEGWSLHGGEPEEPPPLPTPPPQPPPPPPRHPPPGADGLVRSRRGGASSGGAGTPPSMVRETRHLWVGNLPENVREEKIIEHFKRYGRVESVKILPKRGSEGGVAAFVDFVDIKSAQKAHNSVNKMGDRDLRTDYNEPGTIPSAARGLDDTVSIASRSREVSGFRGGGGGPAYGPPPSLHAREGRYERRLDGASDNRERAYEHSAYGHHERGTGGFDRTRHYDQDYYRDPRERTLQHGLYYASRSRSPNRFDAHDPRYEPRAREQFTLPSVVHRDIYRDDITREVRGRRPERNYQHSRSRSPHSSQSRNQSPQRLASQASRPTRSPSGSGSRSRSSSSDSISSSSSTSSDSSDSSSSSSDDSPARSVQSAAVPAPTSQLLSSLEKDEPRKSFGIKVQNLPVRSTDTSLKDGLFHEFKKFGKVTSVQIHGTSEERYGLVFFRQQEDQEKALTASKGKLFFGMQIEVTAWIGPETESENEFRPLDERIDEFHPKATRTLFIGNLEKTTTYHDLRNIFQRFGEIVDIDIKKVNGVPQYAFLQYCDIASVCKAIKKMDGEYLGNNRLKLGFGKSMPTNCVWLDGLSSNVSDQYLTRHFCRYGPVVKVVFDRLKGMALVLYNEIEYAQAAVKETKGRKIGGNKIKVDFANRESQLAFYHCMEKSGQDIRDFYEMLAERREERRASYDYNQDRTYYESVRTPGTYPEDSRRDYPARGREFYSEWETYQGDYYESRYYDDPREYRDYRNDPYEQDIREYSYRQRERERERERFESDRDRDHERRPIERSQSPVHLRRPQSPGASPSQAERLPSDSERRLYSRSSDRSGSCSSLSPPRYEKLDKSRLERYTKNEKTDKERTFDPERVERERRLIRKEKVEKDKTDKQKRKGKVHSPSSQSSETDQENEREQSPEKPRSCNKLSREKADKEGIAKNRLELMPCVVLTRVKEKEGKVIDHTPVEKLKAKLDNDTVKSSALDQKLQVSQTEPAKSDLSKLESVRMKVPKEKGLSSHVEVVEKEGRLKARKHLKPEQPADGVSAVDLEKLEARKRRFADSNLKAEKQKPEVKKSSPEMEDARVLSKKQPDVSSREVILLREGEAERKPVRKEILKRESKKIKLDRLNTVASPKDCQELASISVGSGSRPSSDLQARLGEPAGESVENQEVQSKKPIPSKPQLKQLQVLDDQGPEREDVRKNYCSLRDETPERKSGQEKSHSVNTEEKIGIDIDHTQSYRKQMEQSRRKQQMEMEIAKSEKFGSPKKDVDEYERRSLVHEVGKPPQDVTDDSPPSKKKRMDHVDFDICTKRERNYRSSRQISEDSERTGGSPSVRHGSFHEDEDPIGSPRLLSVKGSPKVDEKVLPYSNITVREESLKFNPYDSSRREQMADMAKIKLSVLNSEDELNRWDSQMKQDAGRFDVSFPNSIIKRDSLRKRSVRDLEPGEVPSDSDEDGEHKSHSPRASALYESSRLSFLLRDREDKLRERDERLSSSLERNKFYSFALDKTITPDTKALLERAKSLSSSREENWSFLDWDSRFANFRNNKDKEKVDSAPRPIPSWYMKKKKIRTDSEGKMDDKKEDHKEEEQERQELFASRFLHSSIFEQDSKRLQHLERKEEDSDFISGRIYGKQTSEGANSTTDSIQEPVVLFHSRFMELTRMQQKEKEKDQKPKEVEKQEDTENHPKTPESAPENKDSELKTPPSVGPPSVTVVTLESAPSALEKTTGDKTVEAPLVTEEKTVEPATVSEEAKPASEPAPAPVEQLEQVDLPPGADPDKEAAMMPAGVEEGSSGDQPPYLDAKPPTPGASFSQAESNVDPEPDSTQPLSKPAQKSEEANEPKAEKPDATADAEPDANQKAEAAPESQPPASEDLEVDPPVAAKDKKPNKSKRSKTPVQAAAVSIVEKPVTRKSERIDREKLKRSNSPRGEAQKLLELKMEAEKITRTASKNSAADLEHPEPSLPLSRTRRRNVRSVYATMGDHENRSPVKEPVEQPRVTRKRLERELQEAAAVPTTPRRGRPPKTRRRADEEEENEAKEPAETLKPPEGWRSPRSQKTAAGGGPQGKKGKNEPKVDATRPEATTEVGPQIGVKESSMEPKAAEEEAGSEQKRDRKDAGTDKNPPETAPVEVVEKKPAPEKNSKSKRGRSRNSRLAVDKSASLKNVDAAVSPRGAAAQAGERESGVVAVSPEKSESPQKEDGLSSQLKSDPVDPDKEPEKEDVSASGPSPEATQLAKQMELEQAVEHIAKLAEASASAAYKADAPEGLAPEDRDKPAHQASETELAAAIGSIINDISGEPENFPAPPPYPGESQTDLQPPAGAQALQPSEEGMETDEAVSGILETEAATESSRPPVNAPDPSAGPTDTKEARGNSSETSHSVPEAKGSKEVEVTLVRKDKGRQKTTRSRRKRNTNKKVVAPVESHVPESNQAQGESPAANEGTTVQHPEAPQEEKQSEKPHSTPPQSCTSDLSKIPSTENSSQEISVEERTPTKASVPPDLPPPPQPAPVDEEPQARFRVHSIIESDPVTPPSDPSIPIPTLPSVTAAKLSPPVASGGIPHQSPPTKVTEWITRQEEPRAQSTPSPALPPDTKASDVDTSSSTLRKILMDPKYVSATSVTSTSVTTAIAEPVSAAPCLHEAPPPPVDSKKPLEEKTAPPVTNNSEIQASEVLVAADKEKVAPVIAPKITSVISRMPVSIDLENSQKITLAKPAPQTLTGLVSALTGLVNVSLVPVNALKGPVKGSVTTLKSLVSTPAGPVNVLKGPVNVLTGPVNVLTTPVNATVGTVNAAPGTVNAAASAVNATASAVTVTAGAVTAASGGVTATTGTVTMAGAVIAPSTKCKQRASANENSRFHPGSMPVIDDRPADAGSGAGLRVNTSEGVVLLSYSGQKTEGPQRISAKISQIPPASAMDIEFQQSVSKSQVKPDSVTASQPPSKGPQAPAGYANVATHSTLVLTAQTYNASPVISSVKADRPSLEKPEPIHLSVSTPVTQGGTVKVLTQGINTPPVLVHNQLVLTPSIVTTNKKLADPVTLKIETKVLQPANLGSTLTPHHPPALPSKLPTEVNHVPSGPSIPADRTVSHLAAAKLDAHSPRPSGPGPSSFPRASHPSSTASTALSTNATVMLAAGIPVPQFISSIHPEQSVIMPPHSITQTVSLSHLSQGEVRMNTPTLPSITYSIRPEALHSPRAPLQPQQIEVRAPQRASTPQPAPAGVPALASQHPPEEEVHYHLPVARATAPVQSEVLVMQSEYRLHPYTVPRDVRIMVHPHVTAVSEQPRAADGVVKVPPASKAPQQPGKEAAKTPDAKAAPTPTPAPVPVPVPLPAPAPAPHGEARILTVTPSNQLQGLPLTPPVVVTHGVQIVHSSGELFQEYRYGDIRTYHPPAQLTHTQFPAASSVGLPSRTKTAAQGPPPEGEPLQPPQPVQSTQPAQPAPPCPPSQLGQPGQPPSSKMPQVSQEAKGTQTGVEQPRLPAGPANRPPEPHTQVQRAQAETGPTSFPSPVSVSMKPDLPVSLPTQTAPKQPLFVPTTSGPSTPPGLVLPHTEFQPAPKQDSSPHLTSQRPVDMVQLLKKYPIVWQGLLALKNDTAAVQLHFVS

SEQ ID NO: 840757 - protein, 3731 aa, Homo sapiens; identical to SEQ ID NO: 840744

SEQ ID NO: 840758 - protein, 166 aa, Homo sapiens
MAYLQKYPIVWQGLLALKNDTAAVQLHFVSGNNVLAHRSLPLSEGGPPLRIAQRMRLEATQLEGVARRMTVETDYCLLLALPCGRDQEDVVSQTESLKAAFITYLQAKQAAGIINVPNPGSNQPAYVLQIFPPCEFSESHLSRLAPDLLASISNISPHLMIVIASV

SEQ ID NO: 840759 - protein, 140 aa, Homo sapiens
HSNIRVAFKVISEVGVFVDLILWVGCGLLFDWRPLLTGSWPLPQVETDYCLLLALPCGRDQEDVVSQTESLKAAFITYLQAKQAAGIINVPNPGSNQPAYVLQIFPPCEFSESHLSRLAPDLLASISNISPHLMIVIASV

SEQ ID NO: 840760 - protein, 132 aa, Homo sapiens
AAVRGVVGAAVASGTLETAPPAGVPALASQHPPEEEVHYHLPVARATAPVQSEVLVMQSEYRLHPYTVPRDVRIMVHPHVTAVSEQPRAADGVVKVPPASKAPQQPGKEAAKTPDAKAAPTPISLAHLDASP

SEQ ID NO: 840761 - protein, 206 aa, Homo sapiens
MDEDVLTTLKILIIGESGVGKSSLLLRFTDDTFDPELAATIGVDFKVKTISVDGNKAKLAIWDTAGQERFRTLTPSYYRGAQGVILVYDVTRRDTFVKLDNWLNELETYCTRNDIVNMLVGNKIDKENREVDRNEGLKFARKHSMLFIEASAKTCDGVQCAFEELVEKIIQTPGLWESENQNKGVKLSHREEGQGGGACGGYCSVL

SEQ ID NO: 840762 - protein, 206 aa, Homo sapiens; identical to SEQ ID NO: 840761

SEQ ID NO: 840763 - protein, 206 aa, Homo sapiens; identical to SEQ ID NO: 840761

SEQ ID NO: 840764 - protein, 206 aa, Homo sapiens; identical to SEQ ID NO: 840761

SEQ ID NO: 840765 - protein, 206 aa, Homo sapiens; identical to SEQ ID NO: 840761

SEQ ID NO: 840766 - protein, 319 aa, Homo sapiens
PRLPGSRPLPGPSSLGRSPSCSAEKTPFRGPPLGRQSAVKELDLVTAGKFRFSVRSECFSRGPPLKIKCNCYFSFCHILWRQKISVVLSFFTFSLGKIILTVELSISLLLRFTDDTFDPELAATIGVDFKVKTISVDGNKAKLAIWVTLHQQTANFFLKSQIGNSPILKWAMWQYDTAGQERFRTLTPSYYRGAQGVILVYDVTRRDTFVKLDNWLNELETYCTRNDIVNMLVGNKIDKENREVDRNEGLKFARKHSMLFIEASAKTCDGVQCAFEELVEKIIQTPGLWESENQNKGVKLSHREEGQGGGACGGYCSVL

SEQ ID NO: 840767 - protein, 188 aa, Homo sapiens
MDEDVLTTLKILIIGESGVGKSSLLLRFTDDTFDPELAATIGVDFKVKTISVDGNKAKLAIWDTAGQERFRTLTPSYYRGAQGVILVYDVTRRDTFVKLDNWLNELETYCTRNDIVNMLVGNKIDKENREVDRNEGLKFARKHSMLFIEASAKTCDGVQCAFEELVVKLSHREEGQGGGACGGYCSVL

SEQ ID NO: 840768 - protein, 206 aa, Homo sapiens; identical to SEQ ID NO: 840761

SEQ ID NO: 840769 - protein, 206 aa, Homo sapiens; identical to SEQ ID NO: 840761

SEQ ID NO: 840770 - protein, 206 aa, Homo sapiens; identical to SEQ ID NO: 840761

SEQ ID NO: 840771 - protein, 206 aa, Homo sapiens; identical to SEQ ID NO: 840761

SEQ ID NO: 840772 - protein, 206 aa, Homo sapiens; identical to SEQ ID NO: 840761

SEQ ID NO: 840773 - protein, 161 aa, Homo sapiens
MDEDVLTTLKILIIGESGVGKSSLLLRFTDDTFDPELAATIVYDVTRRDTFVKLDNWLNELETYCTRNDIVNMLVGNKIDKENREVDRNEGLKFARKHSMLFIEASAKTCDGVQCAFEELVEKIIQTPGLWESENQNKGVKLSHREEGQGGGACGGYCSVL

SEQ ID NO: 840774 - protein, 759 aa, Homo sapiens
TASVRQVGQLAGAHLATGRGNEGRGRRPGRTRRREPGGAGLGQRARPARLSWKALPLAAAMTSLWREILLESLLGCVSWSLYHDLGPMIYYFPLQTLELTGLEGFSIAFLSPIFLTITPFWKLVNKKWMLTLLRIITIGSIASFQAPNAKLRLMVLALGVSSSLIVQAVTWWSGSHLQRYLRIWGFILGQIVLVVLRIWYTSLNPIWSYQMSNKVILTLSAIATLDRIGTDGDCSKPEEKKTGEVATGMASRPNWLLAGAAFGSLVFLTHWVFGEVSLVSRWAVSGHPHPGPDPNPFGGAVLLCLASGLMLPSCLWFRGTGLIWWVTGTASAAGLLYLHTWAAAVSGCVFAIFTASMWPQTLGHLINSGTNPGKTMTIAMIFYLLEIFFCAWCTAFKFVPGGVYARERSDVLLGTMMLIIGLNMLFGPKKNLDLLLQTKNSSKVLFRKSEKYMKLFLWLLVGVGLLGLGLRHKAYERKLGKVAPTKEVSAAIWPFRFGYDNEGWSSLERSAHLLNETGADFITILESDASKPYMGNNDLTMWLGEKLGFYTDFGPSTRYHTWGIMALSRYPIVKSEHHLLPSPEGEIAPAITLTVNISGKLVDFVVTHFGNHEDDLDRKLQAIAVSKLLKSSSNQVIFLGYITSAPGSRDYLQLTEHGNVKDIDSTDHDRWCEYIMYRGLIRLGYARISHAELSDSEIQMAKFRIPDDPTNYRDNQKVVIDHREVSEKIHFNPRFGSYKEGHNYENNHNFHMNTPKYFL

SEQ ID NO: 840775 - protein, 563 aa, Homo sapiens
TASVRQVGQLAGAHLATGRGNEGRGRRPGRTRRREPGGAGLGQRARPARLSWKALPLAAAMTSLWREILLESLLGCVSWSLYHDLGPMIYYFPLQTLELTGLEGFSIAFLSPIFLTITPFWKLVNKKWMLTLLRIITIGSIASFQAPNAKLRLMVLALGVSSSLIVQAVTWWSGSHLQRYLRIWGFILGQIVLVVLRIWYTSLNPIWSYQMSNKVILTLSAIATLDRIGTDGDCSKPEEKKTGEVATGMASRPNWLLAGAAFGSLVFLTHWVFGEVSLVSRWAVSGHPHPGPDPNPFGGAVLLCLASGLMLPSCLWFRGTGLIWWVTGTASAAGLLYLHTWAAAVSGCVFAIFTASMWPQTLGHLINSGTNPGKTMTIAMIFYLLEIFFCAWCTAFKFVPGGVYARERSDVLLGTMMLIIGLNMLFGPKKNLDLLLQTKNSSKVLFRKSEKYMKLFLWLLVGVGLLGLGLRHKAYERKLGKVAPTKEVSAAIWPFRFGYDNEGWSSLERSAHLLNETGADFITILESDASKPYMGNNDLTMWLGEKLGFYTDFGPSTRYHTWG

SEQ ID NO: 840776 - protein, 48 aa, Homo sapiens
SPHPPEMPPFNCNDVLTHLLIFRDKAHTAFLASKFFITNWHTLAHQSR

SEQ ID NO: 840777 - protein, 80 aa, Homo sapiens
GLMEMYKTTNVGSLPANTTSVLQPMGQRVISTFKSYYLRSAFHKAIAVTDSDSTDGSGQNILKTFQKGFTIQDALGCSGL

SEQ ID NO: 840778 - protein, 80 aa, Homo sapiens; identical to SEQ ID NO: 840777

SEQ ID NO: 840779 - protein, 80 aa, Homo sapiens; identical to SEQ ID NO: 840777

SEQ ID NO: 840780 - protein, 34 aa, Homo sapiens
MVNPQATVNPQATVNPQATVNPQATVNPQATVNP

SEQ ID NO: 840781 - protein, 843 aa, Homo sapiens
ELVWPPRLGATALLAADTGCTMKPALLPWALLLLATALGPGPGPTADAQESCSMRCGALDGPCSCHPTCSGLGTCCLDFRDFCLEILPYSGSMMGGKDFVVRHFKMSSPTDASVICRFKDSIQTLGHVDSSGQVHCVSPLLYESGRIPFTVSLDNGHSFPRAGTWLAVHPNKVSMMEKSELVNETRWQYYGTANTSGNLSLTWHVKSLPTQTITIELWGYEETGMPYSQEWTAKWSYLYPLATHIPNSGSFTFTPKPAPPSYQRWRVGALRIIDSKNYAGQKDVQALWTNDHALAWHLSDDFREDPVAWARTQCQAWEELEDQLPNFLEELPDCPCTLTQARADSGRFFTDYGCDMEQGSVCTYHPGAVHCVRSVQASLRYGSGQQCCYTADGTQLLTADSSGGSTPDRGHDWGAPPFRTPPRVPSMSHWLYDVLSFYYCCLWAPDCPRYMQRRPSNDCRNYRPPRLASAFGDPHFVTFDGTNFTFNGRGEYVLLEAALTDLRVQARAQPGTMSNGTETRGTGLTAVAVQEGNSDVVEVRLANRTGGLEVLLNQEVLSFTEQSWMDLKGMFLSVAAGDRVSIMLASGAGLEVSVQGPFLSVSVLLPEKFLTHTHGLLGTLNNDPTDDFTLHSGRVLPPGTSPQELFLFGANWTVHNASSLLTYDSWFLVHNFLYQPKHDPTFEPLFPSETTLNPSLAQEAAKLCGDDHFCNFDVAATGSLSTGTATRVAHQLHQRRMQSLQPVVSCGWLAPPPNGQKEGNRYLAGSTIYFHCDNGYSLAGAETSTCQADGTWSSPTPKCQPGRSYAVLLGIIFGGLAVVAAVALVYVLLRRRKGNTHVWGAQP

SEQ ID NO: 840782 - protein, 331 aa, Homo sapiens
MSNGTETRGTGLTAVAVQEGNSDVVEVRLANRTGGLEVLLNQEVLSFTEQSWMDLKGMFLSVAAGDRVSIMLASGAGLEVSVQGPFLSVSVLLPEKFLTHTHGLLGTLNNDPTDDFTLHSGRVLPPGTSPQELFLFGANWTVHNASSLLTYDSWFLVHNFLYQPKHDPTFEPLFPSETTLNPSLAQEAAKLCGDDHFCNFDVAATGSLSTGTATRVAHQLHQRRMQSLQPVVSCGWLAPPPNGQKEGNRYLAGSTIYFHCDNGYSLAGAETSTCQADGTWSSPTPKCQPGRSYAVLLGIIFGGLAVVAAVALVYVLLRRRKGNTHVWGAQP

SEQ ID NO: 840783 - protein, 87 aa, Homo sapiens
LPLQVPSPTAPGCRPPCPGAAGGDKMLTAGDPNASPLSPGMFLSVAAGDRVSIMLASGAGLEVSVQGPFLSVSVLLPEKFLTHTHGL

SEQ ID NO: 840784 - protein, 843 aa, Homo sapiens; identical to SEQ ID NO: 840781

SEQ ID NO: 840785 - protein, 676 aa, Homo sapiens
ELVWPPRLGATALLAADTGCTMKPALLPWALLLLATALGPGPGPTADAQESCSMRCGALDGPCSCHPTCSGLGTCCLDFRDFCLEILPYSGSMMGGKDFVVRHFKMSSPTDASVICRFKDSIQTLGHVDSSGQVHCVSPLLYESGRIPFTVSLDNGHSFPRAGTWLAVHPNKVSMMEKSELVNETRWQYYGTANTSGNLSLTWHVKSLPTQTITIELWGYEETGMPYSQEWTAKWSYLYPLATHIPNSGSFTFTPKPAPPSYQRWRVGALRIIDSKNYAGQKDVQALWTNDHALAWHLSDDFREDPVAWARTQCQAWEELEDQLPNFLEELPDCPCTLTQARADSGRFFTDYGCDMEQGSVCTYHPGAVHCVRSVQASLRYGSGQQCCYTADGTQLLTADSSGGSTPDRGHDWGAPPFRTPPRVPSMSHWLYDVLSFYYCCLWAPDCPRYMQRRPSNDCRNYRPPRLASAFGDPHFVTFDGTNFTFNGRGEYVLLEAALTDLRVQARAQPGTMSNGTETRGTGLTAVAVQEGNSDVVEVRLANRTGGLEVLLNQEVLSFTEQSWMDLKGMFLSVAAGDRVSIMLASGAGLEVSVQGPFLSVSVLLPEKFLTHTHGLLGTLNNDPTDDFTLHSGRVLPPGTSPQELFLFGANWTVHMRPPAHLRFLVLPEMGSSRSP

SEQ ID NO: 840786 - protein, 118 aa, Homo sapiens
VAIQSVRCYSHGSQETDEEFDARWVTYFNKPDIDAWELRKGINTLVTYDMVPEPKIIDAALRACRRLNDFASTVRILEVVKDKAGPHKEIYPYVIQELRPTLNELGISTPEELGLDKV

SEQ ID NO: 840787 - protein, 163 aa, Homo sapiens [sequence omitted]

SEQ ID NO: 840788 - protein, 1334 aa, Homo sapiens
HEEESEKKGCRWRGGGLTSACSVGSGGGAQHPSYSALGGGLRENTAIFMCKCCNLFSPNQSELLSHVSEKHMEEGVNVDEIIIPLRPLSTPEPPNSSKTRDEFLVMKRKRGRPKGSTKKSSTEEELAENIVSPTEDSPLAPEEGNSLPPSSLECSKCCRKFSNTRQLRKHICIIVLNLGEEEGEAGNESDLELEKKCKEDDREKASKRPRSQKTEKVQKISGKEARQLSGAKKPIISVVLTAHEAIPGATKIVPVEAGPPETGATNSETTSADLVPRRGYQEYAIQQTPYEQPMKSSRLGPTQLKIFTCEYCNKVFKFKHSLQAHLRIHTNEKPYKCPQCSYASAIKANLNVHLRKHTGEKFACDYCSFTCLSKGHLKVHIERVHKKIKQHCRFCKKKYSDVKNLIKHIRDAHDPQDKKVKEALDELCLMTREGKRQLLYDCHICERKFKNELDRDRHMLVHGDKWPFACELCGHGATKYQALELHVRKHPFVYVCAVCRKKFVSSIRLRTHIKEVHGAAQEALVFTSSINQSFCLLEPGGDIQQEALGDQLQLVEEEFALQGVNALKEEACPGDTQLEEGRKEPEAPGEMPAPAVHLASPQAESTALPPCELETTVVSSSDLHSQEVVSDDFLLKNDTSSAEAHAAPEKPPDMQHRSSVQTQGEVITLLLSKAQSAGSDQESHGAQSPLGEGQNMAVLSAGDPDPSRCLRSNPAEASDLLPPVAGGGDTITHQPDSCKAAPEHRSGITAFMKVLNSLQKKQMNTSLCERIRKVYGDLECEYCGKLFWYQVHFDMHVRTHTREHLYYCSQCHYSSITKNCLKRHVIQKHSNILLKCPTDGCDYSTPDKYKLQAHLKVHTALDKRSYSCPVCEKSFSEDRLIKSHIKTNHPEVSMSTISEVLGRRVQLKGLIGKRAMKCPYCDFYFMKNGSDLQRHIWAHEGVKPFKCSLCEYATRSKSNLKAHMNRHSTEKTHLCDMCGKKFKSKGTLKSHKLLHTADGKQFKCTVCDYTAAQKPQLLRHMEQHVSFKKRSMLCNLETKSKMCKRMQTEEKARSLHKSTGGFRGRLAGFRDTYFCFQILDVLQPFRCAHCHYSCNISGSLKRHYNRKHPNEEYANVGTGELAAEVLIQQGGLKCPVCSFVYGTKWEFNRHLKNKHGLKVVEIDGDPKWETATEAPEEPSTQYLHITEAEEDVQGTQAAVAALQDLRYTSESGDRLDPTAVNILQQIIELGAETHDATALASVVAMAPGTVTVVKQVTEEEPSSNHTVMIQETVQQASVELAEQHHLVVSSDDVEGIETVTVYTQGGEASEFIVYVQEAMQPVEEQAVEQPAQEL

SEQ ID NO: 840789 - protein, 1323 aa, Homo sapiens
HEEESEKKGCRWRGGGLTSACSVGSGGGAQHPSYSALGGGLRENTAIFMCKCCNLFSPNQSELLSHVSEKHMEEGVNVDEIIIPLRPLSTPEPPNSSKTRDEFLVMKRKRGRPKGSTKKSSTEEELAENIVSPTEDSPLAPEEGNSLPPSSLECSKCCRKFSNTRQLRKHICIIVLNLGEEEGEAGNESDLELEKKCKEDDREKASKRPRSQKTEKVQKISGKEARQLSGAKKPIISVVLTAHEAIPGATKIVPVEAGPPETGATNSETTSADLVPRRGYQEYAIQQTPYEQPMKSSRLGPTQLKIFTCEYCNKVFKFKHSLQAHLRIHTNEKPYKCPQCSYASAIKANLNVHLRKHTGEKFACDYCSFTCLSKGHLKVHIERVHKKIKQHCRFCKKKYSDVKNLIKHIRDAHDPQDKKVKEALDELCLMTREGKRQLLYDCHICERKFKNELDRDRHMLVHGDKWPFACELCGHGATKYQALELHVRKHPFVYVCAVCRKKFVSSIRLRTHIKEVHGAAQEALVFTSSINQSFCLLEPGGDIQQEALGDQLQLVEEEFALQGVNALKEEACPGDTQLEEGRKEPEAPGEMPAPAVHLASPQAESTALPPCELETTVVSSSDLHSQEVVSDDFLLKNDTSSAEAHAAPEKPPDMQHRSSVQTQGEVITLLLSKAQSAGSDQESHGAQSPLGEGQNMAVLSAGDPDPSRCLRSNPAEASDLLPPVAGGGDTITHQPDSCKAAPEHRSGITAFMKVLNSLQKKQMNTSLCERIRKVYGDLECEYCGKLFWYQVHFDMHVRTHTREHLYYCSQCHYSSITKNCLKRHVIQKHSNILLKCPTDGCDYSTPDKYKLQAHLKVHTALVFGGGSCNTMNECLFLQILIYLKRLTPESDLRLLQVIKEAHLAQDKRSYSCPVCEKSFSEDRLIKSHIKTNHPEVSMSTISEVLGRRVQLKGLIGKRAMKCPYCDFYFMKNGSDLQRHIWAHEGVKPFKCSLCEYATRSKSNLKAHMNRHSTEKTHLCDMCGKKFKSKGTLKSHKLLHTADGKQFKCTVCDYTAAQKPQLLRHMEQHVSFKPFRCAHCHYSCNISGSLKRHYNRKHPNEEYANVGTGELAAEVLIQQGGLKCPVCSFVYGTKWEFNRHLKNKHGLKVVEIDGDPKWETATEAPEEPSTQYLHITEAEEDVQGTQAAVAALQDLRYTSESGDRLDPTAVNILQQIIELGAETHDATALASVVAMAPGTVTVVKQVTEEEPSSNHTVMIQETVQQASVELAEQHHLVVSSDDVEGIETVTVYTQGGEASEFIVYVQEAMQPVEEQAVEQPAQEL

SEQ ID NO: 840790 - protein, 131 aa, Homo sapiens
NLASVSCTGDRLDPTAVNILQQIIELGAETHDATALASVVAMAPGTVTVVKQVTEEEPSSNHTVMIQETVQQASVELAEQHHLVVSSDDVEGIETVTVYTQGGEASEFIVYVQEAMQPVEEQAVEQPAQEL

SEQ ID NO: 840791 - protein, 1154 aa, Homo sapiens
HEEESEKKGCRWRGGGLTSACSVGSGGGAQHPSYSALGGGLRENTAIFMCKCCNLFSPNQSELLSHVSEKHMEEGVNVDEIIIPLRPLSTPEPPNSSKTRDEFLVMKRKRGRPKGSTKKSSTEEELAENIVSPTEDSPLAPEEGNSLPPSSLECSKCCRKFSNTRQLRKHICIIVLNLGEEEGEAGNESDLELEKKCKEDDREKASKRPRSQKTEKVQKISGKEARQLSGAKKPIISVVLTAHEAIPGATKIVPVEAGPPETGATNSETTSADLVPRRGYQEYAIQQTPYEQPMKSSRLGPTQLKIFTCEYCNKVFKFKHSLQAHLRIHTNEKPYKCPQCSYASAIKANLNVHLRKHTGEKFACDYCSFTCLSKGHLKVHIERVHKKIKQHCRFCKKKYSDVKNLIKHIRDAHDPQDKKVKEALDELCLMTREGKRQLLYDCHICERKFKNELDRDRHMLVHGDKWPFACELCGHGATKYQALELHVRKHPFVYVCAVCRKKFVSSIRLRTHIKEVHGAAQEALVFTSSINQSFCLLEPGGDIQQEALGDQLQLVEEEFALQGVNALKEEACPGDTQLEEGRKEPEAPGEMPAPAVHLASPQAESTALPPCELETTVVSSSDLHSQEVVSDDFLLKNDTSSAEAHAAPEKPPDMQHRSSVQTQGEVITLLLSKAQSAGSDQESHGAQSPLGEGQNMAVLSAGDPDPSRCLRSNPAEASDLLPPVAGGGDTITHQPDSCKAAPEHRSGITAFMKVLNSLQKKQMNTSLCERIRKVYGDLECEYCGKLFWYQVHFDMHVRTHTREHLYYCSQCHYSSITKNCLKRHVIQKHSNILLKCPTDGCDYSTPDKYKLQAHLKVHTALDKRSYSCPVCEKSFSEDRLIKSHIKTNHPEVSMSTISEVLGRRVQLKGLIGKRAMKCPYCDFYFMKNGSDLQRHIWAHEGVKPFKCSLCEYATRSKSNLKAHMNRHSTEKTHLCDMCGKKFKSKGTLKSHKLLHTADGKQFKCTVCDYTAAQKPQLLRHMEQHVSFKPFRCAHCHYSCNISGSLKRHYNRKHPNEEYANVGTGELAAEVLIQQGGLKCPVCSFVYGTKWEFNRHLKNKHGLKVVEIDGDPKWEHRGGAQLQPHGHDPGDGPASVRGACRAAPPGGVLRRRGGH

SEQ ID NO: 840792 - protein, 1279 aa, Homo sapiens
HEEESEKKGCRWRGGGLTSACSVGSGGGAQHPSYSALGGGLRENTAIFMCKCCNLFSPNQSELLSHVSEKHMEEGVNVDEIIIPLRPLSTPEPPNSSKTRDEFLVMKRKRGRPKGSTKKSSTEEELAENIVSPTEDSPLAPEEGNSLPPSSLECSKCCRKFSNTRQLRKHICIIVLNLGEEEGEAGNESDLELEKKCKEDDREKASKRPRSQKTEKVQKISGKEARQLSGAKKPIISVVLTAHEAIPGATKIVPVEAGPPETGATNSETTSADLVPRRGYQEYAIQQTPYEQPMKSSRLGPTQLKIFTCEYCNKVFKFKHSLQAHLRIHTNEKPYKCPQCSYASAIKANLNVHLRKHTGEKFACDYCSFTCLSKGHLKVHIERVHKKIKQHCRFCKKKYSDVKNLIKHIRDAHDPQDKKVKEALDELCLMTREGKRQLLYDCHICERKFKNELDRDRHMLVHGDKWPFACELCGHGATKYQALELHVRKHPFVYVCAVCRKKFVSSIRLRTHIKEVHGAAQEALVFTSSINQSFCLLEPGGDIQQEALGDQLQLVEEEFALQGVNALKEEACPGDTQLEEGRKEPEAPGEMPAPAVHLASPQAESTALPPCELETTVVSSSDLHSQEVVSDDFLLKNDTSSAEAHAAPEKPPDMQHRSSVQTQGEVITLLLSKAQSAGSDQESHGAQSPLGEGQNMAVLSAGDPDPSRCLRSNPAEASDLLPPVAGGGDTITHQPDSCKAAPEHRSGITAFMKVLNSLQKKQMNTSLCERIRKVYGDLECEYCGKLFWYQVHFDMHVRTHTREHLYYCSQCHYSSITKNCLKRHVIQKHSNILLKCPTDGCDYSTPDKYKLQAHLKVHTALDKRSYSCPVCEKSFSEDRLIKSHIKTNHPEVSMSTISEVLGRRVQLKGLIGKRAMKCPYCDFYFMKNGSDLQRHIWAHEGVKPFKCSLCEYATRSKSNLKAHMNRHSTEKTHLCDMCGKKFKSKGTLKSHKLLHTADGKQFKCTVCDYTAAQKPQLLRHMEQHVSFKPFRCAHCHYSCNISGSLKRHYNRKHPNEEYANVGTGELAAEVLIQQGGLKCPVCSFVYGTKWEFNRHLKNKHGLKVVEIDGDPKWETATEAPEEPSTQYLHITEAEEDVQGTQAAVAALQDLRYTSESGDRLDPTAVNILQQIIELGAETHDATALASVVAMAPGTVTVVKQVTEEEPSSNHTVMIQETVQQASVELAEQHHLVVSSDDVEGIETVTVYTQGGEASEFIVYVQEAMQPVEEQAVEQPAQEL

SEQ ID NO: 840793 - protein, 319 aa, Homo sapiens
LILTWQGTPLCTWLHAWHFIHSGSCWPGDAHLVLRFFPGKQFKCTVCDYTAAQKPQLLRHMEQHVSFKPFRCAHCHYSCNISGSLKRHYNRKHPNEEYANVGTGELAAEVLIQQGGLKCPVCSFVYGTKWEFNRHLKNKHGLKVVEIDGDPKWETATEAPEEPSTQYLHITEAEEDVQGTQAAVAALQDLRYTSESGDRLDPTAVNILQQIIELGAETHDATALASVVAMAPGTVTVVKQVTEEEPSSNHTVMIQETVQQASVELAEQHHLVVSSDDVEGIETVTVYTQGGEASEFIVYVQEAMQPVEEQAVEQPAQEL

SEQ ID NO: 840794 - protein, 48 aa, Homo sapiens
MRLFPRAGLGSQPGPECGQPGQISGPCPDRAGTSKPCSLILASACPAH

SEQ ID NO: 840795 - protein, 348 aa, Homo sapiens
MAAGVAGWGVEAEEFEDAPDVEPLEPTLSNIIEQRSLKWIFVGGKGGVGKTTCSCSLAVQLSKGRESVLIISTDPAHNISDAFDQKFSKVPTKVKGYDNLFAMEIDPSLGVAELPDEFFEEDNMLSMGKKMMQEAMSAFPGIDEAMSYAEVMRLVKGMNFSVVVFDTAPTGHTLRLLNFPTIVERGLGRLMQIKNQISPFISQMCNMLGLGDMNADQLASKLEETLPVIRSVSEQFKDPEQTTFICVCIAEFLSLYETERLIQELAKCKIDTHNIIVNQLVFPDPEKPCKMCEARHKIQAKYLDQMEDLYEDFHIVKLPLLPHEVRGADKVNTFSALLLEPYKPPSAQ

SEQ ID NO: 840796 - protein, 322 aa, Homo sapiens
MAAGVAGWGVEAEEFEDAPDVEPLEPTLSNIIEQRSLKWIFVGGKGGVGKTTCSCSLAVQLSKGRESVLIISTDPAHNISDAFDQKFSKVPTKVKGYDNLFAMEIDPSLGVAELPDEFFEEDNMLSMGKKMMQEAMSAFPGIDEAMSYAEVMRLVKGMNFSVVVFDTAPTGHTLRLLNFPTIVERGLGRLMQIKNQISPFISQMCNMLGLGDMNADQLASKLEETLPVIRSVSEQFKDPEQTTFICVCIAEFLSLYETERLIQELAKCKIDTHNIIVNQLVLHPPHPLGAEFAQSPPHNTGGATWAGGREGSIPPGGAGGEL

SEQ ID NO: 840797 - protein, 220 aa, Homo sapiens
MAAGVAGWGVEAEEFEDAPDVEPLEPTLSNIIEQRSLKWIFVGGKGGVGKTTCSCSLAVQLSKGRESVLIISTDPAHNISDAFDQKFSKVPTKVKGYDNLFAMEIDPSLGVAELPDEFFEEDNMLSMGKKMMQEAMSAFPGIDEAMSYAEVMRLVKGMNFSVVVFDTAPTGHTLRLLNFPTIVERGLGRLMQIKNQISPFISQAGGGGPHLHHPGSREWE

SEQ ID NO: 840798 - protein, 128 aa, Homo sapiens
MAAGVAGWGVEAEEFEDAPDVEPLEPTLSNIIEQRSLKWIFVGGKGGVGKTTCSSKEAAAGSSWSPTSPPVPSSTAASPNRCHFTLTLHPPHPLGAEFAQSPPHNTGGATWAGGREGSIPPGGAGGEL

SEQ ID NO: 840799 - protein, 166 aa, Homo sapiens
KGHGLGVWLVAKVLRMVRSAGSREPVPKWRQGWPGGGLRQRSSKMLLMWSRWSLHLVLKGAQETPNIIEQRSLKWIFVGGKGGVGKTTCRQTRSTPSRPSSWSPTSPPVPSSTAASPNRCHFTLTLHPPHPLGAEFAQSPPHNTGGATWAGGREGSIPPGGAGGEL

SEQ ID NO: 840800 - protein, 348 aa, Homo sapiens; identical to SEQ ID NO: 840795

SEQ ID NO: 840801 - protein, 217 aa, Homo sapiens
MAAGVAGWGVEAEEFEDAPDVEPLEPTLSNIIEQRSLKWIFVGGKGGVGKTTCSCSLAVQLSKGRESVLIISTDPAHNISDAFDQKFSKVPTKVKGYDNLFAMEIDPSLGVAELPDEFFEEDNMLSMGKKMMQEAKCKIDTHNIIVNQLVFPDPEKPCKMCEARHKIQAKYLDQMEDLYEDFHIVKLPLLPHEVRGADKVNTFSALLLEPYKPPSAQ

SEQ ID NO: 840802 - protein, 227 aa, Homo sapiens
  misc_feature (176)..(177): Xaa can be any naturally occurring amino acid
  misc_feature (179)..(179): Xaa can be any naturally occurring amino acid
  misc_feature (184)..(185): Xaa can be any naturally occurring amino acid
  misc_feature (189)..(189): Xaa can be any naturally occurring amino acid
  misc_feature (192)..(193): Xaa can be any naturally occurring amino acid
  misc_feature (195)..(196): Xaa can be any naturally occurring amino acid
  misc_feature (198)..(198): Xaa can be any naturally occurring amino acid
  misc_feature (202)..(202): Xaa can be any naturally occurring amino acid
  misc_feature (221)..(221): Xaa can be any naturally occurring amino acid
MAAGVAGWGVEAEEFEDAPDVEPLEPTLSNIIEQRSLKWIFVGGKGGVGKTTCSCSLAVQLSKGRESVLIISTDPAHNISDAFDQKFSKVPTKVKGYDNLFAMEIDPSLGVAELPDEFFEEDNMLSMGKKMMQEAMSAFPGIDEAMSYAEVMRLVKGMNLLRWGVFDSCARARVPXXLXCLLQXXPHPXVGXXVXXCXASLXDPKKPSIHALFHSPPALLXTLPVCP

SEQ ID NO: 840803 - protein, 72 aa, Homo sapiens
ERLIQELAKCKIDTHNIIVNQLVFPDPEKPCKMCEARHKIQAKYLDQVCPPTQHWLSRGTSAPLFSDLLLHH

SEQ ID NO: 840804 - protein, 75 aa, Homo sapiens
EQSDSHLEEDTGAESDGAVVPGEEIFYFGILERRDNEDDMEFINMLSLIYTTACPMLLAEQSVLLAYADAIVYKC

SEQ ID NO: 840805 - protein, 147 aa, Homo sapiens [sequence omitted]

SEQ ID NO: 840806 - protein, 147 aa, Homo sapiens [sequence omitted]

SEQ ID NO: 840807 - protein, 285 aa, Homo sapiens
MDDSTEREQSRLTSCLKKREEMKLKECVSILPRKESPSVRSSKDGKLLAATLLLALLSCCLTVVSFYQVAALQGDLASLRAELQGHHAEKLPAGAGAPKAGLEEAPAVTAGLKIFEPPAPGEGNSSQNSRNKRAVQGPEETVTQDCLQLIADSETPTIQKGSYTFVPWLLSFKRGSALEEKENKILVKETGYFFIYGQVLYTDKTYAMGHLIQRKKVHVFGDELSLVTLFRCIQNMPETLPNNSCYSAGIAKLEEGDELQLAIPRENAQISLDGDVTFFGALKLL

SEQ ID NO: 840808 - protein, 200 aa, Homo sapiens
MDDSTEREQSRLTSCLKKREEMKLKECVSILPRKESPSVRSSKDGKLLAATLLLALLSCCLTVVSFYQVAALQGDLASLRAELQGHHAEKLPAGAGAPKAGLEEAPAVTAGLKIFEPPAPGEGNSSQNSRNKRAVQGPEETVTQDCLQLIADSETPTIQKGSYTFVPWLLSFKRGSALEEKENKILVKETGYFFIYGQVG

SEQ ID NO: 840809 - protein, 102 aa, Homo sapiens
KIKSLLEDYLDQKPEPDGNLPGHACGVLDSSRFVNCWTRFAEWGVQAEDKSELHSSRQRRALIEKKAKKRRRYKERVMLSKEFGKEMDMCTGMIMDKPGHVG

SEQ ID NO: 840810 - protein, 109 aa, Homo sapiens
MPCLALAVPTPAGTWGLGAGPRSPAVCLVSGQGWWSPPLGLAPWAQGPASLCPVRRDPLMPSGQPGELLAERPGLRWLAWRLPRCSSLPAWPSGARRPPQTLLCLRVSP

SEQ ID NO: 840811 - protein, 344 aa, Homo sapiens
MAAATEHNRPSSGDRNLERRCSPNLSREVLYEIFRSLHTLVGQLDLRDDVVKITIDWNKLQSLSAFQPALLFSALEQHILYLQPFLAKLQSPIKEENTTAVEEIGRTEMGNKNEVNDKFSIGDLQEEEKHKESDLRDVKKTQIHFDPEVVQIKAGKAEIDRRISAFIERKQAEINENNVREFCNVIDCNQENSCARTDAIFTPYPGFKSHVKVSRVVNTYGPQTRPEGIPGSGHKPNSMLRDCGNQAVEERLQNIEAHLRLQTGGPVPRDIYQRIKKLEDKILELEGISPEYFQSVSFSGKRRKVQPPQQNYSLAELDEKISALKQALLRKSREAESMATHHLP

SEQ ID NO: 840812 - protein, 301 aa, Homo sapiens
MAAATEHNRPSSGDRNLERRCSPNLSREVLYEIFRSLHTLVGQLDLRDDVVKITIDWNKLQSLSAFQPALLFSALEQHILYLQPFLAKLQSPIKEENTTAVEEIGRTEMGNKNEVNDKFSIGDLQEEEKHKESDLRDVKKTQIHFDPEVVQIKAGKAEIDRRISAFIERKQAEINENNVREFCNVIDCNQENSCARTDAIFTPYPGFKSHVKVSRVVNTYGPQTRPEGIPGSGHKPNSMLRDCGNQAVEERLQNIEAHLRLQTGGPVPRDIYQRIKKLEDKILELEGISPEYFQSVACEHT

SEQ ID NO: 840813 - protein, 302 aa, Homo sapiens
MLDLRDDVVKITIDWNKLQSLSAFQPALLFSALEQHILYLQPFLAKLQSPIKEENTTAVEEIGRTEMGNKNEVNDKFSIGDLQEEEKHKESDLRDVKKTQIHFDPEVVQIKAGKAEIDRRISAFIERKQAEINENNVREFCNVIDCNQENSCARTDAIFTPYPGFKSHVKVSRVVNTYGPQTRPEGIPGSGHKPNSMLRDCGNQAVEERLQNIEAHLRLQTGGPVPRDIYQRIKKLEDKILELEGISPEYFQSVSFSGKRRKVQPPQQNYSLAELDEKISALKQALLRKSREAESMATHHLP

SEQ ID NO: 840814 - protein, 351 aa, Homo sapiens
MAAATEHNRPSSGDRNLERRCSPNLSREVLYEIFRSLHTLVGQLDLRDDVVKITIDWNKLQSLSAFQPALLFSALEQHILYLQMELCCSQPFLAKLQSPIKEENTTAVEEIGRTEMGNKNEVNDKFSIGDLQEEEKHKESDLRDVKKTQIHFDPEVVQIKAGKAEIDRRISAFIERKQAEINENNVREFCNVIDCNQENSCARTDAIFTPYPGFKSHVKVSRVVNTYGPQTRPEGIPGSGHKPNSMLRDCGNQAVEERLQNIEAHLRLQTGGPVPRDIYQRIKKLEDKILELEGISPEYFQSVSFSGKRRKVQPPQQNYSLAELDEKISALKQALLRKSREAESMATHHLP

SEQ ID NO: 840815 - protein, 189 aa, Homo sapiens
NLRRLEALGLVSARNGYQGLVDELAKDIRNQHRHRHRRKAELVKLQATLQGLSTKTTFYEEQGDYYSQYIRACLDHLAPDSKSSGKGKKQPSLHYTAAQLLEKGVLVEIEDLPASHFRNVIFDITPGDEAGKFEVNAKFLGVDMERFQLHYQDLLQLQYEGVAVMKLFNKAKVNVNLLIFLLNKKFLRK

SEQ ID NO: 840816 - protein, 189 aa, Homo sapiens; identical to SEQ ID NO: 840815

SEQ ID NO: 840817 - protein, 189 aa, Homo sapiens; identical to SEQ ID NO: 840815

SEQ ID NO: 840818 - protein, 38 aa, Homo sapiens
DTQVILQEKYDTASVLENDEAHLKKYRITSYVREYEEK

SEQ ID NO: 840819 - protein, 42 aa, Homo sapiens
MLDPHTAPSAQLRSTSVVHLDYKFLKGQGPVLLHPQLLALSL

SEQ ID NO: 840820 - protein, 126 aa, Homo sapiens
MMSIRQRREIRATEVSEDFPAQEENVKLENKLPSGCTSRRLWKILSLTIGGTIALCIGLLTSVYLATLHENDLWFSNIKEVEREISFRTECGLYYSYYKQMLQAPTLVQGFHGLIYDNKTESMKTI

SEQ ID NO: 840821 - protein, 237 aa, Homo sapiens
RPRSESPEQTGLNADQASGSVPLPSGQRSTRRGGEPREEAGPSVDEQLPGPMGAGAAARPLRRAPSPGLLTPPSPSFPQSSAAVLPSLYPRRAAARGAAPFPPSPVGLLPLPEPRVRTAEGRRSDLENNACKSDIMMSIRQRREIRATEVSEDFPAQEENVKLENKLPSGCTSRRLWKILSLTIGGTIALCIGLLTSVYLATLHENDLWFSNIKVWSFFDHCIIHSVGSPVVSHVDE

SEQ ID NO: 840822 - protein, 88 aa, Homo sapiens
MPRYISLHICYRIPHGMKNTGQSVAEQLQKADAYTVELENAESRVAKLRDEGERLHLPYALLQEVYKLEDVLDSMWGMLRARTTDIGS

SEQ ID NO: 840823 - protein, 163 aa, Homo sapiens
TLALELKKLYLALSDKKGDLLKAMTWPGENTNLLLECFDNLQVCLEHTQAAAVCRSKSLKAGLDYNRSYQNEIKRLYHQLIKSKTSLQQSLNEISGQSVAEQLQKADAYTVELENAESRVAKLRDEGERLHLPYALLQEVYKLEDVLDSMWGMLRARTTDIGS

SEQ ID NO: 840824 - protein, 293 aa, Homo sapiens [sequence omitted]

SEQ ID NO: 840825 - protein, 207 aa, Homo sapiens
MAKFMTPVIQDNPSGWGPCAVPEQFRDMPYQPFSKGDRLGKVADWTGATYQDKRYTNKYSSQFGGGSQYAYFHEEDESSFQLVDTARTQKTAYQRNRMRFAQRNLRRDKDRRNMLQFNLQILPKSAKQKERERIRLQKKFQKQFGVRQKWDQKSQKPRDSSVEVRSDWEVKRGTLDFPQLMKMRYLEVSEPQDIDVLWGPRILRQSL

SEQ ID NO: 840826 - protein, 125 aa, Homo sapiens
MAKFMTPVIQDNPSGWGPCAVPEQFRDMPYQPFSKGDRLGKVADWTGATYQDKRYTNKYSSQFGGGSQYAYFHEEDESSFQLVDTARTQKTAYQRNRMRFAQRNLRRAKVDAAANLVVVVDPGIP

SEQ ID NO: 840827 - protein, 157 aa, Homo sapiens
QTHLAGGTTYTFSTGEDGKERYNFPNPNPFVEDDMDKNEIASVAYRYRRWKLGDDIDLIVRCEHDGVMTGANGEVSFINIKTLNEWDSRHCNGVDWRQKLDSQRGAVIATELKNNSYKLARWTCCALLAGSEYLKLGYVSRYHVKDSSPRTSTHIHL

SEQ ID NO: 840828 - protein, 293 aa, Homo sapiens [sequence omitted]

SEQ ID NO: 840829 - protein, 293 aa, Homo sapiens [sequence omitted]

SEQ ID NO: 840830 - protein, 293 aa, Homo sapiens [sequence omitted]

SEQ ID NO: 840831 - protein, 293 aa, Homo sapiens [sequence omitted]

SEQ ID NO: 840832 - protein, 293 aa, Homo sapiens [sequence omitted]

SEQ ID NO: 840833 - protein, 235 aa, Homo sapiens
MEATYINHNFSQQCLRMGKERYNFPNPNPFVEDDMDKNEIASVAYRYRRWKLGDDIDLIVRCEHDGVMTGANGEVSFINIKTLNEWDSRHCNGVDWRQKLDSQRGAVIATELKNNSYKLARWTCCALLAGSEYLKLGYVSRYHVKDSSRHVILGTQQFKPNEFASQINLSVENAWGILRCVIDICMKLEEGKYLILKDPNKQVIRVYSLPDGTFSSDEDEEEEEEEEEEEEEEET

SEQ ID NO: 840834 - protein, 342 aa, Homo sapiens
MSCTRSVYSWDIVVQRVGSKLFFDKRDNSDFDLLTVSETANEPPQDEGNSFNSPRNLAMEATYINHNFSQQCLRMGKERYNFPNPNPFVEDDMDKNEIASVAYRYRRWKLGDDIDLIVRCEHDGVMTGANGEVSFINIKTLNEWDSRHCNGVDWRQKLDSQRGAVIATELKNNSYKLARWTCCALLAGSEYLKLGYVSRYHVKDSSRHVILGTQQFKPNEFASQINLSVENAWGILRCVIDICMKLEEGKYLILKDPNKQVIRVYSLPDGTFSSDEDEEEEEEEEEEEEVWIWLRVQVSLVQGGGASNLQFIQALLDSEEENDRAWDGRLGERYYPPVDADA

SEQ ID NO: 840835 - protein, 264 aa, Homo sapiens
MSCTRSVYSWDIVVQRVGSKLFFDKRDNSDFDLLTVSETANEPPQDEGNSFNSPRNLAMEATYINHNFSQQCLRMGKERYNFPNPNPFVEDDMDKNEIASVAYRYRRWKLGDDIDLIVRCEHDGVMTGANGEVSFINIKTLNEWDSRHCNGVDWRQKLDSQRGAVIATELKNNSYKLARWTCCALLAGSEYLKLGYVSRYHVKDSSRHVILGTQQFKPNEFASQINLSVENAWGILRCVIDICMKLEEGGGGRRGRRRGRNLNQ

SEQ ID NO: 840836 - protein, 293 aa, Homo sapiens [sequence omitted]

SEQ ID NO: 840837 - protein, 293 aa, Homo sapiens [sequence omitted]

SEQ ID NO: 840838 - protein, 293 aa, Homo sapiens [sequence omitted]

SEQ ID NO: 840839 - protein, 293 aa, Homo sapiens [sequence omitted]

SEQ ID NO: 840840 - protein, 207 aa, Homo sapiens; identical to SEQ ID NO: 840825

SEQ ID NO: 840841 - protein, 293 aa, Homo sapiens [sequence omitted]

SEQ ID NO: 840842 - protein, 336 aa, Homo sapiens
RVQLRPRTSCARGTVAHHRRACIRKLAKTQGNVFATDAILATLMSCTRSVYSWDIVVQRVGSKLFFDKRDNSDFDLLTVSETANEPPQDEGNSFNSPRNLAMEATYINHNFSQQCLRMGKERYNFPNPNPFVEDDMDKNEIASVAYRYRRWKLGDDIDLIVRCEHDGVMTGANGEVSFINIKTLNEWDSRHCNGVDWRQKLDSQRGAVIATELKNNSYKLARWTCCALLAGSEYLKLGYVSRYHVKDSSRHVILGTQQFKPNEFASQINLSVENAWGILRCVIDICMKLEEGKYLILKDPNKQVIRVYSLPDGTFSSDEDEEEEEEEEEEEEEEET

SEQ ID NO: 840843 - protein, 207 aa, Homo sapiens; identical to SEQ ID NO: 840825

SEQ ID NO: 840844 - protein, 256 aa, Homo sapiens
LLSNINILVRFELFNLCTQIDWRATYINHNFSQQCLRMGKERYNFPNPNPFVEDDMDKNEIASVAYRYRRWKLGDDIDLIVRCEHDGVMTGANGEVSFINIKTLNEWDSRHCNGVDWRQKLDSQRGAVIATELKNNSYKLARWTCCALLAGSEYLKLGYVSRYHVKDSSRHVILGTQQFKPNEFASQINLSVENAWGILRCVIDICMKLEEGKYLILKDPNKQVIRVYSLPDGTFSSDEDEEEEEEEEEEEEEEET

SEQ ID NO: 840845 - protein, 205 aa, Homo sapiens
ISLPPPCWGQRESDTEVITVEKSSPIDLIVRCEHDGVMTGANGEVSFINIKTLNEWDSRHCNGVDWRQKLDSQRGAVIATELKNNSYKLARWTCCALLAGSEYLKLGYVSRYHVKDSSRHVILGTQQFKPNEFASQINLSVENAWGILRCVIDICMKLEEGKYLILKDPNKQVIRVYSLPDGTFSSDEDEEEEEEEEEEEEEEET

SEQ ID NO: 840846 - protein, 155 aa, Homo sapiens
VSLTELLLQHCNGVDWRQKLDSQRGAVIATELKNNSYKLARWTCCALLAGSEYLKLGYVSRYHVKDSSRHVILGTQQFKPNEFASQINLSVENAWGILRCVIDICMKLEEGKYLILKDPNKQVIRVYSLPDGTFSSDEDEEEEEEEEEEEEEEET

SEQ ID NO: 840847 - protein, 158 aa, Homo sapiens
PSSFTSEWYYTQEITGITWRQKLDSQRGAVIATELKNNSYKLARWTCCALLAGSEYLKLGYVSRYHVKDSSRHVILGTQQFKPNEFASQINLSVENAWGILRCVIDICMKLEEGKYLILKDPNKQVIRVYSLPDGTFSSDEDEEEEEEEEEEEEEEET

SEQ ID NO: 840848 - protein, 207 aa, Homo sapiens; identical to SEQ ID NO: 840825

SEQ ID NO: 840849 - protein, 86 aa, Homo sapiens
TPVNAITVPGIPLIECLDVDEGHFPVGSSHDAIVLTTDNKVNKYLILKDPNKQVIRVYSLPDGTFSSDEDEEEEEEEEEEEEEEET

SEQ ID NO: 840850 - protein, 118 aa, Homo sapiens
VSLTELLLQHCNGVDWRQKLDSQRGAVIATELKNNSYKLARWTCCALLAGSEYLKLGYVSRYHVKDSSRHVILGTQQFKPNEFASQYNLPGEYNLPVEYPCRWSTTCRWSTPAVEYTS

SEQ ID NO: 840851 - protein, 293 aa, Homo sapiens [sequence omitted]

SEQ ID NO: 840852 - protein, 293 aa, Homo sapiens [sequence omitted]

SEQ ID NO: 840853 - protein, 292 aa, Homo sapiens
MSCTRSVYSWDIVVQRVGSKLFFDKRDNSDFDLLTVSETANEPPQDEGNSFNSPRNLAMEATYINHNFSQQCLRMGKERYNFPNPNPFVEDDMDKNEIASVAYRYRRWKLGDDIDLIVRCEHDGVMTGANGEVSFINIKTLNEWDSRHCNGVDWRQKLDSQRGAVIATELKNNSYKLARWTCCALLAGSEYLKLGYVSRYHVKDSSRHVILGTQQFKPNEFASQINLSVENAWGILRCVIDICMKLEEGKYLILKDPNKQVIRVYSLPDGTFSSDEDEEEEEEEEEEEEAGD

SEQ ID NO: 840854 - protein, 215 aa, Homo sapiens
MSCTRSVYSWDIVVQRVGSKLFFDKRDNSDFDLLTVSETANEPPQDEGNSFNSPRNLAMEATYINHNFSQQCLRMGKERYNFPNPNPFVEDDMDKNEIASVAYRYRRWKLGDDIDLIVRCEHDGVMTGANGEVSFINIKTLNEWDSRHCNGVDWRQKLDSQRGAVIATELKNNSYKLARWTCCALLAGSEYLKLGYVSRYHVKDSSPRTSTHIHL

SEQ ID NO: 840855 - protein, 293 aa, Homo sapiens [sequence omitted]

SEQ ID NO: 840856 - protein, 207 aa, Homo sapiens; identical to SEQ ID NO: 840825

SEQ ID NO: 840857 - protein, 293 aa, Homo sapiens [sequence omitted]

SEQ ID NO: 840858 - protein, 293 aa, Homo sapiens [sequence omitted]

SEQ ID NO: 840859 - protein, 207 aa, Homo sapiens; identical to SEQ ID NO: 840825

SEQ ID NO: 840860 - protein, 208 aa, Homo sapiens
RTRGSTHASGMKSPLLRTVYRRWKLGDDIDLIVRCEHDGVMTGANGEVSFINIKTLNEWDSRHCNGVDWRQKLDSQRGAVIATELKNNSYKLARWTCCALLAGSEYLKLGYVSRYHVKDSSRHVILGTQQFKPNEFASQINLSVENAWGILRCVIDICMKLEEGKYLILKDPNKQVIRVYSLPDGTFSSDEDEEEEEEEEEEEEEEET

SEQ ID NO: 840861 - protein, 299 aa, Homo sapiens
GTQQLKPNEFASQINLSVENAWGILRCVIDICMKLEEGKYLILKDPNKQVIRVYSLPDGTFSSDEDEEEEEEEEEEEEEEELKPVMWSWSLSFHRDSSAKLILGTQQFKPNEFASQINLSVEMPGDYHDGVMTGANGEVSFINIKTLNEWDSRHCNGVDWRQKLDSQRGAVIATELKNNSYKLARWTCCALLAGSEYLKLGYVSRYHVKDSSRHVILGTQQFKPNEFASQINLSVENAWGILRCVIDICMKLEEGKYLILKDPNKQVIRVYSLPDGTFSSDEDEEEEEEEEEEEEEEET

SEQ ID NO: 840862 - protein, 236 aa, Homo sapiens
MAKFMTPVIQDNPSGWGPCAVPEQFRDMPYQPFSKGDRLGKTAAALDRDPTLPQNNAGYTHISYLLISSLAGWKPHTSLPYTSPTGTRTALHTRYALSRRPAPGTTTPPPTTTHTHRAPTPRRATPPHTCSTSGPQQRTPLRQDAPHTQLRLRDNTCYDKHLTPMASTSLPPTTQPDTNTHAHTHDARTPPTLQHRGPRNTPHASPTQTQHLSAGASTSTHTTAGTPRTHPTQEQT

SEQ ID NO: 840863 - protein, 58 aa, Homo sapiens
MGTARSPHPTCELLVAGLSPGPIRVWGVSVRCHRVCTGLASSRTLQASCGTGAERDQP

SEQ ID NO: 840864 - protein, 124 aa, Homo sapiens [sequence omitted]

SEQ ID NO: 840865 - protein, 115 aa, Homo sapiens
  misc_feature (3)..(3): Xaa can be any naturally occurring amino acid
NHXEGETKWMANWPPLKSCCSLCLASLLSFTMAMAVWHREDPLQQPPHRESEREKLFLFLLIYLFIETGFHHVGQAGLELLTSSDPPTSVSQSARITGHEPLRPASIVSFQNSSK

SEQ ID NO: 840866 - protein, 102 aa, Homo sapiens
MKDCSNSRGLGGQFEGLHVNIKVDAINSLDWELASLFILEPVAGLRKKTKKKKKKKRNEPKNPNKLSELIQKTGGRITWAQEFETSLGNKVRSYLYKKYKIL

SEQ ID NO: 840867 - protein, 103 aa, Homo sapiens
EGTAFMSCCPSPLCHVRMLLQEDAFTGTDPQRSCQCFDLGLARLQNCEKKKILLFINYPVCVILLLQYKPGRPTYLCLGGPQKNVAFTAVFAEPAHIHGFIEV

SEQ ID NO: 840868 - protein, 140 aa, Homo sapiens
MIELGFGRQNFHPLKRKSSLLLKLIAVVFAVLLFCEFLIYYLAIFQCNWPEVKTTASDGEQTTREPVLKAMFLADTHLLGEFLGHWLDKLRREWQMERAFQTALWLLQPEVVFILGDIFDEGNWSTPEVGLCVPGALILL

SEQ ID NO: 840869 - protein, 769 aa, Homo sapiens
YACVHAAGRAGLRGEGAAAAEAASLFPWSGQCVAARVTTGEVGIMVMKASVDDDDSGWELSMPEKMEKSNTNWVDITQDFEEACRELKLGELLHDKLFGLFEAMSAIEMMDPKMDAGMIGNQVNRKVLNFEQAIKDGTIKIKDLTLPELIGIMDTCFCCLITWLEGHSLAQTVFTCLYIHNPDFIEDPAMKAFALGILKICDIAREKVNKAAVFEEEDFQSMTYGFKMANSVTDLRVTGMLKDVEDDMQRRVKSTRSRQGEERDPEVELEHQRCLAVFSRVKFTRVLLTVLIAFTKKETSAVAEAQKLMVQAADLLSAIHNSLHHGIQAQNDTTKGDHPIMMGFEPLVNQRLLPPTFPRYAKIIKREEMVNYFARLIDRIKTVCEVVNLTNLHCILDFFCEFSEQSPCVLSRSLLQTTFLVDNKKVFGTHLMQDMVKDALRSFVSPPVLSPKCYLYNNHQAKDCIDSFVTHCVRPFCSLIQIHGHNRARQRDKLGHILEEFATLQDEAEKVDAALHTMLLKQEPQRQHLAWLGTWVLYHNLRIMIQYLLSGFELELYSMHEYYYIYWYLSEFLYAWLMSTLSRADGSQMAEERIMEEQQKGRSSKKTKKKKKVRPLSREITMSQAYQNMCAGMFKTMVAFDMDGKVRKPKFELDSEQVRYEHRFAPFNSVMTPPPVHYLQFKEMSDLNKYSPPPQSPELYVAASKHFQQAKMILENIPNPDHEVNRILKVAKPNFVVMKLLAGGHKKESKVPPEFDFSAHKYFPVVKLV

SEQ ID NO: 840870 - protein, 241 aa, Homo sapiens
YACVHAAGRAGLRGEGAAAAEAASLFPWSGQCVAARVTTGEVGIMVMKASVDDDDSGWELSMPEKMEKSNTNWVDITQDFEEACRELKLGELLHDKLFGLFEAMSAIEMMDPKMDAGMIGNQVNRKVLNFEQAIKDGTIKIKDLTLPELIGIMDTCFCCLITWLEGHSLAQTVFTCLYIHNPDFIEDPAMKAFALGILKICDIAREKVNKAAVFEEISRLLELIDFHEYNFKNENVQCWKE

SEQ ID NO: 840871 - protein, 769 aa, Homo sapiens; identical to SEQ ID NO: 840869

SEQ ID NO: 840872 - protein, 618 aa, Homo sapiens
YACVHAAGRAGLRGEGAAAAEAASLFPWSGQCVAARVTTGEVGIMVMKASVDDDDSGWELSMPEKMEKSNTNWVDITQDFEEACRELKLGELLHDKLFGLFEAMSAIEMMDPKMDAGMIGNQVNRKVLNFEQAIKDGTIKIKDLTLPELIGIMDTCFCCLITWLEGHSLAQTVFTCLYIHNPDFIEDPAMKAFALGILKICDIAREKVNKAAVFEEEDFQSMTYGFKMANSVTDLRVTGMLKDVEDDMQRRVKSTRSRQGEERDPEVELEHQRCLAVFSRVKFTRVLLTVLIAFTKKETSAVAEAQKLMVQAADLLSAIHNSLHHGIQAQNDTTKGDHPIMMGFEPLVNQRLLPPTFPRYAKIIKREEMVNYFARLIDRIKTVCEVVNLTNLHCILDFFCEFSEQSPCVLSRSLLQTTFLVDNKKVFGTHLMQDMVKDALRSFVSPPVLSPKCYLYNNHQAKDCIDSFVTHCVRPFCSLIQIHGHNRARQRDKLGHILEEFATLQDEAEKVDAALHTMLLKQEPQRQHLAWLGTWVLYHNLRIMIQYLLSGFELELYSMHEYYYIYWYLSEFLYAWLMSTLSRADGSQMAEERIMEEQQKGRSSKKTKKKKKGAVDYF

SEQ ID NO: 840873 - protein, 259 aa, Homo sapiens
PKGKKAKGKKVAPAPAVVKKQEAKKVVNPLFEKRPKNFGIGQDIQPKRDLTRFVKWPRYIRLQRQRAILYKRLKVPPAINQFTQALDRQTATQLLKLAHKYRPETKQEKKQRLLARAEKKAAGKGDVPTKRPPVLRAGVNTVTTLVENKKAQLVVIAHDVDPIELVVFLPALCRKMGVPYCIIKGKARLGRLVHRKTCTTVAFTQVNSEDKGALAKLVEAIRTNYNDRYDEIRRHWGGMSWVLSLWSYRQARKGKVRIA

SEQ ID NO: 840874 - protein, 242 aa, Homo sapiens
PKGKKAKGKKVAPAPAVVKKQEAKKVVNPLFEKRPKNFGIGQDIQPKRDLTRFVKWPRYIRLQRQRAILYKRLKVPPAINQFTQALDRQTATQLLKLAHKYRPETKQEKKQRLLARAEKKAAGKGDVPTKRPPVLRAGVNTVTTLVENKKAQLVVIAHDVDPIELVVFLPALCRKMGVPYCIIKGKARLGRLVHRKTCTTVAFTQVNSEDKGALAKLVEAIRTNYNDRYDENPRHWGGRSWV

SEQ ID NO: 840875 - protein, 182 aa, Homo sapiens
  misc_feature (167)..(168): Xaa can be any naturally occurring amino acid
  misc_feature (171)..(171): Xaa can be any naturally occurring amino acid
  misc_feature (181)..(181): Xaa can be any naturally occurring amino acid
PKGKKAKGKKVAPAPAVVKKQEAKKVVNPLFEKRPKNFGIGQDIQPKRDLTRFVKWPRYIRLQRQRAILYKRLKVPPAINQFTQALDRQTATQLLKLAHKYRPETKQEKKQRLLARAEKKAAGKGDVPTKRPPVLRAGVNTVTTLVENKKAQLVVIAHDVDPIELGXXFSXPCCRKNGGPXT

SEQ ID NO: 840876 - protein, 79 aa, Homo sapiens
PKGKKAKGKKVAPAPAVVKKQEAKKVVNPLFEKRPKNFGIGQDIQPKRDLTRFVKWPRYIRLQRQRAILYKRLKVPPAI

SEQ ID NO: 840877 - protein, 216 aa, Homo sapiens
PKGKKAKGKKVAPAPAVVKKQEAKKVVNPLFEKRPKNFGIGQDIQPKRDLTRFVKWPRYIRLQRQRAILYKRLKVPPAINQFTQALDRQTATQLLKLAHKYRPETKQEKKQRLLARAEKKAAGKGDVPTKRPPVLRAGVNTVTTLVENKKAQLVVIAHDVDPIELVVFLPALCRKMGVPYCIIKGKARLGRLVHRKTCTTVAFTQVNSARPKALWA

SEQ ID NO: 840878 - protein, 106 aa, Homo sapiens
PKGKKAKGKKVAPAPAVVKKQEAKKVVNPLFEKRPKNFGIGQDIQPKRDLTRFVKWPRYIRLQQDVGSSQCGVDAVSAALDAVSAALIVSAALDAVSARDQSALRP

SEQ ID NO: 840879 - protein, 112 aa, Homo sapiens
FFLLLTRLKLTLKKTTGGTRGVGRYQEMLPSGIDVHEESWRIRRHEVEMKENVSHKGNICKHQLNSMPTVLGQKNCQGRNYALPAPSSLRIHYIKEEIILKMWKPKQTPILD

SEQ ID NO: 840880 - protein, 116 aa, Homo sapiens
  misc_feature (14)..(14): Xaa can be any naturally occurring amino acid
  misc_feature (20)..(20): Xaa can be any naturally occurring amino acid
QYFMRYTLLYKAGXGLVGNXSGTRGVGRYQEMLPSGIDVHEESWRIRRHEVEMKENVSHKGNICKHQLNSMPTVLGQKNCQGRNYALPAPSSLRIHYIKEEIILKMWKPKQTPILD

SEQ ID NO: 840881 - protein, 355 aa, Homo sapiens
SLRCWGARARMAAENEASQESALGAYSPVDYMSITSFPRLPEDEPAPAAPLRGRKDEDAFLGDPDTDPDSFLKSARLQRLPSSSSEMGSQDGSPLRETRKDPFSAAAAECSCRQDGLTVIVTACLTFATGVTVALVMQIYFGDPQIFQQGAVVTDAARCTSLGIEVLSKQGSSVDAAVAAALCLGIVAPHSSGLGGGGVMLVHDIRRNESHLIDFRESAPGALREETLQRSWETKPGLLVGVPGMVKGLHEAHQLYGRLPWSQVLAFAAAVAQDGFNVTHDLARALAEQLHPTCPSASGRRSCHRAARHYLARCCIGPTWLRCWMYLAPPARLPSTQVATSHWRWWPRLSTQGVS

SEQ ID NO: 840882 - protein, 355 aa, Homo sapiens; identical to SEQ ID NO: 840881

SEQ ID NO: 840883 - protein, 619 aa, Homo sapiens
SLRCWGARARMAAENEASQESALGAYSPVDYMSITSFPRLPEDEPAPAAPLRGRKDEDAFLGDPDTDPDSFLKSARLQRLPSSSSEMGSQDGSPLRETRKDPFSAAAAECSCRQDGLTVIVTACLTFATGVTVALVMQIYFGDPQIFQQGAVVTDAARCTSLGIEVLSKQGSSVDAAVAAALCLGIVAPHSSGLGGGGVMLVHDIRRNESHLIDFRESAPGALREETLQRSWETKPGLLVGVPGMVKGLHEAHQLYGRLPWSQVLAFAAAVAQDGFNVTHDLARALAEQLHPTCPSASGRRSCHRAARHYLARCCIVPDLAEVLDVLGTSGPAAFYAGGNLTLEMVAEAQHAGGVITEEDFSNYSALVEKPVCGVYRGHLVLSPPPPHTGPALISALNILEGFNLTSLVSREQALHWVAETLKIALALASRLGDPVYDSTITESMDDMLSKVEAAYLRGHINDSQAAPAPLLPVYELDGAPTAAQVLIMGPDDFIVAMVSSLNQPFGSGLITPSGILLNSQMLDFSWPNRTANHSAPSLENSVQPGKRPLSFLLPTVVRPAEGLCGTYLALGANGAARGLSGLTQHLNRQPALFRVGFERKGLLFSRTPQNGSMNVLRT

SEQ ID NO: 840884 - protein, 386 aa, Homo sapiens
SLRCWGARARMAAENEASQESALGAYSPVDYMSITSFPRLPEDEPAPAAPLRGRKDEDAFLGDPDTDPDSFLKSARLQRLPSSSSEMGSQDGSPLRETRKDPFSAAAAECSCRQDGLTVIVTACLTFATGVTVALVMQIYFGDPQIFQQGAVVTDAARCTSLGIEVLSKQGSSVDAAVAAALCLGIVAPHSSGLGGGGVMLVHDIRRNESHLIDFRESAPGALREETLQRSWETKPSLAWGSAEFSPAPPFQVTWSPLSLAYPPAQPGLLVGVPGMVKGLHEAHQLYGRLPWSQVLAFAAAVAQDGFNVTHDLARALAEQLHPTCPSASGRRSCHRAARHYLARCCIGPTWLRCWMYLAPPARLPSTQVATSHWRWWPRLSTQGVS

SEQ ID NO: 840885 - protein, 355 aa, Homo sapiens; identical to SEQ ID NO: 840881

SEQ ID NO: 840886 - protein, 355 aa, Homo sapiens; identical to SEQ ID NO: 840881

SEQ ID NO: 840887 - protein, 239 aa, Homo sapiens
  misc_feature (2)..(2): Xaa can be any naturally occurring amino acid
SXNRSYENRCPLLARDPLCSKGFNLTSLVSREQALHWVAETLKIALALASRLGDPVYDSTITESMDDMLSKVEAAYLRGHINDSQAAPAPLLPVYELDGAPTAAQVLIMGPDDFIVAMVSSLNQPFGSGLITPSGILLNSQMLDFSWPNRTANHSAPSLENSVQPGKRPLSFLLPTVVRPAEGLCGTYLALGANGAARGLSGLTQHLNRQPALFRVGFERKGLLFSRTPQNGSMNVLRT

SEQ ID NO: 840888 - protein, 355 aa, Homo sapiens; identical to SEQ ID NO: 840881

SEQ ID NO: 840889 - protein, 261 aa, Homo sapiens
SLRCWGARARMAAENEASQESALGAYSPVDYMSITSFPRLPEDEPAPAAPLRGRKDEDAFLGDPDTDPDSFLKSARLQRLPSSSSEMGSQDGSPLRETRKDPFSAAAAECSCRQDGLTVIVTACLTFATGVTVALVMQIYFGDPQIFQQGAVVTDAARCTSLGIEVLSKQGSSVDAAVAAALCLGIVAPHSSGLGGGGVMLVHDIRRNESHLIDFRESAPGALREETLQRSWETKVGTLVRRESSGESLFIALLLTQALIC

SEQ ID NO: 840890 - protein, 355 aa, Homo sapiens; identical to SEQ ID NO: 840881

SEQ ID NO: 840891 - protein, 355 aa, Homo sapiens; identical to SEQ ID NO: 840881

SEQ ID NO: 840892 - protein, 355 aa, Homo sapiens; identical to SEQ ID NO: 840881

SEQ ID NO: 840893 - protein, 355 aa, Homo sapiens; identical to SEQ ID NO: 840881

SEQ ID NO: 840894 - protein, 355 aa, Homo sapiens; identical to SEQ ID NO: 840881

SEQ ID NO: 840895 - protein, 355 aa, Homo sapiens; identical to SEQ ID NO: 840881

SEQ ID NO: 840896 - protein, 449 aa, Homo sapiens
SLRCWGARARMAAENEASQESALGAYSPVDYMSITSFPRLPEDEPAPAAPLRGRKDEDAFLGDPDTDPDSFLKSARLQRLPSSSSEMGSQDGSPLRETRKDPFSAAAAECSCRQDGLTVIVTACLTFATGVTVALVMQIYFGDPQIFQQGAVVTDAARCTSLGIEVLSKQGSSVDAAVAAALCLGIVAPHSSGLGGGGVMLVHDIRRNESHLIDFRESAPGALREETLQRSWETKGPGLLSPSPTRLAQPGLLVGVPGMVKGLHEAHQLYGRLPWSQVLAFAAAVAQDGFNVTHDLARALAEQLHPTCPSASGRRSCHRAARHYLARVLHRPDLAEVLDVLGTSGPAAFYAGGNLTLEMVAEAQHAGGVITEEDFSNYSALVEKPVCGVYRGDLSPGSQGPPSGEASQSMATSFWPRDSSPFHRRETKAVSYLGSQLLKQTRVSPPSEK

SEQ ID NO: 840897 - protein, 172 aa, Homo sapiens
MLSSHFPFCVSPSGGVMLVHDIRRNESHLIDFRESAPGALREETLQRSWETKPGLLVGVPGMVKGLHEAHQLYGRLPWSQVLAFAAAVAQDGFNVTHDLARALAEQLHPTCPSASGRRSCHRAARHYLARCCIGPTWLRCWMYLAPPARLPSTQVATSHWRWWPRLSTQGVS

SEQ ID NO: 840898 - protein, 175 aa, Homo sapiens
MDDMLSKVEAAYLRGHINDSQAAPAPLLPVYELDGAPTAAQVLIMGPDDFIVAMVSSLNQPFGSGLITPSGILLNSQMLDFSWPNRTANHSAPSLENSVQPGKRPLSFLLPTVVRPAEGLCGTYLALGANGAARGLSGLTQHLNRQPALFRVGFERKGLLFSRTPQNGSMNVLRT

SEQ ID NO: 840899 - protein, 271 aa, Homo sapiens
MPLMAPDLGHPWGPPETKPGRRRDSGNMQSGGLRTRWPPHTGPALISALNILEGFNLTSLVSREQALHWVAETLKIALALASRLGDPVYDSTITESMDDMLSKVEAAYLRGHINDSQAAPAPLLPVYELDGAPTAAQVLIMGPDDFIVAMVSSLNQPFGSGLITPSGILLNSQMLDFSWPNRTANHSAPSLENSVQPGKRPLSFLLPTVVRPAEGLCGTYLALGANGAARGLSGLTQHLNRQPALFRVGFERKGLLFSRTPQNGSMNVLRT

SEQ ID NO: 840900 - protein, 127 aa, Homo sapiens
RCPYIRAEGILSKPNPRVTGTYLALGANGAARGLSGLTQQVLLNVLTLNRNLSDSLARGRLHPDLQSNLLQVDSEFTEEEIEFLEARGHHVEKVDVLSWVHGSRRTNNFIIAVKDPRSPDAAGATIL

SEQ ID NO: 840901 - protein, 189 aa, Homo sapiens
MLSTDSKISQRELATDASKVAPRPGTVAHACNLSTLGGRGVGAGRREVEWAARRRKQAFRRLLIPRRSSLTPGDLNLKSEAPRVLSNPGVEVGWGIPALSDLGDQKDAHLGEWDLPFQSAHPRGPHLEGRTWRTAPPRRARLTPGAQAMWGVRAGRSVPAPHPASMRTREADVAASRDLTIALQPGQQE

SEQ ID NO: 840902 - protein, 238 aa, Homo sapiens
HWIWGHVGGPVKGAPQASLPGAPWLGGQGRTQAGTTRATLRAIVRDRDGAVAIVVTELWYAPATLHSSPGCSHLWQRVGKHMILPSKTVLVRERHQQESQRFLLLSIITITIILITITVTVIIIITIMDFKEVQRISSSGQSESCSVEAGGWVGSPVEAPPVFGFWAGIWGQGRPNAYCRNSLPGKSGSLLGGGSLSSELSGKELVVWFPVSSGDGAGSRGEHSSVDVLILSAGRVRW

SEQ ID NO: 840903 - protein, 111 aa, Homo sapiens
MDFKEVQRISSSGQSESCSVEAGGWVGSPVEAPPVFGFWAGIWGQGRPNAYCRNSLPGKSGSLLGGGSLSSELSGKELVVWFPVSSGDGAGSRGEHSSVDVLILSAGRVRW

SEQ ID NO: 840904 - protein, 1790 aa, Homo sapiens
PVAAVGSRAQTGAILPEAASRSWGRPGGRLKLFFCLFCSLGLGEDLEVWAPSSPLETAMVSSNHHHLTTLHGGAPSALLLLPPFPVLSTYRLQSRSRPSAPETDDSRVGGIMRGEKNYYFRGAAGDHGSCPTTTSPLASALLMPSEAVSSSWSESGGGLSGGDEEDTRLLQLLRTARDPSEAFQALQAALPRRGGRLGFPRRKEALYRALGRVLVEGGSDEKRLCLQLLSDVLRGQGEAGQLEEAFSLALLPQLVVSLREENPALRKDALQILHICLKRSPGEVLRTLIQQGLESTDARLRASTALLLPILLTTEDLLLGLDLTEVIISLARKLGDQETEEESETAFSALQQIGERLGQDRFQSYISRLPSALRRHYNRRLESQFGSQVPYYLELEASGFPEDPLPCAVTLSNSNLKFGIIPQELHSRLLDQEDYKNRTQAVEELKQVLGKFNPSSTPHSSLVGFISLLYNLLDDSNFKVVHGTLEVLHLLVIRLGEQVQQFLGPVIAASVKVLADNKLVIKQEYMKIFLKLMKEVGPQQVLCLLLEHLKHKHSRVREEVVNICICSLLTYPSEDFDLPKLSFDLAPALVDSKRRVRQAALEAFAVLASSMGSGKTSILFKAVDTVELQDNGDGVMNAVQARLARKTLPRLTEQGFVEYAVLMPSSAGGRSNHLAHGADTDWLLAGNRTQSAHCHCGDHVRDSMHIYGSYSPTICTRRVLSAGKGKNKLPWENEQPGIMGENQTSTSKDIEQFSTYDFIPSAKLKLSQGMPVNDDLCFSRKRVSRNLFQNSRDFNPDCLPLCAAGTTGTHQTNLSGKCAQLGFSQICGKTGSVGSDLQFLGTTSSHQEKVYASLNFGSKTQQTFGSQTECTSSNGQNPSPGAYILPSYPVSSPRTSPKHTSPLIISPKKSQDNSVNFSNSWPLKSFEGLSKPSPQKKLVSQKSSDPTGRNHGENSQEKPPVQLTPALVRSPSSRRGLNGTKPVPPIPRGISLLPDKADLSTVGHKKKEPDDIWKCEKDSLPIDLSELNFKDKDLDQEEMHSSLRSLRNSAAKKRAKLSGSTSDLESPDSAMKLDLTMDSPSLSSSPNINSYSESGVYSQESLTSSLSTTPQGKRIMSDIFPTFGSKPCPTRLSSAKKKISHIAEQSPSAGSSSNPQQISSFDFTTTKALSEDSVVVVGKGVFGSLSSAPATCSQSVISSVENGDTFSIKQSIEPPSGIYGRSVQQNISSYLDVENEKDAKVSISKSTYNKMRQKRKEEKELFHNKDCEKKEKNSWERMRHTGTEKMASESETPTGAISQYKERMPSVTHSPEIMDLSELRPFSKPEIALTEALRLLADEDWEKKIEGLNFIRCLAAFHSEILNTKLHETNFAVVQEVKNLRSGVSRAAVVCLSDLFTYLKKSMDQELDTTVKVLLHKAGESNTFIREDVDKALRAMVNNVTPARAVVSLINGGQRYYGRKMLFFMMCHPNFEKMLEKYVPSKDLPYIKDSVRNLQQKGLGEIPLDTPSAKGRRSHTGSVGNTRSSSVSRDAFNSAERAVTEVREVTRKSVPRNSLESAEYLKLITGLLNAKDFRDRINGIKQLLSDTENNQDLVVGNIVKIFDAFKSRLHDSNSKVNLVALETMHKMIPLLRDHLSPIINMLIPAIVDNNLNSKNPGIYAAATNVVQALSQHVDNYLLLQPFCTKAQFLNGKAKQDMTEKLADIVTELYQRKPHATEQKVLVVLWHLLGNMTNSGSLPGAGGNIRTATAKLSKALFAQMGQNLLNQAASQPPHIKKSLEELLDMTILNEL

SEQ ID NO: 840905 - protein, 1021 aa, Homo sapiens
MPVNDDLCFSRKRVSRNLFQNSRDFNPDCLPLCAAGTTGTHQTNLSGKCAQLGFSQICGKTGSVGSDLQFLGTTSSHQEKVYASLNFGSKTQQTFGSQTECTSSNGQNPSPGAYILPSYPVSSPRTSPKHTSPLIISPKKSQDNSVNFSNSWPLKSFEGLSKPSPQKKLVSQKSSDPTGRNHGENSQEKPPVQLTPALVRSPSSRRGLNGTKPVPPIPRGISLLPDKADLSTVGHKKKEPDDIWKCEKDSLPIDLSELNFKDKDLDQEEMHSSLRSLRNSAAKKRAKLSGSTSDLESPDSAMKLDLTMDSPSLSSSPNINSYSESGVYSQESLTSSLSTTPQGKRIMSDIFPTFGSKPCPTRLSSAKKKISHIAEQSPSAGSSSNPQQISSFDFTTTKALSEDSVVVVGKGVFGSLSSAPATCSQSVISSVENGDTFSIKQSIEPPSGIYGRSVQQNISSYLDVENEKDAKVSISKSTYNKMRQKRKEEKELFHNKDCEKKEKNSWERMRHTGTEKMASESETPTGAISQYKERMPSVTHSPEIMDLSELRPFSKPEIALTEALRLLADEDWEKKIEGLNFIRCLAAFHSEILNTKLHETNFAVVQEVKNLRSGVSRAAVVCLSDLFTYLKKSMDQELDTTVKVLLHKAGESNTFIREDVDKALRAMVNNVTPARAVVSLINGGQRYYGRKMLFFMMCHPNFEKMLEKYVPSKDLPYIKDSVRNLQQKGLGEIPLDTPSAKGRRSHTGSVGNTRSSSVSRDAFNSAERAVTEVREVTRKSVPRNSLESAEYLKLITGLLNAKDFRDRINGIKQLLSDTENNQDLVVGNIVKIFDAFKSRLHDSNSKVNLVALETMHKMIPLLRDHLSPIINMLIPAIVDNNLNSKNPGIYAAATNVVQALSQHVDNYLLLQPFCTKAQFLNGKAKQDMTEKLADIVTELYQRKPHATEQKVLVVLWHLLGNMTNSGSLPGAGGNIRTATAKLSKALFAQMGQNLLNQAASQPPHIKKSLEELLDMTILNEL

SEQ ID NO: 840906 - protein, 1688 aa, Homo sapiens
PVAAVGSRAQTGAILPEAASRSWGRPGGRLKLFFCLFCSLGLGEDLEVWAPSSPLETAMVSSNHHHLTTLHGGAPSALLLLPPFPVLSTYRLQSRSRPSAPETDDSRVGGIMRGEKNYYFRGAAGDHGSCPTTTSPLASALLMPSEAVSSSWSESGGGLSGGDEEDTRLLQLLRTARDPSEAFQALQAALPRRGGRLGFPRRKEALYRALGRVLVEGGSDEKRLCLQLLSDVLRGQGEAGQLEEAFSLALLPQLVVSLREENPALRKDALQILHICLKRSPGEVLRTLIQQGLESTDARLRASTALLLPILLTTEDLLLGLDLTEVIISLARKLGDQETEEESETAFSALQQIGERLGQDRFQSYISRLPSALRRHYNRRLESQFGSQVPYYLELEASGFPEDPLPCAVTLSNSNLKFGIIPQELHSRLLDQEDYKNRTQAVEELKQVLGKFNPSSTPHSSLVGFISLLYNLLDDSNFKVVHGTLEVLHLLVIRLGEQVQQFLGPVIAASVKVLADNKLVIKQEYMKIFLKLMKEVGPQQVLCLLLEHLKHKHSRVREEVVNICICSLLTYPSEDFDLPKLSFDLAPALVDSKRRVRQAALEAFAVLASSMGSGKTSILFKAVDTVELQDNGDGVMNAVQARLARKTLPRLTEQGFVEYAVLMPSSAGGRSNHLAHGADTDWLLAGNRTQSAHCHCGDHVRDSMHIYGSYSPTICTRRVLSAGKGKNKLPWENEQPGIMGENQTSTSKDIEQFSTYDFIPSAKLKLSQGMPVNDDLCFSRKRVSRNLFQNSRDFNPDCLPLCAAGTTGTHQTNLSGKCAQLGFSQICGKTGSVGSDLQFLGTTSSHQEKGENSQEKPPVQLTPALVRSPSSRRGLNGTKPVPPIPRGISLLPDKADLSTVGHKKKEPDDIWKCEKDSLPIDLSELNFKDKDLDQEEMHSSLRSLRNSAAKKRAKLSGSTSDLESPDSAMKLDLTMDSPSLSSSPNINSYSESGVYSQESLTSSLSTTPQGKRIMSDIFPTFGSKPCPTRLSSAKKKISHIAEQSPSAGSSSNPQQISSFDFTTTKALSEDSVVVVGKGVFGSLSSAPATCSQSVISSVENGDTFSIKQSIEPPSGIYGRSVQQNISSYLDVENEKDAKVSISKSTYNKMRQKRKEEKELFHNKDCEKKEKNSWERMRHTGTEKMASESETPTGAISQYKERMPSVTHSPEIMDLSELRPFSKPEIALTEALRLLADEDWEKKIEGLNFIRCLAAFHSEILNTKLHETNFAVVQEVKNLRSGVSRAAVVCLSDLFTYLKKSMDQELDTTVKVLLHKAGESNTFIREDVDKALRAMVNNVTPARAVVSLINGGQRYYGRKMLFFMMCHPNFEKMLEKYVPSKDLPYIKDSVRNLQQKGLGEIPLDTPSAKGRRSHTGSVGNTRSSSVSRDAFNSAERAVTEVREVTRKSVPRNSLESAEYLKLITGLLNAKDFRDRINGIKQLLSDTENNQDLVVGNIVKIFDAFKSRLHDSNSKVNLVALETMHKMIPLLRDHLSPIINMLIPAIVDNNLNSKNPGIYAAATNVVQALSQHVDNYLLLQPFCTKAQFLNGKAKQDMTEKLADIVTELYQRKPHATEQKVLVVLWHLLGNMTNSGSLPGAGGNIRTATAKLSKALFAQMGQNLLNQAASQPPHIKKSLEELLDMTILNEL

SEQ ID NO: 840907 - protein, 1712 aa, Homo sapiens
PVAAVGSRAQTGAILPEAASRSWGRPGGRLKLFFCLFCSLGLGEDLEVWAPSSPLETAMVSSNHHHLTTLHGGAPSALLLLPPFPVLSTYRLQSRSRPSAPETDDSRVGGIMRGEKNYYFRGAAGDHGSCPTTTSPLASALLMPSEAVSSSWSESGGGLSGGDEEDTRLLQLLRTARDPSEAFQALQAALPRRGGRLGFPRRKEALYRALGRVLVEGGSDEKRLCLQLLSDVLRGQGEAGQLEEAFSLALLPQLVVSLREENPALRKDALQILHICLKRSPGEVLRTLIQQGLESTDARLRASTALLLPILLTTEDLLLGLDLTEVIISLARKLGDQETEEESETAFSALQQIGERLGQDRFQSYISRLPSALRRHYNRRLESQFGSQVPYYLELEASGFPEDPLPCAVTLSNSNLKFGIIPQELHSRLLDQEDYKNRTQAVEELKQVLGKFNPSSTPHSSLVGFISLLYNLLDDSNFKVVHGTLEVLHLLVIRLGEQVQQFLGPVIAASVKVLADNKLVIKQEYMKIFLKLMKEVGPQQVLCLLLEHLKHKHSRVREEVVNICICSLLTYPSEDFDLPKLSFDLAPALVDSKRRVRQAALEAFAVLASSMGSGKTSILFKAVDTVELQDNGDGVMNAVQARLARKTLPRLTEQGFVEYAVLMPSSAGGRSNHLAHGADTDWLLAGNRTQSAHCHCGDHVRDSMHIYGSYSPTICTRRVLSAGKGKNKLPWENEQPGIMGENQTSTSKDIEQFSTYDFIPSAKLKLSQGMPVNDDLCFSRKRVSRNLFQNSRDFNPDCLPLCAAGTTGTHQTNLSGKCAQLGFSQICGKTGSVGSDLQFLGTTSSHQEKVYASLNFGSKTQQTFGSQTECTSSNGQNPSPGAYILPSYPVSSPRTSPKHTSPLIISPKKSQDNSVNFSNSWPLKSFEGLSKPSPQKKLVSQKSSDPTGRNHGENSQEKPPVQLTPALVRSPSSRRGLNGTKPVPPIPRGISLLPDKADLSTVGHKKKEPDDIWKCEKDSLPIDLSELNFKDKDLDQEEVRHISNIWVKTLSNKTFFCKEKNFYIAEQSPSAGSSSNPQQISSFDFTTTKALSEDSVVVVGKGVFGSLSSAPATCSQSVISSVENGDTFSIKQSIEPPSGIYGRSVQQNISSYLDVENEKDAKVSISKSTYNKMRQKRKEEKELFHNKDCEKKEKNSWERMRHTGTEKMASESETPTGAISQYKERMPSVTHSPEIMDLSELRPFSKPEIALTEALRLLADEDWEKKIEGLNFIRCLAAFHSEILNTKLHETNFAVVQEVKNLRSGVSRAAVVCLSDLFTYLKKSMDQELDTTVKVLLHKAGESNTFIREDVDKALRAMVNNVTPARAVVSLINGGQRYYGRKMLFFMMCHPNFEKMLEKYVPSKDLPYIKDSVRNLQQKGLGEIPLDTPSAKGRRSHTGSVGNTRSSSVSRDAFNSAERAVTEVREVTRKSVPRNSLESAEYLKLITGLLNAKDFRDRINGIKQLLSDTENNQDLVVGNIVKIFDAFKSRLHDSNSKVNLVALETMHKMIPLLRDHLSPIINMLIPAIVDNNLNSKNPGIYAAATNVVQALSQHVDNYLLLQPFCTKAQFLNGKAKQDMTEKLADIVTELYQRKPHATEQKVLVVLWHLLGNMTNSGSLPGAGGNIRTATAKLSKALFAQMGQNLLNQAASQPPHIKKSLEELLDMTILNEL

SEQ ID NO: 840908 - protein, 995 aa, Homo sapiens
MFSPFLSSKGTTGTHQTNLSGKCAQLGFSQICGKTGSVGSDLQFLGTTSSHQEKVYASLNFGSKTQQTFGSQTECTSSNGQNPSPGAYILPSYPVSSPRTSPKHTSPLIISPKKSQDNSVNFSNSWPLKSFEGLSKPSPQKKLVSQKSSDPTGRNHGENSQEKPPVQLTPALVRSPSSRRGLNGTKPVPPIPRGISLLPDKADLSTVGHKKKEPDDIWKCEKDSLPIDLSELNFKDKDLDQEEMHSSLRSLRNSAAKKRAKLSGSTSDLESPDSAMKLDLTMDSPSLSSSPNINSYSESGVYSQESLTSSLSTTPQGKRIMSDIFPTFGSKPCPTRLSSAKKKISHIAEQSPSAGSSSNPQQISSFDFTTTKALSEDSVVVVGKGVFGSLSSAPATCSQSVISSVENGDTFSIKQSIEPPSGIYGRSVQQNISSYLDVENEKDAKVSISKSTYNKMRQKRKEEKELFHNKDCEKKEKNSWERMRHTGTEKMASESETPTGAISQYKERMPSVTHSPEIMDLSELRPFSKPEIALTEALRLLADEDWEKKIEGLNFIRCLAAFHSEILNTKLHETNFAVVQEVKNLRSGVSRAAVVCLSDLFTYLKKSMDQELDTTVKVLLHKAGESNTFIREDVDKALRAMVNNVTPARAVVSLINGGQRYYGRKMLFFMMCHPNFEKMLEKYVPSKDLPYIKDSVRNLQQKGLGEIPLDTPSAKGRRSHTGSVGNTRSSSVSRDAFNSAERAVTEVREVTRKSVPRNSLESAEYLKLITGLLNAKDFRDRINGIKQLLSDTENNQDLVVGNIVKIFDAFKSRLHDSNSKVNLVALETMHKMIPLLRDHLSPIINMLIPAIVDNNLNSKNPGIYAAATNVVQALSQHVDNYLLLQPFCTKAQFLNGKAKQDMTEKLADIVTELYQRKPHATEQKVLVVLWHLLGNMTNSGSLPGAGGNIRTATAKLSKALFAQMGQNLLNQAASQPPHIKKSLEELLDMTILNEL

SEQ ID NO: 840909 - protein, 1761 aa, Homo sapiens
PVAAVGSRAQTGAILPEAASRSWGRPGGRLKLFFCLFCSLGLGEDLEVWAPSSPLETAMVSSNHHHLTTLHGGAPSALLLLPPFPVLSTYRLQSRSRPSAPETDDSRVGGIMRGEKNYYFRGAAGDHGSCPTTTSPLASALLMPSEAVSSSWSESGGGLSGGDEEDTRLLQLLRTARDPSEAFQALQAALPRRGGRLGFPRRKEALYRALGRVLVEGGSDEKRLCLQLLSDVLRGQGEAGQLEEAFSLALLPQLVVSLREENPALRKDALQILHICLKRSPGEVLRTLIQQGLESTDARLRASTALLLPILLTTEDLLLGLDLTEVIISLARKLGDQETEEESETAFSALQQIGERLGQDRFQSYISRLPSALRRHYNRRLESQFGSQVPYYLELEASGFPEDPLPCAVTLSNSNLKFGIIPQELHSRLLDQEDYKNRTQAVEELKQVLGKFNPSSTPHSSLVGFISLLYNLLDDSNFKVVHGTLEVLHLLVIRLGEQVQQFLGPVIAASVKVLADNKLVIKQEYMKIFLKLMKEVGPQQVLCLLLEHLKHKHSRVREEVVNICICSLLTYPSEDFDLPKLSFDLAPALVDSKRRVRQAALEAFAVLASSMGSGKTSILFKAVDTVELQDNGDGVMNAVQARLARKTLPRLTEQGFVEYAVLMPSSAGGRSNHLAHGADTDWLLAGNRTQSAHCHCGDHVRDSMHIYGSYSPTICTRRVLSAGKGKNKLPWENEQPGIMGENQTSTSKDIEQFSTYDFIPSAKLKLSQGMPVNDDLCFSRKRVSRNLFQNSRDFNPDCLPLCAAGTTGTHQTNLSGKCAQLGFSQICGKTGSVGSDLQFLGTTSSHQEKVYASLNFGSKTQQTFGSQTECTSSNGQNPSPGAYILPSYPVSSPRTSPKHTSPLIISPKKSQDNSVNFSNSWPLKSFEGLSKPSPQKKLVSQKSSDPTGRNHGENSQEKPPVQLTPALVRSPSSRRGLNGTKPVPPIPRGISLLPDKADLSTVGHKKKEPDDIWKCEKDSLPIDLSELNFKDKDLDQEEMHSSLRSLRNSAAKKRAKLSGSTSDLESPDSAMKLDLTMDSPSLSSSPNINSYSESGVYSQESLTSSLSTTPQGKRIMSDIFPTFGSKPCPTRLSSAKKKISHIAEQSPSAGSSSNPQQISSFDFTTTKALSEDSVVVVGKGVFGSLSSAPATCSQSVISSVENGDTFSIKQSIEPPSGIYGRSVQQNISSYLDVENEKDAKVSISKSTYNKMRQKRKEEKELFHNKDCEKKEKNSWERMRHTGTEKMASESETPTGAISQYKERMPSVTHSPEIMDLSELRPFSKPEIALTEALRLLADEDWEKKIEGLNFIRCLAAFHSEILNTKLHETNFAVVQEVKNLRSGVSRAAVVCLSDLFTYLKKSMDQELDTTVKVLLHKAGESNTFIREDVDKALRAMVNNVTPARAVVSLINGGQRYYGRKMLFFMMCHPNFEKMLEKYVPSKDLPYIKDSVRNLQQKGLGEIPLDTPSAKGRRSHTGSVGNTRSSSVSRDAFNSAERAVTEVREVTRKSVPRNSLESAEYLKLITGLLNAKDFRDRINGIKQLLSDTENNQDLVVGNIVKIFDAFKSRLHDSNSKVNLVALETMHKMIPLLRDHLSPIINMLIPAIVDNNLNSKNPGIYAAATNVVQALSQHVDIVTELYQRKPHATEQKVLVVLWHLLGNMTNSGSLPGAGGNIRTATAKLSKALFAQMGQNLLNQAASQPPHIKKSLEELLDMTILNEL

SEQ ID NO: 840910 - protein, 102 aa, Homo sapiens
VATTNSSQARVWQRSCYSRDLEEGIYLQPCRQACIPWPLPWSLKQFTDSVSVTRATVHGQSCLYRNPHSYLRKCSLVLTESHTHPHPDLRPSICRPDCKNMP

SEQ ID NO: 840911 - protein, 44 aa, Homo sapiens
QVSKPDMGLVALEAEGQELLLELEKNHRLLAPGYIETHYGPDGQ

SEQ ID NO: 840912 - protein, 114 aa, Homo sapiens
MRALRPREVKEFANEVAEQDLNPHLPDSKARSFLGKAKRGQGLAVPSPTRTPLVCFERWQAPSLPSSEDKGRAVSPEASLSLVLMVPAHTPSYPSSMNPPPHSGTGLLPGGGIR

SEQ ID NO: 840913 - protein, 372 aa, Homo sapiens
MRVGPVRSAMSGASQPRGPALLFPATRGVPAKRLLDADDAAAVAAKCPRLSECSSPPDYLSPPGSPCSPQPPPAAPGAGGGSGSAPGPSRIADYLLLPLAEREHVSRALCIHTGRELRCKVFPIKHYQDKIRPYIQLPSHSNITGIVEVILGETKAYVFFEKDFGDMHSYVRSRKRLREEEAARLFKQIVSAVAHCHQSAIVLGDLKLRKFVFSTEERTQLRLESLEDTHIMKGEDDALSDKHGCPAYVSPEILNTTGTYSGKAADVWSLGVMLYTLLVGRYPFHDSDPSALFSKIRRGQFCIPEHISPKARCLIRSLLRREPSERLTAPEILLHPWFESVLEPGYIDSEIGTSDQIVPEYQEDSDISSFFC

SEQ ID NO: 840914 - protein, 74 aa, Homo sapiens
AATASPVAFWNQSGGAGHVVRCCVLVQNKVKGSYVPDLVFRASVPEESQPRLVYSAFSWTGPGDTVALLWDGKC

SEQ ID NO: 840915 - protein, 205 aa, Homo sapiens
AATASPVAFWNQSGGAGHVVRCCVLVQNKVKGSYVPDLVFRASVPEESQPRTQLRLESLEDTHIMKGEDDALSDKHGCPAYVSPEILNTTGTYSGKAADVWSLGVMLYTLLVGRYPFHDSDPSALFSKIRRGQFCIPEHISPKARCLIRSLLRREPSERLTAPEILLHPWFESVLEPGYIDSEIGTSDQIVPEYQEDSDISSFFC

SEQ ID NO: 840916 - protein, 74 aa, Homo sapiens
  misc_feature (2)..(2): Xaa can be any naturally occurring amino acid
  misc_feature (22)..(22): Xaa can be any naturally occurring amino acid
  misc_feature (24)..(24): Xaa can be any naturally occurring amino acid
  misc_feature (32)..(32): Xaa can be any naturally occurring amino acid
  misc_feature (37)..(38): Xaa can be any naturally occurring amino acid
  misc_feature (43)..(43): Xaa can be any naturally occurring amino acid
  misc_feature (55)..(57): Xaa can be any naturally occurring amino acid
  misc_feature (61)..(61): Xaa can be any naturally occurring amino acid
  misc_feature (66)..(66): Xaa can be any naturally occurring amino acid
PXLANRTWQAAGGSGKARWEEXEXEDQEPRKXKKKEXXGQPKXKGRTEMRGKREXXXNSNXEKRIXSGRSPINH

SEQ ID NO: 840917 - protein, 372 aa, Homo sapiens; identical to SEQ ID NO: 840913

SEQ ID NO: 840918 - protein, 206 aa, Homo sapiens
MHSYVRSRKRLREEEAARLFKQIVSAVAHCHQSAIVLGDLKLRKFVFSTEERTQLRLESLEDTHIMKGEDDALSDKHGCPAYVSPEILNTTGTYSGKAADVWSLGVMLYTLLVGRYPFHDSDPSALFSKIRRGQFCIPEHISPKARCLIRSLLRREPSERLTAPEILLHPWFESVLEPGYIDSEIGTSDQIVPEYQEDSDISSFFC

SEQ ID NO: 840919 - protein, 141 aa, Homo sapiens
MKGEDDALSDKHGCPAYVSPEILNTTGTYSGKAADVWSLGVMLYTLLVGRYPFHDSDPSALFSKIRRGQFCIPEHISPKARCLIRSLLRREPSERLTAPEILLHPWFESVLEPGYIDSEIGTSDQIVPEYQEDSDISSFFC

SEQ ID NO: 840920 - protein, 141 aa, Homo sapiens; identical to SEQ ID NO: 840919

SEQ ID NO: 840921 - protein, 372 aa, Homo sapiens; identical to SEQ ID NO: 840913

SEQ ID NO: 840922 - protein, 77 aa, Homo sapiens
SASLNFSNTEFSTSTLLPSTRPTKYQTVFSQWQVSSCKSKENPDAILPIHTLTETIQEALEKCQIPDDAQDAFGRRP

SEQ ID NO: 840923 - protein, 106 aa, Homo sapiens
MCVCICRWEHLPLAQALCIGVSDQAPGRLPHLASFWQPCRVGTDLLRSWARTYPVACVRGSAAGPLLKRTFRFCPPSFLKCLGSCIFGLRLCCPCSVSGTQNLWGS

SEQ ID NO: 840924 - protein, 182 aa, Homo sapiens
MTPPQQPPPLRSEPGTLGSAASSYSPLGLNGVPGSIWDFVSGSFSPSPSPILSAGPPSSSSASPNGAELARVRRQLDEAKRKIRQWEESWQQVKQVCDAWQREAQEAKERARVADSDRQLALQKKEEVEAQVIFQLRAKQCVACRERAHGAVLRPCQHHILCEPCAATAPECPYCKGQPLQW

SEQ ID NO: 840925 - protein, 229 aa, Homo sapiens
MTCCSQVPPRRRPSLALSPRLDCNGLNGVPGSIWDFVSGSFSPSPSPILSAGPPSSSSASPNGAELARVRRQLDEAKRKIRQWEESWQQVKQVCDAWQREAQEAKERARVADSDRQLALQKKEEVEAQVKQLQEELEGLGVASTLPGLRGCGDIGTIPLPKLHSLQSQLRLDLEAVDGVIFQLRAKQCVACRERAHGAVLRPCQHHILCEPCAATAPECPYCKGQPLQW

SEQ ID NO: 840926 - protein, 206 aa, Homo sapiens
MVAGRLCTCRHPRLPAQSTIATLAILSAGPPSSSSASPNGAELARVRRQLDEAKRKIRQWEESWQQVKQVCDAWQREAQEAKERARVADSDRQLALQKKEEVEAQVKQLQEELEGLGVASTLPGLRGCGDIGTIPLPKLHSLQSQLRLDLEAVDGVIFQLRAKQCVACRERAHGAVLRPCQHHILCEPCAATAPECPYCKGQPLQW

SEQ ID NO: 840927 - protein, 232 aa, Homo sapiens
MTPPQQPPPLRSEPGTLGSAASSYSPLGLNGVPGSIWDFVSGSFSPSPSPILSAGPPSSSSASPNGAELARVRRQLDEAKRKIRQWEESWQQVKQVCDAWQREAQEAKERARVADSDRQLALQKKEEVEAQVKQLQEELEGLGVASTLPGLRGCGDIGTIPLPKLHSLQSQLRLDLEAVDGVIFQLRAKQCVACRERAHGAVLRPCQHHILCEPCAATAPECPYCKGQPLQW

SEQ ID NO: 840928 - protein, 106 aa, Homo sapiens
SLEQRERPGSPGRVVRSVRGPRRAGQSDRTAGLVPRAQAVTFVPPQARGSAPAPKITQGSPSVPAARESQGCSPPFMLPVGCTSLKASSMEPITFHRGQFPGPQTR

SEQ ID NO: 840929 - protein, 605 aa, Homo sapiens
MVRHQPLQYYEPQLCLSCLTGIYGCRWKRYQRSHDDTTPWERLWFLLLTFTFGLTLTWLYFWWEVHNDYDEFNWYLYNRMGYWSDWPVPILVTTAAAFAYIAGLLVLALCHIAVGQQMNLHWLHKIGLVVILASTVVAMSAVAQLWEDEWEVLLISLQGTAPFLHVGAVAAVTMLSWIVAGQFARAERTSSQVTILCTFFTVVFALYLAPLTISSPCIMEKKDLGPKPALIGHRGAPMLAPEHTLMSFRKALEQKLYGLQADITISLDGVPFLMHDTTLRRTTNVEEEFPELARRPASMLNWTTLQRLNAGQWFLKTDPFWTASSLSPSDHREAQNQSICSLAELLELAKGNATLLLNLRDPPREHPYRSSFINVTLEAVLHSGFPQHQVMWLPSRQRPLVRKVAPGFQQTSGSKEAVASLRRGHIQRLNLRYTQVSRQELRDYASWNLSVNLYTVNAPWLFSLLWCAGVPSVTSDNSHALSQVPSPLWIMPPDEYCLMWVTADLVSFTLIVGIFVLQKWRLGGIRSYNPEQIMLSAAVRRTSRDVSIMKEKLIFSEISDGVEVSDVLSVCSDNSYDTYANSTATPVGPRGGGSHTKTLIERSGR

SEQ ID NO: 840930 - protein, 276 aa, Homo sapiens
MGPPHTTNVEEEFPELARRPASMLNWTTLQRLNAGQWFLKTDPFWTASSLSPSDHREAQNQSICSLAELLELAKGNATLLLNLRDPPREHPYRSSFINVTLEAVLHSGFPQHQDYASWNLSVNLYTVNAPWLFSLLWCAGVPSVTSDNSHALSQVPSPLWIMPPDEYCLMWVTADLVSFTLIVGIFVLQKWRLGGIRSYNPEQIMLSAAVRRTSRDVSIMKEKLIFSEISDGVEVSDVLSVCSDNSYDTYANSTATPVGPRGGGSHTKTLIERSGR

SEQ ID NO: 840931 - protein, 605 aa, Homo sapiens; identical to SEQ ID NO: 840929

SEQ ID NO: 840932 - protein, 259 aa, Homo sapiens
MVRHQPLQYYEPQLCLSCLTGIYGCRWKRYQRSHDDTTPWERLWFLLLTFTFGLTLTWLYFWWEVHNDYDEFNWYLYNRMGYWSDWPVPILVTTAAAFAYIAGLLVLALCHIAVGQQMNLHWLHKIGLVVILASTVVAMSAVAQLWEDEWEVLLISLQGTAPFLHVGAVAAVTMLSWIVAGQFARAERTSSQVTILCTFFTVVFALYLAPLTISSPCIMEKKDLGPKPALIGHRGAPMASGEPSRRAGRQLRAHCDSEY

SEQ ID NO: 840933 - protein, 75 aa, Homo sapiens
AVGTELAHVVVYARCASTIDFLKRYASNIPSGEFQTADEDLCYCLECVAEYHKARDELPFLHEVKYIRWAIFFRA

SEQ ID NO: 840934 - protein, 605 aa, Homo sapiens; identical to SEQ ID NO: 840929

SEQ ID NO: 840935 - protein, 641 aa, Homo sapiens
MVRHQPLQYYEPQLCLSCLTGIYGCRWKRYQRSHDDTTPDSVWACTLQGPDSEEVLGQDLLNEQLEGGLSICVHEWERLWFLLLTFTFGLTLTWLYFWWEVHNDYDEFNWYLYNRMGYWSDWPVPILVTTAAAFAYIAGLLVLALCHIAVGQQMNLHWLHKIGLVVILASTVVAMSAVAQLWEDEWEVLLISLQGTAPFLHVGAVAAVTMLSWIVAGQFARAERTSSQVTILCTFFTVVFALYLAPLTISSPCIMEKKDLGPKPALIGHRGAPMLAPEHTLMSFRKALEQKLYGLQADITISLDGVPFLMHDTTLRRTTNVEEEFPELARRPASMLNWTTLQRLNAGQWFLKTDPFWTASSLSPSDHREAQNQSICSLAELLELAKGNATLLLNLRDPPREHPYRSSFINVTLEAVLHSGFPQHQVMWLPSRQRPLVRKVAPGFQQTSGSKEAVASLRRGHIQRLNLRYTQVSRQELRDYASWNLSVNLYTVNAPWLFSLLWCAGVPSVTSDNSHALSQVPSPLWIMPPDEYCLMWVTADLVSFTLIVGIFVLQKWRLGGIRSYNPEQIMLSAAVRRTSRDVSIMKEKLIFSEISDGVEVSDVLSVCSDNSYDTYANSTATPVGPRGGGSHTKTLIERSGR

SEQ ID NO: 840936 - protein, 159 aa, Homo sapiens [sequence omitted]

SEQ ID NO: 840937 - protein, 164 aa, Homo sapiens
MSELTFTIATKRIKYLGIQLIRDVKDLFKENDKLLLKEIREDTNKWKSIPCLWIGRINIVKMGIPPKVIYRFNAIPIKLPMTFFTELEKTTLRFIWNQKKSLHSQDNPKQKEKRWRHRATLLQTILQGYSNQNSMLLVPKQIYRPMEQNRGLRNNTTHLQPSDL

SEQ ID NO: 840938 - protein, 74 aa, Homo sapiens
  misc_feature (20)..(20): Xaa can be any naturally occurring amino acid
  misc_feature (35)..(35): Xaa can be any naturally occurring amino acid
QPVRASICTLGSIASEDTRXGKTATPQVAEPSPPXHLARDSSSKVMISLIKRAAPNSPPEAKEPFFFFSLKSPF

SEQ ID NO: 840939 - protein, 70 aa, Homo sapiens
YGYTKSHFRGHPGQGSAKAFWKGPDDTHFGLCKPLTASVTSSCCCCERPFKNVKTILRNLVVQRQTHRLD

SEQ ID NO: 840940 - protein, 151 aa, Homo sapiens
MEYVLEVKNSPRHLLKQFTVCDVPLYDICDYNVSRDRCQELGCCFYEGVCYKKAVPIYIHVFSALIVIIAGAFVITIIYRVIQESRKEKAIPVDVALPQKSSEKAELASSSSKLGLKPASPGPPSAGPSMKSDEDKDDVTGTITEAEETED

SEQ ID NO: 840941 - protein, 128 aa, Homo sapiens
FTGEFSWKKNLMPAICQGRQEVTVQAQCARPLHLSAAAMEYVLEVKNSPRHLLKQFTVCDVPLYDICDYNVSRDRCQELGCCFYEGVCYKKAVPKSFRRAGKKRPSLWMSRCHRSPAKRRSWPHPAAS

SEQ ID NO: 840942 - protein, 178 aa, Homo sapiens
MFLCMTFVTTTSPGTDARSSGAASTKASATRKRFPFRGGIDLGIEEPFPGSWGAQQEQRGQRHLSTHPQGSGASTIYPPHTPEVYIHVFSALIVIIAGAFVITIIYRVIQESRKEKAIPVDVALPQKSSEKAELASSSSKLGLKPASPGPPSAGPSMKSDEDKDDVTGTITEAEETED

SEQ ID NO: 840943 - protein, 140 aa, Homo sapiens
CPDLPPPLPRVPTLHSCSLPLTPHSAARGIPNAEPVFLLLRTFVAPWCSQQKSQTPQLRIQGPSGPRLCCPAFQVHELRRAPRKPSGKAKDHDVDYCTSPASPPYLTLHVTLLSLKPFPLASIRDSTSFWAFFSLFLEVS

SEQ ID NO: 840944 - protein, 119 aa, Homo sapiens
PSCLISQPPCRAPALRSGLSLLCPLDTVCPELLLYLPNKDWCTLKPSWMSHLTSSPCPHLLSEFLQPIAPATLSGTTFHYQELGKLAKVSTLLFTAVSASHKMLPTSQGCVKSKMRKCI

SEQ ID NO: 840945 - protein, 104 aa, Homo sapiens
LPGKEGRGAWQVWNPPSSSGIPGPTSMYKWDGEGPGQCGFTFTGNGWELLRHSECQAHGTQLAFGQACTAVLVRNLTSALWGRWVEWLKLETDQRSSWTQTEGG

SEQ ID NO: 840946 - protein, 70 aa, Homo sapiens
RTYAGGWDLPQGLSKETRPRCNASAVDHTRARPKTPNHSPSSPASQTAGFSKPPFLLSVSSAELHVPLLL

SEQ ID NO: 840947 - protein, 218 aa, Homo sapiens
MSALGAVIALLLWGQLFAVDSGNDVTDIADDGCPKPPEIAHGYVEHSVRYQCKNYYKLRTEGDGVYTLNNGKQWINKAVGDIKALFVSEEEKKLTRKEVYIKNGDKKGSCERDAQYAPGYDKVKDISEVVTPRFLCTGGVSPYADPNTCRGDSGGPLIVHKRSRFIQVGVISWGVVDVCKNQKRQKQVPAHARDFHINLFQVLPWLKEKLQDEDLGFL

SEQ ID NO: 840948 - protein, 118 aa, Homo sapiens
MCIPAFSQFIFLISYPHGPVSSAGLHNMGGDPITVIDEIRDLLYIGKDRKNPREDYLDVYVFGVGPLVNQVNINALASKKDNEQHVFKVKDMENLEDVFYQMIGREIQGNKEHNSPQV

SEQ ID NO: 840949 - protein, 764 aa, Homo sapiens
MGSNLSPQLCLMPFILGLLSGGVTTTPWSLARPQGSCSLEGVEIKGGSFRLLQEGQALEYVCPSGFYPYPVQTRTCRSTGSWSTLKTQDQKTVRKAECRAIHCPRPHDFENGEYWPRSPYYNVSDEISFHCYDGYTLRGSANRTCQVNGRWSGQTAICDNGAGYCSNPGIPIGTRKVGSQYRLEDSVTYHCSRGLTLRGSQRRTCQEGGSWSGTEPSCQDSFMYDTPQEVAEAFLSSLTETIEGVDAEDGHGPGEQQKRKIVLDPSGSMNIYLVLDGSDSIGASNFTGAKKCLVNLIEKVASYGVKPRYGLVTYATYPKIWVKVSEADSSNADWVTKQLNEINYEDHKLKSGTNTKKALQAVYSMMSWPDDVPPEGWNRTRHVIILMTDGLHNMGGDPITVIDEIRDLLYIGKDRKNPREDYLDVYVFGVGPLVNQVNINALASKKDNEQHVFKVKDMENLEDVFYQMIDESQSLSLCGMVWEHRKGTDYHKQPWQAKISVIRPSKGHESCMGAVVSEYFVLTAAHCFTVDDKEHSIKVSVGGEKRDLEIEVVLFHPNYNINGKKEAGIPEFYDYDVALIKLKNKLKYGQTIRPICLPCTEGTTRALRLPPTTTCQQQKEELLPAQDIKALFVSEEEKKLTRKEVYIKNGDKKGSCERDAQYAPGYDKVKDISEVVTPRFLCTGGVSPYADPNTCRGDSGGPLIVHKRSRFIQVGVISWGVVDVCKNQKRQKQVPAHARDFHINLFQVLPWLKEKLQDEDLGFL

SEQ ID NO: 840950 - protein, 542 aa, Homo sapiens
MYDTPQEVAEAFLSSLTETIEGVDAEDGHGPGEQQKRKIVLDPSGSMNIYLVLDGSDSIGASNFTGAKKCLVNLIEKVASYGVKPRYGLVTYATYPKIWVKVSEADSSNADWVTKQLNEINYEDHKLKSGTNTKKALQAVYSMMSWPDDVPPEGWNRTRHVIILMTDGLHNMGGDPITVIDEIRDLLYIGKDRKNPREDYLDVYVFGVGPLVNQVNINALASKKDNEQHVFKVKDMENLEDVFYQMIDESQSLSLCGMVWEHRKGTDYHKQPWQAKISVIRPSKGHESCMGAVVSEYFVLTAAHCFTVDDKEHSIKVSVGGEKRDLEIEVVLFHPNYNINGKKEAGIPEFYDYDVALIKLKNKLKYGQTIRPICLPCTEGTTRALRLPPTTTCQQQKEELLPAQDIKALFVSEEEKKLTRKEVYIKNGDKKGSCERDAQYAPGYDKVKDISEVVTPRFLCTGGVSPYADPNTCRGDSGGPLIVHKRSRFIQVGVISWGVVDVCKNQKRQKQVPAHARDFHINLFQVLPWLKEKLQDEDLGFL

SEQ ID NO: 840951 - protein, 416 aa, Homo sapiens
MGSNLSPQLCLMPFILGLLSGGVTTTPWSLARPQGSCSLEGVEIKGGSFRLLQEGQALEYVCPSGFYPYPVQTRTCRSTGSWSTLKTQDQKTVRKAECRAIHCPRPHDFENGEYWPRSPYYNVSDEISFHCYDGYTLRGSANRTCQVNGRWSGQTAICDNGAGYCSNPGIPIGTRKVGSQYRLEDSVTYHCSRGLTLRGSQRRTCQEGGSWSGTEPSCQDSFMYDTPQEVAEAFLSSLTETIEGVDAEDGHGPGEQQKRKIVLDPSGSMNIYLVLDGSDSIGASNFTGAKKCLVNLIEKVASYGVKPRYGLVTYATYPKIWVKVSEADSSNADWVTKQLNEINYEDHKLKSGTNTKKALQAVYSMMSWPDDVPPEGWNRTRHVIILMTDGLHNMGGDPITVIDEIRDLLYIGKDRK

SEQ ID NO: 840952 - protein, 836 aa, Homo sapiens
MGSNLSPQLCLMPFILGLLSGGVTTTPWSLARPQGSCSLEGVEIKGGSFRLLQEGQALEYVCPSGFYPYPVQTRTCRSTGSWSTLKTQDQKTVRKAECRAIHCPRPHDFENGEYWPRSPYYNVSDEISFHCYDGYTLRGSANRTCQVNGRWSGQTAICDNGAGYCSNPGIPIGTRKVGSQYRLEDSVTYHCSRGLTLRGSQRRTCQEGGSWSGTEPSCQDSFMYDTPQEVAEAFLSSLTETIEGVDAEDGHGPGEQQKRKIVLDPSGSMNIYLVLDGSDSIGASNFTGAKKCLVNLIEKVASYGVKPRYGLVTYATYPKIWVKVSEADSSNADWVTKQLNEINYEDHKLKSGTNTKKALQAVYSMMSWPDDVPPEGWNRTRHVIILMTDGLHNMGGDPITVIDEIRDLLYIGKDRKNPREDYLDVYVFGVGPLVNQVNINALASKKDNEQHVFKVKDMENLEDVFYQMIDESQSLSLCGMVWEHRKGTDYHKQPWQAKISVIRPSKGHESCMGAVVSEYFVLTAAHCFTVDDKEHSIKVSVGKDATEGPGLHLCSPGNTSHFLQILHSTHPQCSPIPCTPDQSGMGEDVKLGMTRGQRQEAAHKEVVTYSPTSGGEKRDLEIEVVLFHPNYNINGKKEAGIPEFYDYDVALIKLKNKLKYGQTIRPICLPCTEGTTRALRLPPTTTCQQQKEELLPAQDIKALFVSEEEKKLTRKEVYIKNGDKKGSCERDAQYAPGYDKVKDISEVVTPRFLCTGGVSPYADPNTCRGDSGGPLIVHKRSRFIQVGVISWGVVDVCKNQKRQKQVPAHARDFHINLFQVLPWLKEKLQDEDLGFL

SEQ ID NO: 840953 - protein, 354 aa, Homo sapiens
RGLPTQVKQGGYLDVYVFGVGPLVNQVNINALASKKDNEQHVFKVKDMENLEDVFYQMIDESQSLSLCGMVWEHRKGTDYHKQPWQAKISVIRPSKGHESCMGAVVSEYFVLTAAHCFTVDDKEHSIKVSVGGEKRDLEIEVVLFHPNYNINGKKEAGIPEFYDYDVALIKLKNKLKYGQTIRPICLPCTEGTTRALRLPPTTTCQQQKEELLPAQDIKALFVSEEEKKLTRKEVYIKNGDKKGSCERDAQYAPGYDKVKDISEVVTPRFLCTGGVSPYADPNTCRGDSGGPLIVHKRSRFIQVGVISWGVVDVCKNQKRQKQVPAHARDFHINLFQVLPWLKEKLQDEDLGFL

SEQ ID NO: 840954 - protein, 253 aa, Homo sapiens [sequence omitted]

SEQ ID NO: 840955 - protein, 764 aa, Homo sapiens; identical to SEQ ID NO: 840949

SEQ ID NO: 840956 - protein, 764 aa, Homo sapiens; identical to SEQ ID NO: 840949

SEQ ID NO: 840957 - protein, 626 aa, Homo sapiens [sequence omitted]

SEQ ID NO: 840958 - protein, 763 aa, Homo sapiens
MGSNLSPQLCLMPFILGLLSGGVTTTPWSLARPQGSCSLEGVEIKGGSFRLLQEGQALEYVCPSGFYPYPVQTRTCRSTGSWSTLKTQDQKTVRKAECRAIHCPRPHDFENGEYWPRSPYYNVSDEISFHCYDGYTLRGSANRTCQVNGRWSGQTAICDNGAGYCSNPGIPIGTRKVGSQYRLEDSVTYHCSRGLTLRGSQRRTCQEGGSWSGTEPSCQDSFMYDTPQEVAEAFLSSLTETIEGVDAEDGHGPGEQQKRKIVLDPSGSMNIYLVLDGSDSIGASNFTGAKKCLVNLIEKVASYGVKPRYGLVTYATYPKIWVKVSEADSSNADWVTKQLNEINYEDHKLKSGTNTKKALQAVYSMMSWPDDVPPEGWNRTRHVIILMTDGLHNMGGDPITVIDEIRDLLYIGKDRKNPREDYLDVYVFGVGPLVNQVNINALASKKDNEQHVFKVKDMENLEDVFYQMIDESQSLSLCGMVWEHRKGTDYHKQPWQAKISVIRPSKGHESCMGAVVSEYFVLTAAHCFTVDDKEHSIKVSVGGEKRDLEIEVVLFHPNYNINGKKEAGIPEFYDYDVALIKLKNKLKYGQTIRPICLPCTEGTTRALRLPPTTTCQQQKEELLPAQDIKALFVSEEEKKLTRKEVYIKNGDKKGSCERDAQYAPGYDKVKDISEVVTPRFLCTGGVSPYADPNTCRGDSGGPLIVHKRSRFIQVGVISWGVVDVCKNQKRQKQVPAHARDFHINLFQVLSIRGFLLDRGVGLN

SEQ ID NO: 840959 - protein, 744 aa, Homo sapiens [sequence omitted]

SEQ ID NO: 840960 - protein, 626 aa, Homo sapiens [sequence omitted]

SEQ ID NO: 840961 - protein, 662 aa, Homo sapiens [sequence omitted]

SEQ ID NO: 840962 - protein, 484 aa, Homo sapiens
MGSNLSPQLCLMPFILGLLSGGVTTTPWSLARPQGSCSLEGVEIKGGSFRLLQEGQALEYVCPSGFYPYPVQTRTCRSTGSWSTLKTQDQKTVRKAECRAIHCPRPHDFENGEYWPRSPYYNVSDEISFHCYDGYTLRGSANRTCQVNGRWSGQTAICDNGAGYCSNPGIPIGTRKVGSQYRLEDSVTYHCSRGLTLRGSQRRTCQEGGSWSGTEPSCQDSFMYDTPQEVAEAFLSSLTETIEGVDAEDGHGPGEQQKRKIVLDPSGSMNIYLVLDGSDSIGASNFTGAKKCLVNLIEKVASYGVKPRYGLVTYATYPKIWVKVSEADSSNADWVTKQLNEINYEDHKLKSGTNTKKALQAVYSMMSWPDDVPPEGWNRTRHVIILMTDGLHNMGGDPITVIDEIRDLLYIGKDRKNPREDYLDVYVFGVGPLVNQVNINALASKKDNEQHVFKVKDMENLEDVFYQMIGREIQGNKEHNSPQV

SEQ ID NO: 840963 - protein, 247 aa, Homo sapiens
MGSNLSPQLCLMPFILGLLSGGVTTTPWSLARPQGSCSLEGVEIKGGSFRLLQEGQALEYVCPSGFYPYPVQTRTCRSTGSWSTLKTQDQKTVRKAECRAIHCPRPHDFENGEYWPRSPYYNVSDEISFHCYDGYTLRGSANRTCQVNGRWSGQTAICDNGAGYCSNPGIPIGTRKVGSQYRLEDSVTYHCSRGLTLRGSQRRTCQEGGSWSGTEPSCQDSFMYDTPQEVAEAFLSSLTETIEGSLC

SEQ ID NO: 840964 - protein, 122 aa, Homo sapiens
MGSNLSPQLCLMPFILGLLSGGVTTTPWSLARPQGSCSLEGVEIKGGSFRLLQEGQALEYVCPSGFYPYPVQTRTCRSTGSWSTLKTQDQKTVRKAECRGLRAMSVGSGLRQKQGRRQQGQD

SEQ ID NO: 840965 - protein, 115 aa, Homo sapiens
MGIKGSCERDAQYAPGYDKVKDISEVVTPRFLCTGGVSPYADPNTCRGDSGGPLIVHKRSRFIQVGVISWGVVDVCKNQKRQKQVPAHARDFHINLFQVLPWLKEKLQDEDLGFL

SEQ ID NO: 840966 - protein, 743 aa, Homo sapiens
MGSNLSPQLCLMPFILGLLSGGVTTTPWSLARPQGSCSLEGVEIKGGSFRLLQEGQALEYVCPSGFYPYPVQTRTCRSTGSWSTLKTQDQKTVRKAECRAIHCPRPHDFENGEYWPRSPYYNVSDEISFHCYDGYTLRGSANRTCQVNGRWSGQTAICDNGAGYCSNPGIPIGTRKVGSQYRLEDSVTYHCSRGLTLRGSQRRTCQEGGSWSGTEPSCQDSFMYDTPQEVAEAFLSSLTETIEGVDAEDGHGPGEQQKRKIVLDPSGSMNIYLVLDGSDSIGASNFTGAKKCLVNLIEKVASYGVKPRYGLVTYATYPKIWVKVYHKLKSGTNTKKALQAVYSMMSWPDDVPPEGWNRTRHVIILMTDGLHNMGGDPITVIDEIRDLLYIGKDRKNPREDYLDVYVFGVGPLVNQVNINALASKKDNEQHVFKVKDMENLEDVFYQMIDESQSLSLCGMVWEHRKGTDYHKQPWQAKISVIRPSKGHESCMGAVVSEYFVLTAAHCFTVDDKEHSIKVSVGGEKRDLEIEVVLFHPNYNINGKKEAGIPEFYDYDVALIKLKNKLKYGQTIRPICLPCTEGTTRALRLPPTTTCQQQKEELLPAQDIKALFVSEEEKKLTRKEVYIKNGDKKGSCERDAQYAPGYDKVKDISEVVTPRFLCTGGVSPYADPNTCRGDSGGPLIVHKRSRFIQVGVISWGVVDVCKNQKRQKQVPAHARDFHINLFQVLPWLKEKLQDEDLGFL

SEQ ID NO: 840967 - protein, 666 aa, Homo sapiens
MGSNLSPQLCLMPFILGLLSGGVTTTPWSLARPQGSCSLEGVEIKGGSFRLLQEGQALEYVCPSGFYPYPVQTRTCRSTGSWSTLKTQDQKTVRKAECRAIHCPRPHDFENGEYWPRSPYYNVSDEISFHCYDGYTLRGSANRTCQVNGRWSGQTAICDNGAGYCSNPGIPIGTRKVGSQYRLEDSVTYHCSRGLTLRGSQRRTCQEGGSWSGTEPSCQDSFMYDTPQEVAEAFLSSLTETIEGVDAEDGHGPGEQQKRKIVLDPSGSMNIYLVLDGSDSIGASNFTGAKKCLVNLIEKVASYGVKPRYGLVTYATYPKIWVKVSEADSSNADWVTKQVNINALASKKDNEQHVFKVKDMENLEDVFYQMIDESQSLSLCGMVWEHRKGTDYHKQPWQAKISVIRPSKGHESCMGAVVSEYFVLTAAHCFTVDDKEHSIKVSVGGEKRDLEIEVVLFHPNYNINGKKEAGIPEFYDYDVALIKLKNKLKYGQTIRPICLPCTEGTTRALRLPPTTTCQQQKEELLPAQDIKALFVSEEEKKLTRKEVYIKNGDKKGSCERDAQYAPGYDKVKDISEVVTPRFLCTGGVSPYADPNTCRGDSGGPLIVHKRSRFIQVGVISWGVVDVCKNQKRQKQVPAHARDFHINLFQVLPWLKEKLQDEDLGFL

SEQ ID NO: 840968 - protein, 753 aa, Homo sapiens
MGSNLSPQLCLMPFILGLLSGGVTTTPWSLARPQGSCSLEGVEIKGGSFRLLQEGQALEYVCPSGFYPYPVQTRTCRSTGSWSTLKTQDQKTVRKAECRAIHCPRPHDFENGEYWPRSPYYNVSDEISFHCYDGYTLRGSANRTCQVNGRWSGQTAICDNGAGYCSNPGIPIGTRKVGSQYRLEDSVTYHCSRGLTLRGSQRRTCQEGGSWSGTEPSCQDSFMYDTPQEVAEAFLSSLTETIEGVDAEDGHGPGEQQKRKIVLDPSGSMNIYLVLDGSDSIGASNFTGAKKCLVNLIEKVASYGVKPRYGLVTYATYPKIWVKVSEADSSNADWVTKQLNEINYEDHKLKSGTNTKKALQAVYSMMSWPDDVPPEGWNRTRHVIILMTDGLHNMGGDPITVIDEIRDLLYIGKDRKNPREDYLDVYVFGVGPLVNQVNINALASKKDNEQHVFKVKDMDESQSLSLCGMVWEHRKGTDYHKQPWQAKISVIRPSKGHESCMGAVVSEYFVLTAAHCFTVDDKEHSIKVSVGGEKRDLEIEVVLFHPNYNINGKKEAGIPEFYDYDVALIKLKNKLKYGQTIRPICLPCTEGTTRALRLPPTTTCQQQKEELLPAQDIKALFVSEEEKKLTRKEVYIKNGDKKGSCERDAQYAPGYDKVKDISEVVTPRFLCTGGVSPYADPNTCRGDSGGPLIVHKRSRFIQVGVISWGVVDVCKNQKRQKQVPAHARDFHINLFQVLPWLKEKLQDEDLGFL

SEQ ID NO: 840969 - protein, 320 aa, Homo sapiens
LKQTWQAKISVIRPSKGHESCMGAVDESQSLSLCGMVWEHRKGTDYHKQPWQAKISVIRPSKGHESCMGAVVSEYFVLTAAHCFTVDDKEHSIKVSVGGEKRDLEIEVVLFHPNYNINGKKEAGIPEFYDYDVALIKLKNKLKYGQTIRPICLPCTEGTTRALRLPPTTTCQQQKEELLPAQDIKALFVSEEEKKLTRKEVYIKNGDKKGSCERDAQYAPGYDKVKDISEVVTPRFLCTGGVSPYADPNTCRGDSGGPLIVHKRSRFIQVGVISWGVVDVCKNQKRQKQVPAHARDFHINLFQVLPWLKEKLQDEDLGFL

SEQ ID NO: 840970 - protein, 764 aa, Homo sapiens; identical to SEQ ID NO: 840949

SEQ ID NO: 840971 - protein, 764 aa, Homo sapiens; identical to SEQ ID NO: 840949

SEQ ID NO: 840972 - protein, 701 aa, Homo sapiens
MGSNLSPQLCLMPFILGLLSGGVTTTPWSLARPQGSCSLEGVEIKGGSFRLLQEGQALEYVCPSGFYPYPVQTRTCRSTGSWSTLKTQDQKTVRKAECRAIHCPRPHDFENGEYWPRSPYYNVSDEISFHCYDGYTLRGSANRTCQVNGRWSGQTAICDNGAGYCSNPGIPIGTRKVGSQYRLEDSVTYHCSRGLTLRGSQRRTCQEGGSWSGTEPSCQDSFMYDTPQEVAEAFLSSLTETIEGVDAEDGHGPGEQQKRKIVLDPSGSMNIYLVLDGSDSIGASNFTGAKKCLVNLIEKVASYGVKPRYGLVTYATYPKIWVKVSEADSSNADWVTKQLNEINYEDHKLKSGTNTKKALQAVYSMMSWPDDVPPEGWNRTRHVIILMTDGLHNMGGDPITVIDEIRDLLYIGKDRKNPREDYLDVYVFGVGPLVNQVNINALASKKDNEQHVFKVKDMENLEDVFYQMIDESQSLSLCGMVWEHRKGTDYHKQPWQAKISVIRPSKGHESCMGAVVSEYFVLTAAHCFTVDDKEHSIKVSVGGEKRDLEIEVVLFHPNYNINGKKEAGIPEFYDYDVALIKLKNKLKYGQTIRPICLPCTEGTTRALRLPPTTTCQQQKEELLPAQDIKALFVSEEEKKLTRKEVYIKNGDKKGSCERDAQYAPGYDKVKDISEVVTPRFLCTGGVSPYADPNTCRVLAAP

SEQ ID NO: 840973 - protein, 732 aa, Homo sapiens
MGSNLSPQLCLMPFILGLLSGGVTTTPWSLARPQGSCSLEGVEIKGGSFRLLQEGQALEYVCPSGFYPYPVQTRTCRSTGSWSTLKTQDQKTVRKAECRAIHCPRPHDFENGEYWPRSPYYNVSDEISFHCYDGYTLRGSANRTCQVNGRWSGQTAICDNGAGYCSNPGIPIGTRKVGSQYRLEDSVTYHCSRGLTLRGSQRRTCQEGGSWSGTEPSCQDSFMYDTPQEVAEAFLSSLTETIEGVDAEDGHGPGEQQKRKIVLDPSGSMNIYLVLDGSDSIGASNFTGAKKCLVNLIEKVASYGVKPRYGLVTYATYPKIWVKVSEADSSNADWVTKQLNEINYEDHKLKSGTNTKKALQAVYSMMSWPDDVPPEGWNRTRHVIILMTDGLHNMGGDPITVIDEIRDLLYIGKDRKNPREDYLDVYVFGVGPLVNQVNINALASKKDNEQHVFKVKDMENLEDVFYQMIDESQSLSLCGMVWEHRKGTDYHKQPWQAKISVIRPSKGHESCMGAVVSEYFVLTAAHCFTVDDKEHSIKVSVGGEKRDLEIEVVLFHPNYNINGKKEAGIPEFYDYDVALIKLKNKLKYGQTIRPICLPCTEGTTRALRLPPTTTCQQQKEELLPAQDIKALFVSEEEKKLTRKEVYIKNGDKKGSCERDAQYAPGYDKVKDISEVVTPRFLCTGGVSPYADPNTCRGDSGGPLIVHKRSRFIQVGVISWGVVDVCKNQKRPG

SEQ ID NO: 840974 - protein, 641 aa, Homo sapiens
MGSNLSPQLCLMPFILGLLSGGVTTTPWSLARPQGSCSLEGVEIKGGSFRLLQEGQALEYVCPSGFYPYPVQTRTCRSTGSWSTLKTQDQKTVRKAECRAIHCPRPHDFENGEYWPRSPYYNVSDEISFHCYDGYTLRGSANRTCQVNGRWSGQTAICDNGAGYCSNPGIPIGTRKVGSQYRLEDSVTYHCSRGLTLRGSQRRTCQEGGSWSGTEPSCQDSFMYDTPQEVAEAFLSSLTETIEGVDAEDGHGPGEQQKRKIVLDPSGSMNIYLVLDGSDSIGASNFTGAKKCLVNLIEKVASYGVKPRYGLVTYATYPKIWVKVSEADSSNADWVTKQLNEINYEDHKLKSGTNTKKALQAVYSMMSWPDDVPPEGWNRTRHVIILMTDGLHNMGGDPITVIDEIRDLLYIGKDRKNPREDYLDVYVFGVGPLVNQVNINALASKKDNEQHVFKVKDMENLEDVFYQMIDESQSLSLCGMVWEHRKGTDYHKQPWQAKISVIRPSKGHESCMGAVVSEYFVLTAAHCFTVDDKEHSIKVSVGGEKRDLEIEVVLFHPNYNINGKKEAGIPEFYDYDVALIKLKNKLKYGQTIRPICLPCTEGTTRALRLPPTTTCQQQKEELLPAQDIKALFVSEEEKRQL

SEQ ID NO: 840975 - protein, 668 aa, Homo sapiens
MGSNLSPQLCLMPFILGLLSGGVTTTPWSLARPQGSCSLEGVEIKGGSFRLLQEGQALEYVCPSGFYPYPVQTRTCRSTGSWSTLKTQDQKTVRKAECRAIHCPRPHDFENGEYWPRSPYYNVSDEISFHCYDGYTLRGSANRTCQVNGRWSGQTAICDNGAGYCSNPGIPIGTRKVGSQYRLEDSVTYHCSRGLTLRGSQRRTCQEGGSWSGTEPSCQDSFMYDTPQEVAEAFLSSLTETIEGVDAEDGHGPGEQQKRKIVLDPSGSMNIYLVLDGSDSIGASNFTGAKKCLVNLIEKVASYGVKPRYGLVTYATYPKIWVKVSEADSSNADWVTKQLNEINYEDHKLKSGTNTKKALQAVYSMMSWPDDVPPEGWNRTRHVIILMTDGLHNMGGDPITVIDEIRDLLYIGKDRKNPREDYLDVYVFGVGPLVNQVNINALASKKDNEQHVFKVKDMENLEDVFYQMIDESQSLSLCGMVWEHRKGTDYHKQPWQAKISVIRPSKGHESCMGAVVSEYFVLTAAHCFTVDDKEHSIKVSVGGEKRDLEIEVVLFHPNYNINGKKEAGIPEFYDYDVALIKPGLGEPSEHQCFGFKKDNEQHVFKVKDMENLEDVFYQMIDESQSLSLCGMVWEHRKGTDYHKQPWQAKISVNSPFKGTRELFGGLGV

SEQ ID NO: 840976 - protein, 305 aa, Homo sapiens
MGSNLSPQLCLMPFILGLLSGGVTTTPWSLARPQGSCSLEGVEIKGGSFRLLQEGQALEYVCPSGFYPYPVQTRTCRSTGSWSTLKTQDQKTVRKAECRAIHCPRPHDFENGEYWPRSPYYNVSDEISFHCYDGYTLRGSANRTCQVNGRWSGQTAICDNGAGYCSNPGIPIGTRKVGSQYRLEDSVTYHCSRGLTLRGSQRRTCQEGGSWSGTEPSCQDSFMYDTPQEVAEAFLSSLTETIEGVDAEDGHGPGEQQKRKIVLDPSGSMNIYLVLDGSDSIGASNFTGAKKCLVNLIEKVESSYP

SEQ ID NO: 840977 - protein, 72 aa, Homo sapiens
SEPPDRHRGHMGLGRKISLINNGLVDVAWVYSFLVLDSYIRDIHSPTIHEKNWPDTVGFLIRAGAQHMACPH

SEQ ID NO: 840978 - protein, 405 aa, Homo sapiens
MILSFTVTWTLRSLGWGEGSTLGIGRAGRSVQAGSCWGINKGGRATLFFFFAVARAGFCQGSIANGAGVHLGPRTPADSPLLAPTAAGFSAPRLPRSAGSSRYRQAAAGAAFALNLAGACAAGRPGQAGRRGGGARHARPAAPRLGFPSAAPAERPAAAPVKRKRRRRRRRRRRRRPLGKLPDPAASAGPMADSSPALSLREGGPRAPRPSAPSPPPRSRSGSESEEAELSLSLARTKTRSYGSTASVRAPLGAGVIERHVEHRVRAGDTLQGIALKYGVTMEQIKRANKLFTNDCIFLKKTLNIPVISEKPLLFNGLNSIDSPENETADNSFSQEEEPVVAGEDLPPPSPQESDVQPVQPEEVSARDFLQRLDLQIKLSTQAAKKLKEESRDEESPYATSLYHS

SEQ ID NO: 840979 - protein, 124 aa, Homo sapiens
MEQIKRANKLFTNDCIFLKKTLNIPVISEKPLLFNGLNSIDSPENETADNSFSQEEEPVVAGEDLPPPSPQESDVQPVQPEEVSARDFLQRLDLQIKLSTQAAKKLKEESRDEESPYATSLYHS

SEQ ID NO: 840980 - protein, 144 aa, Homo sapiens
  misc_feature (10)..(10): Xaa can be any naturally occurring amino acid
EFILDYIKTXNSPPNLLRHSMEQIKRANKLFTNDCIFLKKTLNIPVISEKPLLFNGLNSIDSPENETADNSFSQEEEPVVAGEDLPPPSPQESDVQPVQPEEVSARDFLQRLDLQIKLSTQAAKKLKEESRDEESPYATSLYHS

SEQ ID NO: 840981 - protein, 405 aa, Homo sapiens; identical to SEQ ID NO: 840978

SEQ ID NO: 840982 - protein, 429 aa, Homo sapiens
MILSFTVTWTLRSLGWGEGSTLGIGRAGRSVQAGSCWGINKGGRATLFFFFAVARAGFCQGSIANGAGVHLGPRTPADSPLLAPTAAGFSAPRLPRSAGSSRYRQAAAGAAFALNLAGACAAGRPGQAGRRGGGARHARPAAPRLGFPSAAPAERPAAAPVKRKRRRRRRRRRRRRPLGKLPDPAASAGPMADSSPALSLREGGPRAPRPSAPSPPPRSRSGSESEEAELSLSLARTKTRSYGSTASVRAPLGAGVIERHVEHRVRAGDTLQGTFGGFKVRGGHGLGTRNLEGGPIKPVLPTVDWVLFSCNENSFVEPFPRFIFQEESLCVVYTWDLTLHVISSEREVDNGVDYSSFSQEEEPVVAGEDLPPPSPQESDVQPVQPEEVSARDFLQRLDLQIKLSTQAAKKLKEESRDEESPYATSLYHS

SEQ ID NO: 840983 - protein, 69 aa, Homo sapiens
KSEIWMTRSPLTFERDSYPSFSWRSDHQLVDVNGRSSGNVLHCCRDLMQRRFWGCTRVLMTEGAPSTES

SEQ ID NO: 840984 - protein, 370 aa, Homo sapiens
MAITLEEAPWLGWLLVKALMRFAFMVVNNLVAIPSYICYVIILQPLRVLDSKRFWYIEGIMYKWLLGMVASWGWYAGYTVMEWGEDIKAVSKDEAVMLVNHQATGDVCTLMMCLQDKGLVVAQMMWLMDHIFKYTNFGIVSLVHGDFFIRQGRSYRDQQLLLLKKHLENNYRSRDRKWIVLFPEGGFLRKRRETSQAFAKKNNLPFLTNVTLPRSGATKIILNALVAQQKNGSPAGGDAKELDSKSKGLQWIIDTTIAYPKAEPIDIQTWILGYRKPTVTHVHYRIFPIKDVPLETDDLTTWLYQRFVEKEDLLSHFYETGAFPPSKGHKEAVSREMTLSNLWIFLIQSFAFLSGYMWYNIIQYFYHCLF

SEQ ID NO: 840985 - protein, 110 aa, Homo sapiens
MPSFFFFFFFFFFFETESQSVAQTGVQWRDLGSLQAPPPGFTPSPASASRVTGTTGARHHARLIFCIFSRDGVSLCSPGWSRSPDLVIRARPPVAFEEGKVKFLFLENIF

SEQ ID NO: 840986 - protein, 197 aa, Homo sapiens
LPASPGERGRALGDRVSAPPGNGRGPRHSRSGAGPRHRLLPPAPPPAMHSSGSSDSQSPGWGPASPRKAAARGVGRQRARSRSASGRLGRHRVHDRDPSAGDTRPRSPQPPAVRARRGEPGARAAPAATTLPHPRKPLQAPPAPRAAVASSLPLSSSPASLPSGRKSHSLHPQFLGFYLFLAFAPFPLLLSFLFFAL

SEQ ID NO: 840987 - protein, 114 aa, Homo sapiens
MVIRVYIASSSGSTAIKKKQQDVLGFLEANKIGFEEKDIAANEENRKWMRENVPENSRPATGYPLPPQIFNESQYRGDYDAFFEARENNAVYAFLGLTAPPGSKEAEVQAKQQA

SEQ ID NO: 840988 - protein, 151 aa, Homo sapiens
MDQDGEIEDSTNHPLHTNTNLTTIYMHTHKSFINLTTIYMHTHKTFVRTQNQIKKKQQDVLGFLEANKIGFEEKDIAANEENRKWMRENVPENSRPATGYPLPPQIFNESQYRGDYDAFFEARENNAVYAFLGLTAPPGSKEAEVQAKQQA

SEQ ID NO: 840989 - protein, 119 aa, Homo sapiens
EKQTELPRFDIQRKATDKSGSGPPHPVGWRHSPANKIGFEEKDIAANEENRKWMRENVPENSRPATGYPLPPQIFNESQYRGDYDAFFEARENNAVYAFLGLTAPPGSKEAEVQAKQQA

SEQ ID NO: 840990 - protein, 69 aa, Homo sapiens
GFGLELQRLESSVEAAKGGGGALASSPSTFPHPSLPTAVSAPSWIPAIAAAAPQPFSGPKQPQPLFPGW

SEQ ID NO: 840991 - protein, 114 aa, Homo sapiens; identical to SEQ ID NO: 840987

SEQ ID NO: 840992 - protein, 114 aa, Homo sapiens; identical to SEQ ID NO: 840987

SEQ ID NO: 840993 - protein, 114 aa, Homo sapiens; identical to SEQ ID NO: 840987

SEQ ID NO: 840994 - protein, 114 aa, Homo sapiens; identical to SEQ ID NO: 840987

SEQ ID NO: 840995 - protein, 141 aa, Homo sapiens
FLPCWTLPAFERRTSSSSVLGLGLALLDPQLAEMPIVEPCDHIKKKQQDVLGFLEANKIGFEEKDIAANEENRKWMRENVPENSRPATGYPLPPQIFNESQYRGDYDAFFEARENNAVYAFLGLTAPPGSKEAEVQAKQQA

SEQ ID NO: 840996 - protein, 114 aa, Homo sapiens; identical to SEQ ID NO: 840987

SEQ ID NO: 840997 - protein, 75 aa, Homo sapiens
VEICLGIKQRRPQSTTISAQEGLGNSGCWSGQAVAPNAWSSAWMWSEEAPLHQDLYTGRMAVAQAAEPGSSYMGG

SEQ ID NO: 840998 - protein, 105 aa, Homo sapiens
MCFHLKKRLDDAPCPAASQSLCVSVYQRSHDQEGPCGFGACSLPARSSLGLSCGSLSRFSAPQPKGLGTSHESCRLPYTHCHREAAVDSFVPLWALLWEQSLLGS

SEQ ID NO: 840999 - protein, 106 aa, Homo sapiens
KLVKNADCWVHPASDAIGLGLEILLSNEFPGDADANDVKPALHIRENRCLKVLLNCYRLVDPTFPSLVCFLRKGSFLFILLYSSYYIGCWLAQSGSSRKIVDQSSY

SEQ ID NO: 841000 - protein, 106 aa, Homo sapiens; identical to SEQ ID NO: 840999

SEQ ID NO: 841001 - protein, 105 aa, Homo sapiens
LAANDSLNSPPLHTAIMNGTVTIRVRKFMSNRLLQRKQMVIDVLHPGKATVPKTEIQGKLAKMYKTIPDVIFVFGFRAHFGGGKTTGFGMIYDSLDYAEKNESKH

SEQ ID NO: 841002 - protein, 616 aa, Homo sapiens
CFECGQQHWTRENHLYNYQNEVDDDLVCHICLQPLLQPLDTPCGHTFCYKCLRNFLQEKDFCPLDRKRLHFKLCKKSSILVHKLLDKLLVLCPFSSVCKDVMQRCDLEAHLKNRCPGASHRRVALERRKTSRTQAEIENENGPTLLDPAGTLSPEADCLGTGAVPVERHLTSASLSTWSEEPGLDNPAFEESAGADTTQQPLSLPEGEITTIEIHRSNPYIQLGISIVGGNETPLINIVIQEVYRDGVIARDGRLLAGDQILQVNNYNISNVSHNYARAVLSQPCNTLHLTVLRERRFGNRAHNHSDSNSPREEIFQVALHKRDSGEQLGIKLVRRTDEPGVFILDLLEGGLAAQDGRLSSNDRVLAINGHDLKYGTPELAAQIIQASGERVNLTIARPGKPQPGNTIREAGNHSSSSQHHTPPPYYSRPSSHKDLTQCVTCQEKHITVKKEPHESLGMTVAGGRGSKSGELPIFVTSVPPHGCLARDGRIKRGDVLLNINGIDLTNLSHSEAVAMLKASAASPAVALKALEVQIVEEATQNAEEQPSTFSENEYDASWSPSWVMWLGLPSTLHSCHDIVLRRSYLGSWGFSIVGGYEENHTNQPFFIKTIVLGTP

SEQ ID NO: 841003 - protein, 87 aa, Homo sapiens
MHKGQSSNAEGGTEAGPEEEYSETDAPGGLRRMGLGKTATPRPSLRHNPRGTPTHLHLPYLAEVRSGAGRSLKTSLTLMPANPTRES

SEQ ID NO: 841004 - protein, 30 aa, Homo sapiens
MVLPQLTRPARALPLSAVSVNVYTGIPSPP

SEQ ID NO: 841005 - protein, 150 aa, Homo sapiens
ISSKCTMKEFSSTAQGNTEVIHTGTLQRHERHHIGDFSFQEIEKDIHNFEFQWQEDERNGHEAPMTKIKKLMGSTEQYDHRHAGNKPIKYQLGSSFHSHLSELHIFQPKGKINNQVEKSINDASSVSTAQRISCRPKTHISNNYGDNFLN

SEQ ID NO: 841006 - protein, 211 aa, Homo sapiens
HIRENSYQCEECGKAFKWFSTLTRHKRIHTGEKPFKCEECGKALKQSSTLTTHKIIHTGEKPYRCEECGKAFNRSSHLTTHKIIHTGEKPYKCEECGKAFNQSSTLSTHKFIHAGEKPYKCEECDKAFNRSSNLTKHKIIHTGEKSYKCEECGKAFNQSSTLTKHRKIHTRQKPYNCEECDNTFNQSSNLIKQNNSYWRETLQMSRMWESL

SEQ ID NO: 841007 - protein, 62 aa, Homo sapiens
FSQSSILTTHKRIHTGEKPYKCEECGKAFNRSSNLTKHKIIHTGEKSYKCEECGKAFNQSST

SEQ ID NO: 841008 - protein, 69 aa, Homo sapiens
LAPTLLSIPQKSTVLPHVSTFTPSQGTRQSHQLTASAEEFILSMLGPGADDDPRVLRYSSKTVLPDLQG

SEQ ID NO: 841009 - protein, 31 aa, Homo sapiens
VNVKKSNLWAMQQSRALTLKGLSISSFSPSH

SEQ ID NO: 841010 - protein, 116 aa, Homo sapiens
INHHPSIHPSTIHPSSVHPSIHPSIIHPSMLYPFLHQFSIHLSIVYPSILCPFHLSIYPLSIHPSSVYPLSMNYSSINPSSIHPSILYSSVHHSPIHLPTHPSIRPSDPSWRSMRK

SEQ ID NO: 841011 - protein, 97 aa, Homo sapiens
MGLETSMGHLEFLGPSCSSLLRKTSVPQAQLMASPPISLRKPKQPGEGHLPVSTHGLSPPPQNHYKTRCLTPFYSRVVTAGHTHCLHPCSRSPTRLE

SEQ ID NO: 841012 - protein, 96 aa, Homo sapiens
KGDTKKAGNISLKLHSRQVLETGFHSHSSLQHQSPSYSAYFTYRGWELGDENSNLLYIWGEEYNDMFTKHFYHYVLYLSTHYREEINSEKEFITLQ

SEQ ID NO: 841013 - protein, 691 aa, Homo sapiens
MGQALGIKSCDFQAARNNEEHHTKALSSRRLFVRRGQPFTIILYFRAPVRAFLPALKKVALTAQTGEQPSKINRTQATFPISSLGDRKWWSAVVEERDAQSWTISVTTPADAVIGHYSLLLQVSGRKQLLLGQFTLLFNPWNREDAVFLKNEAQRMEYLLNQNGLIYLGTADCIQAESWDFGQFEGDVIDLSLRLLSKDKQVEKWSQPVHVARVLGALLHFLKEQRVLPTPQTQATQEGALLNKRRGSVPILRQWLTGRGRPVYDGQAWVLAAVACTVLRCLGIPARVVTTFASAQGTGGRLLIDEYYNEEGLQNGEGQRGRIWIFQTSTECWMTRPALPQGYDGWQILHPSAPNGGGVLGSCDLVPVRAVKEGTLGLTPAVSDLFAAINASCVVWKCCEDGTLELTDSNTKYVGNNISTKGVGSDRCEDITQNYKYPEGSLQEKEVLERVEKEKMEREKDNGIRPPSLETASPLYLLLKAPSSLPLRGDAQISVTLVNHSEQEKAVQLAIGVQAVHYNGVLAAKLWRKKLHLTLSANLEKIITIGLFFSNFERNPPENTFLRLTAMATHSESNLSCFAQEDIAICRPHLAIKMPEKAEQYQPLTASVSLQNSLDAPMEDCVISILGRGLIHRERSYRFRSVWPENTMCAKFQFTPTHVGLQRLTVEVDCNMFQNLTNYKSVTVVAPELSA

SEQ ID NO: 841014 - protein, 686 aa, Homo sapiens
MGQALGIKSCDFQAARNNEEHHTKALSSRRLFVRRGQPFTIILYFRAPVRAFLPALKKVALTAQTGEQPSKINRTQATFPISSLGDRKWWSAVVEERDAQSWTISVTTPADAVIGHYSLLLQVSGRKQLLLGQFTLLFNPWNREDAVFLKNEAQRMEYLLNQNGLIYLGTADCIQAESWDFGQFEGDVIDLSLRLLSKDKQVEKWSQPVHVARVLGALLHFLKEQRVLPTPQTQATQEGALLNKRRGSVPILRQWLTGRGRPVYDGQAWVLAAVACTVLRCLGIPARVVTTFASAQGTGGRLLIDEYYNEEGLQNGEGQRGRIWIFQTSTECWMTRPALPQGYDGWQILHPSAPNGGGVLGSCDLVPVRAVKEGTLGLTPAVSDLFAAINASCVVWKCCEDGTLELTDSNTKYVGNNISTKGVGSDRCEDITQNYKYPEGSLQEKEVLERVEKEKMEREKDNGIRPPSLETASPLYLLLKAPSSLPLRGDAQISVTLVNHSEQEKAVQLAIGVQAVHYNGVLAAKLWRKKLHLTLSANLEKIITIGLFFSNFERNPPENTFLRLTAMATHSESNLSCFAQEDIAICRPHLAIKMPEKAEQYQPLTASVSLQNSLDAPMEDCVISILGRGLIHRERSYSPGTKLLALPHCVRQASKTASTYLEQENLPPKVICHSLHRIIKCYIFIC

SEQ ID NO: 841015 - protein, 610 aa, Homo sapiens
MGQALGIKSCDFQAARNNEEHHTKALSSRRLFVRRGQPFTIILYFRAPVRAFLPALKKVALTAQTGEQPSKINRTQATFPISSLGDRKWWSAVVEERDAQSWTISVTTPADAVIGHYSLLLQVSGRKQLLLGQFTLLFNPWNREDAVFLKNEAQRMEYLLNQNGLIYLGTADCIQAESWDFGQFEGDVIDLSLRLLSKDKQVEKWSQPVHVARVLGALLHFLKEQRVLPTPQTQATQEGALLNKRRGSVPILRQWLTGRGRPVYDGQAWVLAAVACTVLRCLGIPARVVTTFASAQGTGGRLLIDEYYNEEGLQNGEGQRGRIWIFQTSTECWMTRPALPQGYDGWQILHPSAPNGGGVLGSCDLVPVRAVKEGTLGLTPAVSDLFAAINASCVVWKCCEDGTLELTDSNTKYVGNNISTKGVGSDRCEDITQNYKYPEGSLQEKEVLERVEKEKMEREKDNGIRPPSLETASPLYLLLKAPSSLPLRGDAQISVTLVNHSEQEKAVQLAIGVQAVHYNGVLAAKLWRKKLHLTLSANLGNALWPHQTPPDTHTHMAPALGSSSHRAPPAVSRDGFEPLLLTLMFSLIHSFNTYLLGLKQEKNTMPTAVR

SEQ ID NO: 841016 - protein, 721 aa, Homo sapiens
MGQGEPSQRSTGLAGLYAAPAASPVFIKGSGMDALGIKSCDFQAARNNEEHHTKALSSRRLFVRRGQPFTIILYFRAPVRAFLPALKKVALTAQTGEQPSKINRTQATFPISSLGDRKWWSAVVEERDAQSWTISVTTPADAVIGHYSLLLQVSGRKQLLLGQFTLLFNPWNREDAVFLKNEAQRMEYLLNQNGLIYLGTADCIQAESWDFGQFEGDVIDLSLRLLSKDKQVEKWSQPVHVARVLGALLHFLKEQRVLPTPQTQATQEGALLNKRRGSVPILRQWLTGRGRPVYDGQAWVLAAVACTVLRCLGIPARVVTTFASAQGTGGRLLIDEYYNEEGLQNGEGQRGRIWIFQTSTECWMTRPALPQGYDGWQILHPSAPNGGGVLGSCDLVPVRAVKEGTLGLTPAVSDLFAAINASCVVWKCCEDGTLELTDSNTKYVGNNISTKGVGSDRCEDITQNYKYPEGSLQEKEVLERVEKEKMEREKDNGIRPPSLETASPLYLLLKAPSSLPLRGDAQISVTLVNHSEQEKAVQLAIGVQAVHYNGVLAAKLWRKKLHLTLSANLEKIITIGLFFSNFERNPPENTFLRLTAMATHSESNLSCFAQEDIAICRPHLAIKMPEKAEQYQPLTASVSLQNSLDAPMEDCVISILGRGLIHRERSYRFRSVWPENTMCAKFQFTPTHVGLQRLTVEVDCNMFQNLTNYKSVTVVAPELSA

SEQ ID NO: 841017 - protein, 194 aa, Homo sapiens
MGQALGIKSCDFQAARNNEEHHTKALSSRRLFVRRGQPFTIILYFRAPVRAFLPALKKVALTAQTGEQPSKINRTQATFPISSLGDRKWWSAVVEERDAQSWTISVTTPADAVIGHYSLLLQVSGRKQLLLGQFTLLFNPWNRGKFGPGPAWAAWRLQTLELGCSSGREHLHQAPVAALSKDSTNTQSVPGLSP

SEQ ID NO: 841018 - protein, 68 aa, Homo sapiens
TEDRKRKLEELLNSVGQKVSELKEKFQSRTSEAAKLEAEVSKAQETIKAAEVLINQLDREHKRWNAQV

SEQ ID NO: 841019 - protein, 298 aa, Homo sapiens
MERLTLPLGGAAAVDEYLEYRRIVGEDDGGKLFTPEEYEEYKRKVLPLRLQNRLFVSWRSPTGMDCKLVGPETLCFCTHRYKQHKTDLEAIPQQCPIDLPCQVTGCQCRAYLYVPLNGSQPIRCRCKHFADQHSAAPGFTCNTCSKCSGFHSCFTCACGQPAYAHDTVVETKQERLAQEKPVGQDIPYAAMGGLTGFSSLAEGYMRLDDSGIGVPSVEFLESPITAVDSPFLKAFQASSSSSPETLTDVGTSSQVSSLRRPEEDDMAFFERRYQERMKMEKAAKWKGKAPLPSATKPS

SEQ ID NO: 841020 - protein, 262 aa, Homo sapiens
MERLTLPLGGAAAVDEYLEYRRIVGEDDGGKLFTPEEYEEYKRKVLPLRLQNRLFVSWRSPTGMDCKLVGPETLCFCTHRYKQHKTDLEAIPQQCPIDLPCQVTGCQCRAYLYVPLNGSQPIRCRCKHFADQHSAAPGFTCNTCSKCSGFHSCFTCACGQPAYAHDTVVETKQERLAQEKPVGQDIPYAAMGGLTGFSSLAEGYMRLDDSGIVGTSSQVSSLRRPEEDDMAFFERRYQERMKMEKAAKWKGKAPLPSATKPS

SEQ ID NO: 841021 - protein, 262 aa, Homo sapiens; identical to SEQ ID NO: 841020

SEQ ID NO: 841022 - protein, 204 aa, Homo sapiens
MERLTLPLGGAAAVDEYLEYRRYKQHKTDLEAIPQQCPIDLPCQVTGCQCRAYLYVPLNGSQPIRCRCKHFADQHSAAPGFTCNTCSKCSGFHSCFTCACGQPAYAHDTVVETKQERLAQEKPVGQDIPYAAMGGLTGFSSLAEGYMRLDDSGIVGTSSQVSSLRRPEEDDMAFFERRYQERMKMEKAAKWKGKAPLPSATKPS

SEQ ID NO: 841023 - protein, 262 aa, Homo sapiens; identical to SEQ ID NO: 841020

SEQ ID NO: 841024 - protein, 125 aa, Homo sapiens
PNTGLNFNMGFRYLESNIQYIALPKDAEILIPSTVTGTLFGGRVVWKNQTAFPLLSHHKCQHSCDSCDERAEDFSPPASRHSVLQRRQLGVPQSSSIPAWSICRQHKIPQGEGSVPQDSHHFFFF

SEQ ID NO: 841025 - protein, 147 aa, Homo sapiens
MVWIRCCSVPESPSIPLTSFIAWHRCIHSRLSSSTCVLCWQEVCLGKPGSLVGDPSDLPCSLVAPGSRARHSLQCLPWLYTVNQTLVCRGFGEHGGGNVTISGLPGCGLMPQGQDQSLSCVCRSGMVSVWSSWCCPFLSTSVTTHLV

SEQ ID NO: 841026 - protein, 428 aa, Homo sapiens
MYSSPLCLTQDEFHPFIEALLPHVRAFAYTWFNLQARKRKYFKKHEKRMSKDEERAVKDELLGEKPEVKQKWASRLLAKLRKDIRPECREDFVLSITGKKAPGCVLSNPDQKGKMRRIDCLRQADKVWRLDLVMVILFKGIPLESTDGERLVKAAQCGHPVLCVQPHHIGVAVKELDLYLAYFVRERDAEQSGSPRTGMGSDQEDSKPITLDTTDFQESFVTSGVFSVTELIQVSRTPVVTGTGPNFSLGELQGHLAYDLNPASTGLRRTLPSTSSSGSKRHKSGSMEEDVDTSPGGDYYTSPSSPTSSSRNWTEDMEGGISSPVKKTEMDKSPFNSPSPQDSPRLSSFTQHHRPVIAVHSGIARSPHPSSALHFPTTSILPQTASTYFPHTAIRYPPHLNPQDPLKDLVSLACDPASQQPGPSWYLG

SEQ ID NO: 841027 - protein, 428 aa, Homo sapiens; identical to SEQ ID NO: 841026

SEQ ID NO: 841028 - protein, 428 aa, Homo sapiens; identical to SEQ ID NO: 841026

SEQ ID NO: 841029 - protein, 428 aa, Homo sapiens; identical to SEQ ID NO: 841026

SEQ ID NO: 841030 - protein, 428 aa, Homo sapiens; identical to SEQ ID NO: 841026

SEQ ID NO: 841031 - protein, 530 aa, Homo sapiens
LAASSRRLRPPPRRGPSALAPAPASPPRSSAMDEFHPFIEALLPHVRAFAYTWFNLQARKRKYFKKHEKRMSKDEERAVKDELLGEKPEVKQKWASRLLAKLRKDIRPECREDFVLSITGKKAPGCVLSNPDQKGKMRRIDCLRQADKVWRLDLVMVILFKGIPLESTDGERLVKAAQCGHPVLCVQPHHIGVAVKELDLYLAYFVRERDAEQSGSPRTGMGSDQEDSKPITLDTTDFQESFVTSGVFSVTELIQVSRTPVVTGTGPNFSLGELQGHLAYDLNPASTGLRRTLPSTSSSGSKRHKSGSMEEDVDTSPGGDYYTSPSSPTSSSRNWTEDMEGGISSPVKKTEMDKSPFNSPSPQDSPRLSSFTQHHRPVIAVHSGIARSPHPSSALHFPTTSILPQTASTYFPHTAIRYPPHLNPQDPLKDLVSLACDPASQQPGPLNGSGQLKMPSHCLSAQMLAPPPPGLPRLALPPATKPATTSEGGATSPTSPSYSPPDTSPANRSFVGLGPRDPAGIYQAQSWYLG

SEQ ID NO: 841032 - protein, 321 aa, Homo sapiens
AGYSRGPRTGRLDLVMVILFKGIPLESTDGERLVKAAQCGHPVLCVQPHHIGVAVKELDLYLAYFVRERDAEQSGSPRTGMGSDQEDSKPITLDTTDFQESFVTSGVFSVTELIQVSRTPVVTGTGPNFSLGELQGHLAYDLNPASTGLRRTLPSTSSSGSKRHKSGSMEEDVDTSPGGDYYTSPSSPTSSSRNWTEDMEGGISSPVKKTEMDKSPFNSPSPQDSPRLSSFTQHHRPVIAVHSGIARSPHPSSALHFPTTSILPQTASTYFPHTAIRYPPHLNPQDPLKDLVSLACDPASQQPGPPTLRPTRPLQTVPLWD

SEQ ID NO: 841033 - protein, 327 aa, Homo sapiens
ASELTLEDKPDRGGVWRLDLVMVILFKGIPLESTDGERLVKAAQCGHPVLCVQPHHIGVAVKELDLYLAYFVRERDAEQSGSPRTGMGSDQEDSKPITLDTTDFQESFVTSGVFSVTELIQVSRTPVVTGTGPNFSLGELQGHLAYDLNPASTGLRRTLPSTSSSGSKRHKSGSMEEDVDTSPGGDYYTSPSSPTSSSRNWTEDMEGGISSPVKKTEMDKSPFNSPSPQDSPRLSSFTQHHRPVIAVHSGIARSPHPSSALHFPTTSILPQTASTYFPHTAIRYPPHLNPQDPLKDLVSLACDPASQQPGPPTLRPTRPLQTVPLWD

SEQ ID NO: 841034 - protein, 365 aa, Homo sapiens
MYSSPLCLTQDEFHPFIEALLPHVRAFAYTWFNLQARKRKYFKKHEKRMSKDEERAVKDELLGEKPEVKQKWASRLLAKLRKDIRPECREDFVLSITGKKAPGCVLSNPDQKGKMRRIDCLRQADKVWRLDLVMVILFKGIPLESTDGERLVKAAQCGHPVLCVQPHHIGVAVKELDLYLAYFVRERDAEQSGSPRTGMGSDQEDSKPITLDTTDFQESFVTSGVFSVTELIQVSRTPVVTGTGPNFSLGELQGHLAYDLNPASTGLRRTLPSTSSSGSKRHKSGSMEEDVDTSPGGDYYTSPSSPTSSSRNWTEDMEGGISSPVKKTEMDKSPFNSPSPANRSFVGLGPRDPAGIYQAQSWYLG

SEQ ID NO: 841035 - protein, 403 aa, Homo sapiens
MYSSPLCLTQDEFHPFIEALLPHVRAFAYTWFNLQARKRKYFKKHEKRMSKDEERAVKDELLGEKPEVKQKWASRLLAKLRKDIRPECREDFVLSITGKKAPGCVLSNPDQKGKMRRIDCLRQADKVWRLDLVMVILFKGIPLESTDGERLVKAAQCGHPVLCVQPHHIGVAVKELDLYLAYFVRERDAEQSGSPRTGMGSDQEDSKPITLDTTDFQESFVTSGVFSVTELIQVSRTPVVTGTGPNFSLGELQGHLAYDLNPASTGLRRTLPSTSSSGSKRHKSGSMEEDVDTSPGGDYYTSPSSPTSSSRNWTEDMEGGISSPVKKTEMDKSPFNSPSPQDSPRLSSFTQHHRPVIAVHSGIARSPHPSSALHFPTTSILPQTASTYFPHTAIRFCDPGTSC

SEQ ID NO: 841036 - protein, 159 aa, Homo sapiens
ASPLPSPIRSKRHKSGSMEEDVDTSPGGDYYTSPSSPTSSSRNWTEDMEGGISSPVKKTEMDKSPFNSPSPQDSPRLSSFTQHHRPVIAVHSGIARSPHPSSALHFPTTSILPQTASTYFPHTAIRYPPHLNPQDPLKDLVSLACDPASQQPGPSWYLG

SEQ ID NO: 841037 - protein, 128 aa, Homo sapiens
ELAVFHRDVHMLLVDLELLLGIAKGLGKDNQRSFQALYTANQMVNVCDPAQPETFPVAQALASRFFGQHGGESQHTIHATGHCHIDTGRTATWTAYSPPDTSPANRSFVGLGPRDPAGIYQAQSWYLG

SEQ ID NO: 841038 - protein, 103 aa, Homo sapiens
MQLAPAPPPPTPGIGGPPTSPGSTPKGRDPHCTHCKKCTFRGRGWGSPDTQSSPSWGCPSGAPPSAPGGGRWRGATRTNSLPNFAWCLVKDSCDLAPEVSWRR

SEQ ID NO: 841039 - protein, 459 aa, Homo sapiens
PEHYSALFSGTMTILFSAPAPAGPAPPAAPGMYSSPLCLTQDEFHPFIEALLPHVRAFAYTWFNLQARKRKYFKKHEKRMSKDEERAVKDELLGEKPEVKQKWASRLLAKLRKDIRPECREDFVLSITGKKAPGCVLSNPDQKGKMRRIDCLRQADKVWRLDLVMVILFKGIPLESTDGERLVKAAQCGHPVLCVQPHHIGVAVKELDLYLAYFVRERDAEQSGSPRTGMGSDQEDSKPITLDTTDFQESFVTSGVFSVTELIQVSRTPVVTGTGPNFSLGELQGHLAYDLNPASTGLRRTLPSTSSSGSKRHKSGSMEEDVDTSPGGDYYTSPSSPTSSSRNWTEDMEGGISSPVKKTEMDKSPFNSPSPQDSPRLSSFTQHHRPVIAVHSGIARSPHPSSALHFPTTSILPQTASTYFPHTAIRYPPHLNPQDPLKDLVSLACDPASQQPGPSWYLG

SEQ ID NO: 841040 - protein, 428 aa, Homo sapiens; identical to SEQ ID NO: 841026

SEQ ID NO: 841041 - protein, 428 aa, Homo sapiens; identical to SEQ ID NO: 841026

SEQ ID NO: 841042 - protein, 439 aa, Homo sapiens
MYSSPLCLTQDEFHPFIEALLPHVRAFAYTWFNLQARKRKYFKKHEKRMSKDEERAVKDELLGEKPEVKQKWASRLLAKLRKDIRPECREDFVLSITGKKAPGCVLSNPDQKGKMRRIDCLRQADKVWRLDLVMVILFKGIPLESTDGERLVKAAQCGHPVLCVQPHHIGVAVKELDLYLAYFVRERDAEQSGSPRTGMGSDQEDSKPITLDTTDFQESFVTSGVFSVTELIQVSRTPVVTGTGPNFSLGELQGHLAYDLNPASTGLRRTLPSTSSSGSKRHKSGSMEEDVDTSPGGDYYTSPSSPTSSSRNWTEDMEGGISSPVKKTEMDKSPFNSPSPQDSPRLSSFTQHHRPVIAVHSGIARSPHPSSALHFPTTSILPQTASTYFPHTAIRYPPHLNPQDPLKDLVSLACDPASQQPGPPTLRPTRPLQTVPLWD

SEQ ID NO: 841043 - protein, 511 aa, Homo sapiens
MYSSPLCLTQDEFHPFIEALLPHVRAFAYTWFNLQARKRKYFKKHEKRMSKDEERAVKDELLGEKPEVKQKWASRLLAKLRKDIRPECREDFVLSITGKKAPGCVLSNPDQKGKMRRIDCLRQADKVWRLDLVMVILFKGIPLESTDGERLVKAAQCGHPVLCVQPHHIGVAVKELDLYLAYFVRERDAEQSGSPRTGMGSDQEDSKPITLDTTDFQESFVTSGVFSVTELIQVSRTPVVTGTGPNFSLGELQGHLAYDLNPASTGLRRTLPSTSSSGSKRHKSGSMEEDVDTSPGGDYYTSPSSPTSSSRNWTEDMEGGISSPVKKTEMDKSPFNSPSPQDSPRLSSFTQHHRPVIAVHSGIARSPHPSSALHFPTTSILPQTASTYFPHTAIRYPPHLNPQDPLKDLVSLACDPASQQPGPLNGSGQLKMPSHCLSAQMLAPPPPGLPRLALPPATKPATTSEGGATSPTSPFLVSGIAKVFFPRPFSIVPGIPGGSTAGPRPTFSVEN

SEQ ID NO: 841044 - protein, 439 aa, Homo sapiens; identical to SEQ ID NO: 841042

SEQ ID NO: 841045 - protein, 538 aa, Homo sapiens
MYSSPLCLTQDEFHPFIEALLPHVRAFAYTWFNLQARKRKYFKKHEKRMSKDEERAVKDELLGEKPEVKQKWASRLLAKLRKDIRPECREDFVLSITGKKAPGCVLSNPDQKGKMRRIDCLRQADKVWRLDLVMVILFKGIPLESTDGERLVKAAQCGHPVLCVQPHHIGVAVKELDLYLAYFVRERDAEQSGSPRTGMGSDQEDSKPITLDTTDFQESFVTSGVFSVTELIQVSRTPVVTGTGPNFSLGELQGHLAYDLNPASTGLRRTLPSTSSSGSKRHKSGSMEEDVDTSPGGDYYTSPSSPTSSSRNWTEDMEGGISSPVKKTEMDKSPFNSPSPQDSPRLSSFTQHHRPVIAVHSGIARSPHPSSALHFPTTSILPQTASTYFPHTAIRYPPHLNPQDPLKDLVSLACDPASQQPGPLNGSGQLKMPSHCLSAQMLAPPPPGLPRLALPPATKPATTSEGGATSPTSPSYSPPDTSPANRSFVGLGPRDPAGIYQAQAPQNQPEEEAGMEAASPEFRGDPCAMGGGNPGSGA

SEQ ID NO: 841046 - protein, 338 aa, Homo sapiens
  misc_feature (335)..(335): Xaa can be any naturally occurring amino acid
MYSSPLCLTQDEFHPFIEALLPHVRAFAYTWFNLQARKRKYFKKHEKRMSKDEERAVKDELLGEKPEVKQKWASRLLAKLRKDIRPECREDFVLSITGKKAPGCVLSNPDQKGKMRRIDCLRQADKVWRLDLVMVILFKGIPLESTDGERLVKAAQCGHPVLCVQPHHIGVAVKELDLYLAYFVRERDAEQSGSPRTGMGSDQEDSKPITLDTTDFQESFVTSGVFSVTELIQVSRTPVVTGTGPNFSLGELQGHLAYDLNPASTGLRRTLPSTSSSGSKRHKSGSMEEDVDTSPGGDYYTSPSSPTSSSRNWTEDMEGVETFLRMVQCRSVEGXCGF

SEQ ID NO: 841047 - protein, 116 aa, Homo sapiens
KTRLSSQTSLRSLANPLAPKEKDPGPSPITPKRGSPSSGLEPLVPPSVCPRGPLPRWPLGIKAWAALREGGRGRGWSGCAIGVSGSFSARVGVVEWGREASRAPEGSGRDENQLFT

SEQ ID NO: 841048 - protein, 104 aa, Homo sapiens
MVIMLIGNKSDLESRRDVKREEGEAFAREHGLIFMETSAKTACNVEEAFINTAKEIYRKIQQGLFDVHNEFPLRIRVKDILFEHLQLPRSSWPLVDRSSASEFH

SEQ ID NO: 841049 - protein, 225 aa, Homo sapiens
LVREVHTLEGVPGLRDSGSVLSLSGVGKSCLLLQFTDKRFQPVHDLTIGVEFGARMVNIDGKQIKLQIWDTAGQESFRSITRSYYRGAAGALLVYDITRRETFNHLTSWLEDARQHSSSNMVIMLIGNKSDLESRRDVKREEGEAFAREHGLIFMETSAKTACNVEEAFINTAKEIYRKIQQGLFDVHNEANGIKIGPQQSISTSVGPSASQRNSRDIGSNSGCC

SEQ ID NO: 841050 - protein, 136 aa, Homo sapiens
MEFTLVTQARAQWHDLVLLQPPPPGFKRFSCLSLPSSWDYSDLESRRDVKREEGEAFAREHGLIFMETSAKTACNVEEAFINTAKEIYRKIQQGLFDVHNEANGIKIGPQQSISTSVGPSASQRNSRDIGSNSGCC

SEQ ID NO: 841051 - protein, 174 aa, Homo sapiens
MTYAYLFKYIIIGDTGVGKSCLLLQFTDKRFQPVHDLTIGVEFGARMVNIDGKQIKLQIWDTAGQESFRSITRSYYRGAAGALLVYDITRRETFNHLTSWLEDARQHSSSNMVIMLIGNKSDLESRRDVKREEGEAFAREHGLIFMETSAKTACNVEELPKCWITGVSHRAWPK

SEQ ID NO: 841052 - protein, 216 aa, Homo sapiens
MTYAYLFKYIIIGDTGVGKSCLLLQFTDKRFQPVHDLTIGVEFGARMVNIDGKQIKLQIWDTAGQESFRSITRSYYRGAAGALLVYDITRRETFNHLTSWLEDARQHSSSNMVIMLIGNKSDLESRRDVKREEGEAFAREHGLIFMETSAKTACNVEEAFINTAKEIYRKIQQGLFDVHNEANGIKIGPQQSISTSVGPSASQRNSRDIGSNSGCC

SEQ ID NO: 841053 - protein, 216 aa, Homo sapiens; identical to SEQ ID NO: 841052

SEQ ID NO: 841054 - protein, 216 aa, Homo sapiens; identical to SEQ ID NO: 841052

SEQ ID NO: 841055 - protein, 138 aa, Homo sapiens [sequence omitted]

SEQ ID NO: 841056 - protein, 103 aa, Homo sapiens
LVREVHTLEGVPGLRDSGSVLSLSGVGKSCLLLQFTDKRFQPVHDLTIGVEFGARMVNIDGKQIKLQIWDTAGQESFRSITRSYYRGAAPKVLDYRCEPPCLA

SEQ ID NO: 841057 - protein, 216 aa, Homo sapiens; identical to SEQ ID NO: 841052

SEQ ID NO: 841058 - protein, 216 aa, Homo sapiens; identical to SEQ ID NO: 841052

SEQ ID NO: 841059 - protein, 112 aa, Homo sapiens
PTSASGETSGCFYLWRKMKQVQALTHGKSRSKRENVCRGRCHTLLNEQISRELKTRVHLLPRGWPKPFMGGSAPMIQTPPTRPHVKRWGLPFNMRFRWGQICKLYQLVNMRS

SEQ ID NO: 841060 - protein, 52 aa, Homo sapiens
ISFEILSFLWRHHVSKAWSSVRKDLVEICSLEGATDRCYQHISGKWVQHRLQ

SEQ ID NO: 841061 - protein, 1209 aa, Homo sapiens
MFLMNASPVVALQSKWEAFGPPGSCRFPRCFSEADEGVESASVSARVQMLISTLQRDGAARGTSDERAAQRGHRAEGCHDARPAAKPTVHKEPPALAVCGLVADFDPMGEEETTDFGPLVLDSDSDDSVDRDIEEAIQEYLKAKSGAAQPGAGGAQPGAAQPSRAAGGGSRCKPEPAHGSAPTALCPPKLVPGSGGGPGSQVGSSKDQGSASPVSVSSDDSFEQSIRAEIEQFLNEKRQHETQKCDGSVEKKPDTNENSAKSLLKSHQEPPTKVVHRQGLLGVQKEFAFRKPPRLAKMNVQPRSLRSKVTTTQENEGSTKPATPCRPSEAAQNKGGIKRSASAARRGKRVMSAAQASEASDSSSDDGIEEAIQLYQLQKTRKEADGDLPQRVQLREERAPDPPAHSTSSATKSALPETHRKTPSKKKLVATKTMDPGPGGLDTDHAPKLLKETKAPPPASPASRSEFVERSSCRADTSAELMCAEAILDISKTILPAPVEGSDGSLSASPLFYSPNVPSRSDGDSSSVDSDDSIEQEIRTFLALKAQSGSLLARGESCPQAAQGPLLPPGLNSQTGGHKTPLSKTPDPLLGCKRKRRGGGHVRPSTPKKMQEVVKDGSQDADHSQGRAEPGHERRDLPIQGKASEALGGEGTARGPGDTRMSQGQGKTDEARRLDEKESSEDKSSSLDSDEDLDTAIKDLLRSKRKLKKRCREPRAACRKKVRFSTAQTHFLEQLGGLRRDWKDRGPPVLKSCLSKSKRDSGEGPGKKPPSVFGSTAERMRQEGAASQDAALAFRVRRPASASASEGNPFPRESQGPAPSPGSLSDDSSSVDSNDSIELEIRKFLAEKAKESVSSSEVQAEGPTALGTGGPARPEVLCRKEPAPPPGVCTRSQRARGVPHLAEGLRGTESAGAQGTAGLFSQGGKGLPAAPARGDPVPPRSTSGGVSAKGLSVSRRNVYVHKDQSPRGAEPAAKSAFGQLPSCATAGTEAGGARGTFHMGCGSPSFLTPSPGAERDAGAQADRTPPWSDFAHQSRLPSPWVLRSEGRDAVWRGGVGSERDKGSEGPARGLPSLPLAGFSPLLSTQLFHFGKGVSWGGRQAGLFSPHLGLPLQGPSFSAFREAQAGPSPVFGSPHLLAKKDGGPWPTRKAQAGLSLHDRRSSGSEESILDLRYRRRVNRDDQEQDALGSDASDFSDTSTEDSGGSSVVKV

SEQ ID NO: 841062 - protein, 1209 aa, Homo sapiens; identical to SEQ ID NO: 841061

SEQ ID NO: 841063 - protein, 76 aa, Homo sapiens
RPPQKKKPRPPPVLRLEETSSASLDLPKREKEQQEATEHIDEVQNEIDRLNELREEILKAEQKINSVSHFFRRGEN

SEQ ID NO: 841064 - protein, 44 aa, Homo sapiens
GKPHCSRNPVLVRGIGRYCRSAMYSRKAMYKRKYSAAKSKVEKK

SEQ ID NO: 841065 - protein, 497 aa, Homo sapiens
MVPVAYNDKIVAFLRQPNIFEILQERQPDLTRNHSLREKIQFIRTEGTPGLVRLSSDADLVMLLSLFEEEIMSYVPPHALLHPSYCQSPRGSPVSSPQNSPGTQRANARAPAPYKRDFEAKLRNFYRKLETKGYGQGPGKLKLIIRRDHLLEDAFNQIMGYSRKDLQRNKLYVTFVGEEGLDYSGPSREFFFLVSRELFNPYYGLFEYSANDTYTVQISPMSAFVDNHHEWFRFSGRILGLALIHQYLLDAFFTRPFYKALLRILCDLSDLEYLDEEFHQSLQWMKDNDIHDILDLTFTVNEEVFGQITERELKPGGANIPVTEKNKKEYIERMVKWRIERGVVQQTESLVRGFYEVVDARLVSVFDARELELVIAGTAEIDLSDWRNNTEYRGGYHDNHIVIRWFWAAVERFNNEQRLRLLQFVTGTSSIPYEGFASLRGSNGPRRFCVEKWGKITALPRAHTCFNRLDLPPYPSFSMLYEKLLTAVEETSTFGLE

SEQ ID NO: 841066 - protein, 180 aa, Homo sapiens
MVPVAYNDKIVAFLRQPNIFEILQERQPDLTRNHSLREKIQFIRTEGTPGLVRLSSDADLVMLLSLFEEEIMSYVPPHALLHPSYCQSPRGSPVSSPQNSPGTQRANARAPAPYKRDFEAKLRNFYRKLETKGYGQGPGKLKLIIRRDHLLEDAFNQIMGYSRKDLQRNKLYVTFVGEEG

SEQ ID NO: 841067 - protein, 1572 aa, Homo sapiens
MASSAREHLLFVRRRNPQMRYTLSPENLQSLAAQSSMPENMTLQRANSDTDLVTSESRSSLTASMYEYTLGQAQNLIIFWDIKEEVDPSDWIGLYHIDENSPANFWDSKNRGVTGTQKGQIVWRIEPGPYFMEPEIKICFKYYHGISGALRATTPCITVKNPAVMMGAEGMEGGASGNLHSRKLVSFTLSDLRAVGLKKGMFFNPDPYLKMSIQPGKKSSFPTCAHHGQERRSTIISNTTNPIWHREKYSFFALLTDVLEIEIKDKFAKSRPIIKRFLGKLTIPVQRLLERQAIGDQMLSYNLGRRLPADHVSGYLQFKVEVTSSVHEDASPEAVGTILGVNSVNGDLGSPSDDEDMPGSHHDSQVCSNGPVSEDSAADGTPKHSFRTSSTLEIDTEELTSTSSRTSPPRGRQDSLNDYLDAIEHNGHSRPGTATCSERSMGASPKLRSSFPTDTRLNAMLHIDSDEEDHEFQQDLGYPSSLEEEGGLIMFSRASRADDGSLTSQTKLEDNPVENEEASTHEAASFEDKPENLPELAESSLPAGPAPEEGEGGPEPQPSADQGSAELCGSQEVDQPTSGADTGTSDASGGSRRAVSETESLDQGSEPSQVSSETEPSDPARTESVSEASTRPEGESDLECADSSCNESVTTQLSSVDTRCSSLESARFPETPAFSSQEEEDGACAAEPTSSGPAEGSQESVCTAGSLPVVQVPSGEDEGPGAESATVPDQEELGEVWQRRGSLEGAAAAAESPPQEEGSAGEAQGTCEGATAQEEGATGGSQANGHQPLRSLPSVRQDVSRYQRVDEALPPNWEARIDSHGRIFYVDHVNRTTTWQRPTAPPAPQVLQRSNSIQQMEQLNRRYQSIRRTMTNERPEENTNAIDGAGEEADFHQASADFRRENILPHSTSRSRITLLLQSPPVKFLISPEFFTVLHSNPSAYRMFTNNTCLKHMITKVRRDTHHFERYQHNRDLVGFLNMFANKQLELPRGWEMKHDHQGKAFFVDHNSRTTTFIDPRLPLQSSRPTSALVHRQHLTRQRSHSAGEVGEDSRHAGPPVLPRPSSTFNTVSRPQYQDMVPVAYNDKIVAFLRQPNIFEILQERQPDLTRNHSLREKIQFIRTEGTPGLVRLSSDADLVMLLSLFEEEIMSYVPPHALLHPSYCQSPRGSPVSSPQNSPGTQRANARAPAPYKRDFEAKLRNFYRKLETKGYGQGPGKLKLIIRRDHLLEDAFNQIMGYSRKDLQRNKLYVTFVGEEGLDYSGPSREFFFLVSRELFNPYYGLFEYSANDTYTVQISPMSAFVDNHHEWFRFSGRILGLALIHQYLLDAFFTRPFYKALLRILCDLSDLEYLDEEFHQSLQWMKDNDIHDILDLTFTVNEEVFGQITERELKPGGANIPVTEKNKKEYIERMVKWRIERGVVQQTESLVRGFYEVVDARLVSVFDARELELVIAGTAEIDLSDWRNNTEYRGGYHDNHIVIRWFWAAVERFNNEQRLRLLQFVTGTSSIPYEGFASLRGSNGPRRFCVEKWGKITALPRAHTCFNRLDLPPYPSFSMLYEKLLTAVEETSTFGLE

SEQ ID NO: 841068 - protein, 108 aa, Homo sapiens
MIGLIGYHDNHIVIRWFWAAVERFNNEQRLRLLQFVTGTSSIPYEGFASLRGSNGPRRFCVEKWGKITALPRAHTCFNRLDLPPYPSFSMLYEKLLTAVEETSTFGLE

SEQ ID NO: 841069 - protein, 85 aa, Homo sapiens
LRASNGTPTLDTHFSRRMRTPRRTAVPPPRLHSPRRPPALHHPRAPPRHGPTPLFYPPPRTGLSPPKGNWAGPPPRWGIYKLLWP

SEQ ID NO: 841070 - protein, 85 aa, Homo sapiens; identical to SEQ ID NO: 841069

SEQ ID NO: 841071 - protein, 85 aa, Homo sapiens; identical to SEQ ID NO: 841069

SEQ ID NO: 841072 - protein, 111 aa, Homo sapiens
MDNAGKEREAVQLMAEAEKRVKASHSFLRGLFGGNTRIEEACEMYTRAANMFKMAKNWSAAGNAFCQAAKLHMQLQSKHDSATSFVDAGNAYKKADPQGKTARHVACYLCV

SEQ ID NO: 841073 - protein, 182 aa, Homo sapiens
MDNAGKEREAVQLMAEAEKRVKASHSFLRGLFGGKHKNRKKACGKLLLPKKAGKIIVPRMGLQKFGKVAGKGTTANFLVPRAKAKGFQQLPRLSRKAKTIWKFLAYQGFLVGIGLGKLALRKKGRNSPKKGALFQIGFKLGKANSEQFFTTMNIGRKGFTIWARPPSVQPTFIPLIGPEDFP

SEQ ID NO: 841074 - protein, 298 aa, Homo sapiens
MDNAGKEREAVQLMAEAEKRVKASHSFLRGLFGGNTRIEEACEMYTRAANMFKMAKNWSAAGNAFCQAAKLHMQLQSKHDSATSFVDAGNAYKKADPQEAINCLNAAIDIYTDMGRFTIAAKHHITIAEIYETELVDIEKAIAHYEQSADYYKGEESNSSANKCLLKVAAYAAQLEQYQKAIEIYEQVGANTMDNPLLKYSAKDYFFKAALCHFIVDELNAKLALEKYEEMFPAFTDSRECKLLKKLLEAHEEQNSEAYTEAVKEFDSISRLDQWLTTMLLRIKKSIQGDGEGDGDLK

SEQ ID NO: 841075 - protein, 298 aa, Homo sapiens; identical to SEQ ID NO: 841074

SEQ ID NO: 841076 - protein, 298 aa, Homo sapiens; identical to SEQ ID NO: 841074

SEQ ID NO: 841077 - protein, 298 aa, Homo sapiens; identical to SEQ ID NO: 841074

SEQ ID NO: 841078 - protein, 131 aa, Homo sapiens
MTLLPALWMLEMLTKRQIPKGRFTIAAKHHITIAEIYETELVDIEKAIAHYEQSADYYKGEESNSSANKCLLKVAAYAAQLEQYQKAIEIYEQVGANTMDNPLLKYSAKDYFFKAALCHFIVDELNAKLAP

SEQ ID NO: 841079 - protein, 298 aa, Homo sapiens; identical to SEQ ID NO: 841074

SEQ ID NO: 841080 - protein, 273 aa, Homo sapiens
MDNAGKEREAVQLMAEAEKRVKASHSFLRGLFGGNTRIEEACEMYTRAANMFKMAKNWSAAGNAFCQAAKLHMQLQSKHDSATSFVDAGNAYKKADPQEAINCLNAAIDIYTDMGRFTIAAKHHITIAEIYETELVDIEKAIAHYEQSADYYKGEESNSSANKCLLKVAAYAAQLEQYQKAIEIYEQVGANTMDNPLLKYSAKDYFFKAALCHFIVDELNAKLALEKYEEMFPAFTDSRECKLLKKLLEAHEEQNSEAYTEAVSYAFGTWYII

SEQ ID NO: 841081 - protein, 294 aa, Homo sapiens
RGTEKSLYAISKPKEACLLGDAQQISQANLGVIEEANLRLSLVQASYWHLLLSTNLHTMVFAFWKVFLILSCLAGQVSVVQVTIPDGFVNVTVGSNVTLICIYTTTVASREQLSIQWSFFHKKEMEPISIYFSQGGQAVAIGQFKDRITGSNDPGNASITISHMQPADSGIYICDVNNPPDFLGQNQGILNVSVLVKPSKPLCSVQGRPETGHTISLSCLSALGTPSPVYYWHKLEGRDIVPVKENFNPTTGILVIGNLTNFEQGYYQCTAINRLGNSSCEIDLTSSRELTIQL

SEQ ID NO: 841082 - protein, 140 aa, Homo sapiens
MQNDVTGHVDVTHINVTQTRRWHHTDGDDVTHRHSDHTHHDDDTYRLWHLHHKHACPFTHTFYPILTKCHVPPGSSWYFPGEGRDIVPVKENFNPTTGILVIGNLTNFEQGYYQCTAINRLGNSSCEIDLTSSRELTIQL

SEQ ID NO: 841083 - protein, 299 aa, Homo sapiens
MLSAGLGLLMLVAVVEFLIGLIGNGSLVVWSFREWIRKFNWSSYNLIILGLAGCRFLLQWLIILDLSLFPLFQSSRWLRYLSIFWVLVSQASLWFATFLSVFYCKKITTFDRPAYLWLKQRAYNLSLWCLLGYFIINLLLTVQIGLTFYHPPQGNSSIRYPFESWQYLYAFQLNSGSYLPLVVFLVSSGMLIVSLYTHHKKMKVHSAGRRDVRAKAHITALKSLGCFLLLHLVYIMASPFSITSKTYPPDLTSVFIWETLMAAYPSLHSLILIMGIPRVKQTCQKILWKTVCARRCWGP

SEQ ID NO: 841084 - protein, 645 aa, Homo sapiens
QARPGGSSFCSERGEPGRAGARAGLGPLEGSGRTVSGAGPVGRGAGAAMAEGSAVSDPQHAARLLRALSSFREESRFCDAHLVLDGEEIPVQKNILAAASPYIRTKLNYNPPKDDGSTYKIELEGISVMVMREILDYIFSGQIRLNEDTIQDVVQAADLLLLTDLKTLCCEFLEGCIAAENCIGIRDFALHYCLHHVHYLATEYLETHFRDVSSTEEFLELSPQKLKEVISLEKLNVGNERYVFEAVIRWIAHDTEIRKVHMKDVMSALWVSGLDSSYLREQMLNEPLVREIVKECSNIPLSQPQQGEAMLANFKPRGYSECIVTVGGEERVSRKPTAAMRCMCPLYDPNRQLWIELAPLSMPRINHGVLSAEGFLFVFGGQDENKQTLSSGEKYDPDANTWTALPPMNEARHNFGIVEIDGMLYILGGEDGEKELISMECYDIYSKTWTKQPDLTMVRKIGCYAAMKKKIYAMGGGSYGKLFESVECYDPRTQQWTAICPLKERRFGAVACGVAMELYVFGGVRSREDAQGSEMVTCKSEFYHDEFKRWIYLNDQNLCIPASSSFVYGAVPIGASIYVIGDLDTGTNYDYVREFKRSTGTWHHTKPLLPSDLRRTGCAALRIANCKLFRLQLQQGLFRIRVHSP

SEQ ID NO: 841085 - protein, 576 aa, Homo sapiens
QARPGGSSFCSERGEPGRAGARAGLGPLEGSGRTVSGAGPVGRGAGAAMAEGSAVSDPQHAARLLRALSSFREESRFCDAHLVLDGEEIPVQKNILAAASPYIRTKLNYNPPKDDGSTYKIELEGISVMVMREILDYIFSGQIRLNEDTIQDVVQAADLLLLTDLKTLCCEFLEGCIAAENCIGIRDFALHYCLHHVHYLATEYLETHFRDVSSTEEFLELSPQKLKEVISLEKLNVGNERYVFEAVIRWIAHDTEIRKVHMKDVMSALWVSGLDSSYLREQMLNEPLVREIVKECSNIPLSQPQQGEAMLANFKPRGYSECIVTVGGEERVSRKPTAAMRCMCPLYDPNRQLWIELAPLSMPRINHGVLSAEGFLFVFGGQDENKQTLSSGEKYDPDANTWTALPPMNEARHNFGIVEIDGMLYILGGEDGEKELISMECYDIYSKTWTKQPDLTMVRKIGCYAAMKKKIYAMGGGSYGKLFESVECYDPRTQQWTAICPLKERRFGAVACGVAMELYVFGGVRSREDAQGSEMVTCKSEFYHDEFKRIYLLFFSFQSAQVVVVCPEFTADTWSN

SEQ ID NO: 841086 - protein, 101 aa, Homo sapiens
MLLSRACLNGSRTSSPCLNHHDQKGQASSTQQCTPKTLSTSQDPHGETAVINPLAINESLTTAILNPRVGPISLPATVVTRLTHVNRSRRKECSRSLLHPS

SEQ ID NO: 841087 - protein, 49 aa, Homo sapiens
MPDAGDAGTSCGTACYCLELVSMDLELHRPLCAVHLLCAVQLSTSSVLS

SEQ ID NO: 841088 - protein, 48 aa, Homo sapiens
MPDAGDAGTSCGTACYCLELVSMDLELHRPIRLSNGGSWRFPYRQLPL

SEQ ID NO: 841089 - protein, 46 aa, Homo sapiens
WFKDEIIGIAVGIGINTTDMMDMDEAFQLSNKKSRDTETWVPNKTS

SEQ ID NO: 841090 - protein, 337 aa, Homo sapiens
MEKSWMLWNFVERWLIALASWSWALCRISLLPLIVTFHLYGGIILLLLIFISIAGILYKFQDVLLYFPEQPSSSRLYVPMPTGIPHENIFIRTKDGIRLNLILIRYTGDNSPYSPTIIYFHGNAGNIGHRLPNALLMLVNLKVNLLLVDYRGYGKSEGEASEEGLYLDSEAVLDYVMTRPDLDKTKIFLFGRSLGGAVAIHLASENSHRISAIMVENTFLSIPHMASTLFSFFPMRYLPLWCYKNKFLSYRKISQCRMPSLFISGLSDQLIPPVMMKQLYELSPSRTKRLAIFPDGTHNDTWQCQGYFTALEQFIKEVVKSHSPEEMAKTSSNVTII

SEQ ID NO: 841091 - protein, 337 aa, Homo sapiens; identical to SEQ ID NO: 841090

SEQ ID NO: 841092 - protein, 337 aa, Homo sapiens; identical to SEQ ID NO: 841090

SEQ ID NO: 841093 - protein, 337 aa, Homo sapiens; identical to SEQ ID NO: 841090

SEQ ID NO: 841094 - protein, 337 aa, Homo sapiens; identical to SEQ ID NO: 841090

SEQ ID NO: 841095 - protein, 52 aa, Homo sapiens
MILRLPKPAVQWRGTRLCTRACLQTNELKGGLEGTLTTLQIERRKNSPVLQV

SEQ ID NO: 841096 - protein, 266 aa, Homo sapiens
MDKGRERMAAAAAAAAAAAAAAQCRSPRCAAERRGFRRELDSWRHRLMHCVGFESILEGLYGPRLRRDLSLFEDCEPEELTDWSMDEKCSFCNLQREAVSDCIPSLDSSQSTPTEELSSQGQSNTDKIECQAENYLNALFRKKDLPQNCDPNIPLVAQELMKKMIRQFAIEYISKSGKTQENRNGSIGPSIVCKSIQMNQAENSLQEEQEGPLDLTVNRMQEQNTQQGDGVLDLSTKKTSIKSEESSICDPSSENSVAGMLSVSPH

SEQ ID NO: 841097 - protein, 396 aa, Homo sapiens
MDKGRERMAAAAAAAAAAAAAAQCRSPRCAAERRGFRRELDSWRHRLMHCVGFESILEGLYGPRLRRDLSLFEDCEPEELTDWSMDEKCSFCNLQREAVSDCIPSLDSSQSTPTEELSSQGQSNTDKIECQAENYLNALFRKKDLPQNCDPNIPLVAQELMKKMIRQFAIEYISKSGKTQENRNGSIGPSIVCKSIQMNQAENSLQEEQEGPLDLTVNRMQEQNTQQGDGVLDLSTKKTSIKSEESSICDPSSENSVAGRLHRNREDYVERSAEFADGLLSKALKDIQSGALDINKAGILYGIPQKTLLLHLEALPAGKPASFKNKTRDFHDSYSYKDSKETCAVLQKVALWARAQAERTEKSKLNLLETSEIKFPTASTYLHQLTLQKMVTQFKE

SEQ ID NO: 841098 - protein, 231 aa, Homo sapiens
MDKGRERMAAAAAAAAAAAAAAQCRSPRCAAERRGFRRELDSWRHRLMHCVGFESILEGLYGPRLRRDLSLFEDCEPEELTDWSMDEKCSFCNLQREAVSDCIPSLDSSQSTPTEELSSQGQSNTDKIECQAENYLNALFRKKDLPQNCDPNIPLVAQELMKKMIRQFAIEYISKSGKTQENRNGSIGPSIVCKSIQMNQAENSLQEEQEGPLDLTVNRMQEQNTQQACYK

SEQ ID NO: 841099 - protein, 318 aa, Homo sapiens
MDKGRERMAAAAAAAAAAAAAAQCRSPRCAAERRGFRRELDSWRHRLMHCVGFESILEGLYGPRLRRDLSLFEDCEPEELTDWSMDEKCSFCNLQREAVSDCIPSLDSSQSTPTEELSSQGQSNTDKIECQAENYLNALFRKKDLPQNCDPNIPLVAQELMKKMIRQFAIEYISKSGKTQENRNGSIGPSIVCKSIQMNQAENSLQEEQEGPLDLTVNRMQEQNTQQGDGVLDLSTKKTSIKSEESSICDPSSENSVAGMLQVKTDEKLNVSDENTASCPLSPIKMCLNRPIEWNLNLTTASLTSCTVHNQNLKSEEK

SEQ ID NO: 841100 - protein, 234 aa, Homo sapiens
MDKGRERMAAAAAAAAAAAAAAQCRSPRCAAERRGFRRELDSWRHRLMHCVGFESILEGLYGPRLRRDLSLFEDCEPEELTDWSMDEKCSFCNLQREAVSDCIPSLDSSQSTPTEELSSQGQSNTDKIECQAENYLNALFRKKGDGVLDLSTKKTSIKSEESSICDPSSENSVAGMLQVKTDEKLNVSDENTASCPLSPIKMCLNRPIEWNLNLTTASLTSCTVHNQNLKSEEK

SEQ ID NO: 841101 - protein, 66 aa, Homo sapiens
AGGAHTDPSSANTHSSGGHVHRPELRANTYSSRGHVHRPELSKHSLQPGTHAQTGAQSKHLLQPGT

SEQ ID NO: 841102 - protein, 793 aa, Homo sapiens
GRGGGGRGPGAAGRAPGPGPAPAAAAEPAGTPRSAATAQMAQTLQMEIPNFGNSILECLNEQRLQGLYCDVSVVVKGHAFKAHRAVLAASSSYFRDLFNNSRSAVVELPAAVQPQSFQQILSFCYTGRLSMNVGDQFLLMYTAGFLQIQEIMEKGTEFFLKVSSPSCDSQGLHAEEAPSSEPQSPVAQTSGWPACSTPLPLVSRVKTEQQESDSVQCMPVAKRLWDSGQKEAGGGGNGSRKMAKFSTPDLAANRPHQPPPPQQAPVVAAAQPAVAAGAGQPAGGVAAAGGVVSGPSTSERTSPGTSSAYTSDSPGSYHNEEDEEEDGGEEGMDEQYRQICNMYTMYSMMNVGQTAEKVEALPEQVAPESRNRIRVRQDLASLPAELINQIGNRCHPKLYDEGDPSEKLELVTGTNVYITRAQLMNCHVSAGTRHKVLLRRLLASFFDRNTLANSCGTGIRSSTNDPRRKPLDSRVLHAVKYYCQNFAPNFKESEMNAIAADMCTNARRVVRKSWMPKVKVLKAEDDAYTTFISETGKIEPDMMGVEHGFETASHEGEAGPSLKPCSNPPSLPRGHTLPLPTHTHTCHLGHELLSVPPQDPRWVLHVPGPLPLLSYPLSPPRAGPGEDRRAGGVRSVLPSLTHTRAVGEFWLPNLTPSRHLHTHQAHQGRGLAWGSWEGPSPGPRPPRGSLQPPPLTAAPWDLRGAPGVLRTPPTSSQCFHVSKSAFLSPSSIPAPGGWGRRGRGDYPFYSWGNRLREIAQPTSGGRQWRAWCPFSSSASVAPFGPLGPQRGRS

SEQ ID NO: 841103 - protein, 95 aa, Homo sapiens
RLSVSCGQTVSEDRMRGSQCFHVSKSAFLSPSSIPAPGGWGRRGRGDYPFYSWGNRLREIAQPTSGGRQWRAWCPFSSSASVAPFGPLGPQRGRS

SEQ ID NO: 841104 - protein, 489 aa, Homo sapiens
GRGGGGRGPGAAGRAPGPGPAPAAAAEPAGTPRSAATAQMAQTLQMEIPNFGNSILECLNEQRLQGLYCDVSVVVKGHAFKAHRAVLAASSSYFRDLFNNSRSAVVELPAAVQPQSFQQILSFCYTGRLSMNVGDQFLLMYTAGFLQIQEIMEKGTEFFLKVSSPSCDSQGLHAEEAPSSEPQSPVAQTSGWPACSTPLPLVSRVKTEQQESDSVQCMPVAKRLWDSGQKEAGGGGNGSRKMAKFSTPDLAANRPHQPPPPQQAPVVAAAQPAVAAGAGQPAGGVAAAGGVVSGPSTSERTSPGTSSAYTSDSPGSYHNEEDEEEDGGEEGMDEQYRQICNMYTMYSMMNVGQTAEKVEALPEQVAPESRNRIRVRQDLASLPAELINQIGNRCHPKLYDEGDPSEKLELVTGTNVYITRAQLMNCHVSAGTRHKVLLRRLLASFFDRAPDKRSPPAAKLKRLFHGLQNPTTRLQTRPQLVHTPACTAG

SEQ ID NO: 841105 - protein, 793 aa, Homo sapiens; identical to SEQ ID NO: 841102

SEQ ID NO: 841106 - protein, 90 aa, Homo sapiens
SMSPAPRNTLANSCGTGIRSSTNDPRRKPLDSRVLHAVKCECWPSWTRRGPGARRLTFFPSLGSQRGLEFSVEKHSGAHSSLAGKPAVIA

SEQ ID NO: 841107 - protein, 81 aa, Homo sapiens
QGVLGIKVKIMLPWDPTGKTGPKKPLPDHVSIVEPKDEILHTTPSQNRRVGSQNRLPSPSQSPQRNRVSLAAVFWSLDVVL

SEQ ID NO: 841108 - protein, 81 aa, Homo sapiens; identical to SEQ ID NO: 841107

SEQ ID NO: 841109 - protein, 81 aa, Homo sapiens; identical to SEQ ID NO: 841107

SEQ ID NO: 841110 - protein, 77 aa, Homo sapiens
SLAGKGILGNAIKWNFTKFLIDKNGCVVRGALWDYRHEPLCLVSTEVLHLDEVQFIFYFVACAFGVLSKNYFPNSVS

SEQ ID NO: 841111 - protein, 172 aa, Homo sapiens
RGKDHVCFAENPDTIKDSSFGLQHSLNSGQSLESVTLKGRAPRKQMSLLNSSEFQPQIRTVAKSHSDSCILSSNNLPTKDLLSALLEQGNKLRNAMVISAMKSSPETSMLLDQVHPPINEDSLRASTQIRAFSRNRFKDHIEDHLLPSTENTFWRHDTKADTRAIQLLLGQC

SEQ ID NO: 841112 - protein, 213 aa, Homo sapiens
SIHPFVSYLSIIHSSIYPSSIHPLSIQPLCISSFIHYLSFHPSSIIFPSTIYPFIHLSIIHPSFIHHSSAIIPPSIHYPSSTHPFIPPSAHYPSTIHPSIIRHPHIHSSLHLPIIHQPSIHPLYISALSIYSLSISSSIHHLSIHYPYTYLSSIHSFIYPSSINYPSIHPSIYPSSIDCLSSFLVSDFHPSSFHVSHILITQPSSCASIYSLI

SEQ ID NO: 841113 - protein, 65 aa, Homo sapiens
MQTSSQLVEWEVKSKLITLQNTPNTQELMVPGIAARWGYKNSAGSLLRKHLSSVFSFILQQLKPC

SEQ ID NO: 841114 - protein, 65 aa, Homo sapiens; identical to SEQ ID NO: 841113

SEQ ID NO: 841115 - protein, 65 aa, Homo sapiens; identical to SEQ ID NO: 841113

SEQ ID NO: 841116 - protein, 65 aa, Homo sapiens; identical to SEQ ID NO: 841113

SEQ ID NO: 841117 - protein, 63 aa, Homo sapiens
MLEVPEEEDFLYPSVMELNHISHTVTCDERHGRHSKSAEPRAMSMSGRRRLPKANCVGCALKD

SEQ ID NO: 841118 - protein, 726 aa, Homo sapiens
MADSSGQQGKGRRVQPQWSPPAGTQPCRLHLYNSLTRNKEVFIPQDGKKVTWYCCGPTVYDASHMGHARSYISFDILRRVLKDYFKFDVFYCMNITDIDDKIIKRARQNHLFEQYREKRPEAAQLLEDVQAALKPFSVKLNETTDPDKKQMLERIQHAVQLATEPLEKAVQSRLTGEEVNSCVEVLLEEAKDLLSDWLDSTLGCDVTDNSIFSKLPKFWEGDFHRDMEALNVLPPDVLTRVSEYVPEIVNFVQKIVDNGYGYVSNGSVYFDTAKFASSEKHSYGKLVPEAVGDQKALQEGEGDLSISADRLSEKRSPNDFALWKASKPGEPSWPCPWGKGRPGWHIECSAMAGTLLGASMDIHGGGFDLRFPHHDNELAQSEAYFENDCWVRYFLHTGHLTIAGCKMSKSLKNFITIKDALKKHSARQLRLAFLMHSWKDTLDYSSNTMESALQYEKFLNEFFLNVKDILRAPVDITGQFEKWGEEEAELNKNFYDKKTAIHKALCDNVDTRTVMEEMRALVSQCNLYMAARKAVRKRPNQALLENIALYLTHMLKIFGAVEEDSSLGFPVGGPGTSLSLEATVMPYLQVLSEFREGVRKIAREQKVPEILQLSDALRDNILPELGVRFEDHEGLPTVVKLVDRNTLLKEREEKRRVEEEKRKKKEEAARRKQEQEAAKLAKMKIPPSEMFLSETDKYSKFDENVSMVCPHMTWRAKSSAKGKPRS

SEQ ID NO: 841119 - protein, 67 aa, Homo sapiens
LLMDPFNCGLRRKQEQEAAKLAKMKIPPSEMFLSETDKYSKFDENVSMVCPHMTWRAKSSAKGKPRS

SEQ ID NO: 841120 - protein, 736 aa, Homo sapiens
MADSSGQQGKGRRVQPQWSPPAGTQPCRLHLYNSLTRNKEVFIPQDGKKVTWYCCGPTVYDASHMGHARSYISFDILRRVLKDYFKFDVFYCMNITDIDDKIIKRARQNHLFEQYREKRPEAAQLLEDVQAALKPFSVKLNETTDPDKKQMLERIQHAVQLATEPLEKAVQSRLTGEEVNSCVEVLLEEAKDLLSDWLDSTLGCDVTDNSIFSKLPKFWEGDFHRDMEALNVLPPDVLTRVSEYVPEIVNFVQKIVDNGYGYVSNGSVYFDTAKFASSEKHSYGKLVPEAVGDQKALQEGEGDLSISADRLSEKRSPNDFALWKASKPGEPSWPCPWGKGRPGWHIECSAMAGTLLGASMDIHGGGFDLRFPHHDNELAQSEAYFENDCWVRYFLHTGHLTIAGCKMSKSLKNFITIKDALKKHSGLLAVLCPPTARQLRLAFLMHSWKDTLDYSSNTMESALQYEKFLNEFFLNVKDILRAPVDITGQFEKWGEEEAELNKNFYDKKTAIHKALCDNVDTRTVMEEMRALVSQCNLYMAARKAVRKRPNQALLENIALYLTHMLKIFGAVEEDSSLGFPVGGPGTSLSLEATVMPYLQVLSEFREGVRKIAREQKVPEILQLSDALRDNILPELGVRFEDHEGLPTVVKLVDRNTLLKEREEKRRVEEEKRKKKEEAARRKQEQEAAKLAKMKIPPSEMFLSETDKYSKFDENVSMVCPHMTWRAKSSAKGKPRS

SEQ ID NO: 841121 - protein, 809 aa, Homo sapiens
MADSSGQQAPDYRSILSISDEAARAQALNEHLSTRSYVQGYSLSQADVDAFRQLSAPPADPQLFHVARWFRHIEALLGSPCGKGQPCRLQASKGRRVQPQWSPPAGTQPCRLHLYNSLTRNKEVFIPQDGKKVTWYCCGPTVYDASHMGHARSYISFDILRRVLKDYFKFDVFYCMNITDIDDKIIKRARQNHLFEQYREKRPEAAQLLEDVQAALKPFSVKLNETTDPDKKQMLERIQHAVQLATEPLEKAVQSRLTGEEVNSCVEVLLEEAKDLLSDWLDSTLGCDVTDNSIFSKLPKFWEGDFHRDMEALNVLPPDVLTRVSEYVPEIVNFVQKIVDNGYGYVSNGSVYFDTAKFASSEKHSYGKLVPEAVGDQKALQEGEGDLSISADRLSEKRSPNDFALWKASKPGEPSWPCPWGKGRPGWHIECSAMAGTLLGASMDIHGGGFDLRFPHHDNELAQSEAYFENDCWVRYFLHTGHLTIAGCKMSKSLKNFITIKDALKKHSARQLRLAFLMHSWKDTLDYSSNTMESALQYEKFLNEFFLNVKDILRAPVDITGQFEKWGEEEAELNKNFYDKKTAIHKALCDNVDTRTVMEEMRALVSQCNLYMAARKAVRKRPNQALLENIALYLTHMLKIFGAVEEDSSLGFPVGGPGTSLSLEATVMPYLQVLSEFREGVRKIAREQKVPEILQLSDALRDNILPELGVRFEDHEGLPTVVKLVDRNTLLKEREEKRRVEEEKRKKKEEAARRKQEQEAAKLAKMKIPPSEMFLSETDKYSKFDENVSMVCPHMTWRAKSSAKGKPRS

SEQ ID NO: 841122 - protein, 662 aa, Homo sapiens
MGHARSYISFDILRRVLKDYFKFDVFYCMNITDIDDKIIKRARQNHLFEQYREKRPEAAQLLEDVQAALKPFSVKLNETTDPDKKQMLERIQHAVQLATEPLEKAVQSRLTGEEVNSCVEVLLEEAKDLLSDWLDSTLGCDVTDNSIFSKLPKFWEGDFHRDMEALNVLPPDVLTRVSEYVPEIVNFVQKIVDNGYGYVSNGSVYFDTAKFASSEKHSYGKLVPEAVGDQKALQEGEGDLSISADRLSEKRSPNDFALWKASKPGEPSWPCPWGKGRPGWHIECSAMAGTLLGASMDIHGGGFDLRFPHHDNELAQSEAYFENDCWVRYFLHTGHLTIAGCKMSKSLKNFITIKDALKKHSARQLRLAFLMHSWKDTLDYSSNTMESALQYEKFLNEFFLNVKDILRAPVDITGQFEKWGEEEAELNKNFYDKKTAIHKALCDNVDTRTVMEEMRALVSQCNLYMAARKAVRKRPNQALLENIALYLTHMLKIFGAVEEDSSLGFPVGGPGTSLSLEATVMPYLQVLSEFREGVRKIAREQKVPEILQLSDALRDNILPELGVRFEDHEGLPTVVKLVDRNTLLKEREEKRRVEEEKRKKKEEAARRKQEQEAAKLAKMKIPPSEMFLSETDKYSKFDENVSMVCPHMTWRAKSSAKGKPRS

SEQ ID NO: 841123 - protein, 716 aa, Homo sapiens
MQTPPLQQPHQEQVFLAFLVIVIPSFLTKEVFIPQDGKKVTWYCCGPTVYDASHMGHARSYISFDILRRVLKDYFKFDVFYCMNITDIDDKIIKRARQNHLFEQYREKRPEAAQLLEDVQAALKPFSVKLNETTDPDKKQMLERIQHAVQLATEPLEKAVQSRLTGEEVNSCVEVLLEEAKDLLSDWLDSTLGCDVTDNSIFSKLPKFWEGDFHRDMEALNVLPPDVLTRVSEYVPEIVNFVQKIVDNGYGYVSNGSVYFDTAKFASSEKHSYGKLVPEAVGDQKALQEGEGDLSISADRLSEKRSPNDFALWKASKPGEPSWPCPWGKGRPGWHIECSAMAGTLLGASMDIHGGGFDLRFPHHDNELAQSEAYFENDCWVRYFLHTGHLTIAGCKMSKSLKNFITIKDALKKHSARQLRLAFLMHSWKDTLDYSSNTMESALQYEKFLNEFFLNVKDILRAPVDITGQFEKWGEEEAELNKNFYDKKTAIHKALCDNVDTRTVMEEMRALVSQCNLYMAARKAVRKRPNQALLENIALYLTHMLKIFGAVEEDSSLGFPVGGPGTSLSLEATVMPYLQVLSEFREGVRKIAREQKVPEILQLSDALRDNILPELGVRFEDHEGLPTVVKLVDRNTLLKEREEKRRVEEEKRKKKEEAARRKQEQEAAKLAKMKIPPSEMFLSETDKYSKFDENVSMVCPHMTWRAKSSAKGKPRS

SEQ ID NO: 841124 - protein, 687 aa, Homo sapiens
MHSCSSNTCCWRLSYTYRLVWKCLFFHCFRSYISFDILRRVLKDYFKFDVFYCMNITDIDDKIIKRARQNHLFEQYREKRPEAAQLLEDVQAALKPFSVKLNETTDPDKKQMLERIQHAVQLATEPLEKAVQSRLTGEEVNSCVEVLLEEAKDLLSDWLDSTLGCDVTDNSIFSKLPKFWEGDFHRDMEALNVLPPDVLTRVSEYVPEIVNFVQKIVDNGYGYVSNGSVYFDTAKFASSEKHSYGKLVPEAVGDQKALQEGEGDLSISADRLSEKRSPNDFALWKASKPGEPSWPCPWGKGRPGWHIECSAMAGTLLGASMDIHGGGFDLRFPHHDNELAQSEAYFENDCWVRYFLHTGHLTIAGCKMSKSLKNFITIKDALKKHSARQLRLAFLMHSWKDTLDYSSNTMESALQYEKFLNEFFLNVKDILRAPVDITGQFEKWGEEEAELNKNFYDKKTAIHKALCDNVDTRTVMEEMRALVSQCNLYMAARKAVRKRPNQALLENIALYLTHMLKIFGAVEEDSSLGFPVGGPGTSLSLEATVMPYLQVLSEFREGVRKIAREQKVPEILQLSDALRDNILPELGVRFEDHEGLPTVVKLVDRNTLLKEREEKRRVEEEKRKKKEEAARRKQEQEAAKLAKMKIPPSEMFLSETDKYSKFDENVSMVCPHMTWRAKSSAKGKPRS

SEQ ID NO: 841125 - protein, 499 aa, Homo sapiens
MADSSGQQGKGRRVQPQWSPPAGTQPCRLHLYNSLTRNKEVFIPQDGKKVTWYCCGPTVYDASHMGHARSYISFDILRRVLKDYFKFDVFYCMNITDIDDKIIKRARQNHLFEQYREKRPEAAQLLEDVQAALKPFSVKLNETTDPDKKQMLERIQHAVQLATEPLEKAVQSRLTGEEVNSCVEVLLEEAKDLLSDWLDSTLGCDVTDNSIFSKLPKFWEGDFHRDMEALNVLPPDVLTRVSEYVPEIVNFVQKIVDNGYGYVSNGSVYFDTAKFASSEKHSYGKLVPEAVGDQKALQEGEGDLSISADRLSEKRSPNDFALWKASKPGEPSWPCPWGKGRPGWHIECSAMAGTLLGASMDIHGGGFDLRFPHHDNELAQSEAYFENDCWVRYFLHTGHLTIAGCKMSKSLKNFITIKDALKKHSARQLRLAFLMHSWKDTLDYSSNTMESALQYEKFLNEFFLNVKDILRAPVDITGQFEKWGEEEAELNKKQQSWPR

SEQ ID NO: 841126 - protein, 726 aa, Homo sapiens; identical to SEQ ID NO: 841118

SEQ ID NO: 841127 - protein, 683 aa, Homo sapiens
MADSSGQQGKGRRVQPQWSPPAGTQPCRLHLYNSLTRNKEVFIPQDGKKVTWYCCGPTVYDASHMGHARSYISFDILRRVLKDYFKFDVFYCMNITDIDDKIIKRARQNHLFEQYREKRPEAAQLLEDVQAALKPFSVKLNETTDPDKKQMLERIQHAVQLATEPLEKAVQSRLTGEEVNSCVEVLLEEAKDLLSDWLDSTLGCDVTDNSIFSKLPKFWEGDFHRDMEALNVLPPDVLTRVSEYVPEIVNFVQKIVDNGYGYVSNGSVYFDTAKFASSEKHSYGKLVPEAVGDQKALQEGEGDLSISADRLSEKRSPNDFALWKASKPGEPSWPCPWGKGRPGWHIECSAMAGTLLGASMDIHGGGFDLRFPHHDNELAQSEAYFENDCWVRYFLHTGHLTIAGCKMSKSLKNFITIKDALKKHSARQLRLAFLMHSWKDTLDYSSNTMESALQYEKFLNEFFLNVKDILRAPVDITGQFEKWGEEEAELNKNFYDKKTAIHKALCDNVDTRTVMEEMRALVSQCNLYMAARKAVRKRPNQALLENIALYLTHMLKIFGAVEEDSSLGFPVGGPGTSLSLEATVMPYLQVLSEFREGVRKIAREQKVPEILQLSDALRDNILPELGVRFEDHEGLPTVVKLVDRNTLLKEREEKRRVEEEKRKKKEEAARRKQEQEVMHFVWG

SEQ ID NO: 841128 - protein, 661 aa, Homo sapiens
MADSSGQQGKGRRVQPQWSPPAGTQPCRLHLYNSLTRNKEVFIPQDGKKVTWYCCGPTVYDASHMGHARSYISFDILRRVLKDYFKFDVFYCMNITDIDDKIIKRARQNHLFEQYREKRPEAAQLLEDVQAALKPFSVKLNETTDPDKKQMLERIQHAVQLATEPLEKAVQSRLTGEEVNSCVEVLLEEAKDLLSDWLDSTLGCDVTDNSIFSKLPKFWEGDFHRDMEALNVLPPDVLTRVSEYVPEIVNFVQKIVDNGYGYVSNGSVYFDTAKFASSEKHSYGKLVPEAVGDQKALQEGEGDLSISADRLSEKRSPNDFALWKASKPGEPSWPCPWGKGRPGWHIECSAMAGTLLGASMDIHGGGFDLRFPHHDNELAQSEAYFENDCWVRYFLHTGHLTIAGCKMSKSLKNFITIKDALKKHSARQLRLAFLMHSWKDTLDYSSNTMESALQYEKFLNEFFLNVKDILRAPVDITGQFEKWGEEEAELNKNFYDKKTAIHKALCDNVDTRTVMEEMRALVSQCNLYMAARKAVRKRPNQALLENIALYLTHMLKIFGAVEEDSSLGFPVGGPGTSLSLEATVMPYLQVLSEFREGVRKIAREQKVPEILQLSDALRDNILPELGVRFEDHEGLPTVVKLVDRNTLLKEREEKRRVEEGK

SEQ ID NO: 841129 - protein, 547 aa, Homo sapiens
MADSSGQQGKGRRVQPQWSPPAGTQPCRLHLYNSLTRNKEVFIPQDGKKVTWYCCGPTVYDASHMGHARSYISFDILRRVLKDYFKFDVFYCMNITDIDDKIIKRARQNHLFEQYREKRPEAAQLLEDVQAALKPFSVKLNETTDPDKKQMLERIQHAVQLATEPLEKAVQSRLTGEEVNSCVEVLLEEAKDLLSDWLDSTLGCDVTDNSIFSKLPKFWEGDFHRDMEALNVLPPDVLTRVSEYVPEIVNFVQKIVDNGYGYVSNGSVYFDTAKFASSEKHSYGKLVPEAVGDQKALQEGEGDLSISADRLSEKRSPNDFALWKASKPGEPSWPCPWGKGRPGWHIECSAMAGTLLGASMDIHGGGFDLRFPHHDNELAQSEAYFENDCWVRYFLHTGHLTIAGCKMSKSLKNFITIKDALKKHSARQLRLAFLMHSWKDTLDYSSNTMESALQYEKFLNEFFLNVKDILRAPVDITGQFEKWGEEEAELNKNFYDKKTAIHKALCDNVDFLNHCGLVAAVCLSDNVPALLSCLQSPLGPKLRVVFM

SEQ ID NO: 841130 - protein, 461 aa, Homo sapiens
MADSSGQQGKGRRVQPQWSPPAGTQPCRLHLYNSLTRNKEVFIPQDGKKVTWYCCGPTVYDASHMGHARSYISFDILRRVLKDYFKFDVFYCMNITDIDDKIIKRARQNHLFEQYREKRPEAAQLLEDVQAALKPFSVKLNETTDPDKKQMLERIQHAVQLATEPLEKAVQSRLTGEEVNSCVEVLLEEAKDLLSDWLDSTLGCDVTDNSIFSKLPKFWEGDFHRDMEALNVLPPDVLTRVSEYVPEIVNFVQKIVDNGYGYVSNGSVYFDTAKFASSEKHSYGKLVPEAVGDQKALQEGEGDLSISADRLSEKRSPNDFALWKASKPGEPSWPCPWGKGRPGWHIECSAMAGTLLGASMDIHGGGFDLRFPHHDNELAQSEAYFENDCWVRYFLHTGHLTIAGCKMSKSLKNFITIKDALKKHSAGSGGGPQPGGTWVSTNRGASKEGEEEEKKQARGTG

SEQ ID NO: 841131 - protein, 348 aa, Homo sapiens
MADSSGQQGKGRRVQPQWSPPAGTQPCRLHLYNSLTRNKEVFIPQDGKKVTWYCCGPTVYDASHMGHARSYISFDILRRVLKDYFKFDVFYCMNITDIDDKIIKRARQNHLFEQYREKRPEAAQLLEDVQAALKPFSVKLNETTDPDKKQMLERIQHAVQLATEPLEKAVQSRLTGEEVNSCVEVLLEEAKDLLSDWLDSTLGCDVTDNSIFSKLPKFWEGDFHRDMEALNVLPPDVLTRVSEYVPEIVNFVQKIVDNGYGYVSNGSVYFDTAKFASSEKHSYGKLVPEAVGDQKALQEGEGEEGMPESMWALPPGPAWVVLTLQATGAALSPPLRLLGTVLFHLKEF

SEQ ID NO: 841132 - protein, 213 aa, Homo sapiens
RRGARLPGRRLHQILGSVCSRSCGSGIPSHGRFLRAAGQRPACAAPVVPSCWDPAMQTPPLQQPHQEQVFLAFLVIVIPSFLTKEVFIPQDGKKVTWYCCGPTVYDASHMGHARSYISFDILRRVLKDYFKFDVFYCMNITDIDDKIIKRARQNHLFEQYREKRPEAAQLLEDVQAALKPFSVKLNETTDPDKKQMLERIQHAVQLATEKPRS

SEQ ID NO: 841133 - protein, 128 aa, Homo sapiens
MADSSGQQAPDYRSILSISDEAARAQALNEHLSTRSYVQGYSLSQADVDAFRQLSAPPADPQLFHVARWFRHIEALLGSPCGKGQPCRLQASKGRRVQPQWSPPAGTQPCRLHLYNSLTRNKCFLHFL

SEQ ID NO: 841134 - protein, 690 aa, Homo sapiens
RVSPLIAEQDGKKVTWYCCGPTVYDASHMGHARSYISFDILRRVLKDYFKFDVFYCMNITDIDDKIIKRARQNHLFEQYREKRPEAAQLLEDVQAALKPFSVKLNETTDPDKKQMLERIQHAVQLATEPLEKAVQSRLTGEEVNSCVEVLLEEAKDLLSDWLDSTLGCDVTDNSIFSKLPKFWEGDFHRDMEALNVLPPDVLTRVSEYVPEIVNFVQKIVDNGYGYVSNGSVYFDTAKFASSEKHSYGKLVPEAVGDQKALQEGEGDLSISADRLSEKRSPNDFALWKASKPGEPSWPCPWGKGRPGWHIECSAMAGTLLGASMDIHGGGFDLRFPHHDNELAQSEAYFENDCWVRYFLHTGHLTIAGCKMSKSLKNFITIKDALKKHSARQLRLAFLMHSWKDTLDYSSNTMESALQYEKFLNEFFLNVKDILRAPVDITGQFEKWGEEEAELNKNFYDKKTAIHKALCDNVDTRTVMEEMRALVSQCNLYMAARKAVRKRPNQALLENIALYLTHMLKIFGAVEEDSSLGFPVGGPGTSLSLEATVMPYLQVLSEFREGVRKIAREQKVPEILQLSDALRDNILPELGVRFEDHEGLPTVVKLVDRNTLLKEREEKRRVEEEKRKKKEEAARRKQEQEAAKLAKMKIPPSEMFLSETDKYSKFDENVSMVCPHMTWRAKSSAKGKPRS

SEQ ID NO: 841135 - protein, 683 aa, Homo sapiens; identical to SEQ ID NO: 841127

SEQ ID NO: 841136 - protein, 771 aa, Homo sapiens
RRGARLPGRRLHQILGSVCSRSCGSGIPSHGRFLRAAGQRPACAAPVVPSCWDPAMQTPPLQQPHQEQVFLAFLVIVIPSFLTKEVFIPQDGKKVTWYCCGPTVYDASHMGHARSYISFDILRRVLKDYFKFDVFYCMNITDIDDKIIKRARQNHLFEQYREKRPEAAQLLEDVQAALKPFSVKLNETTDPDKKQMLERIQHAVQLATEPLEKAVQSRLTGEEVNSCVEVLLEEAKDLLSDWLDSTLGCDVTDNSIFSKLPKFWEGDFHRDMEALNVLPPDVLTRVSEYVPEIVNFVQKIVDNGYGYVSNGSVYFDTAKFASSEKHSYGKLVPEAVGDQKALQEGEGDLSISADRLSEKRSPNDFALWKASKPGEPSWPCPWGKGRPGWHIECSAMAGTLLGASMDIHGGGFDLRFPHHDNELAQSEAYFENDCWVRYFLHTGHLTIAGCKMSKSLKNFITIKDALKKHSARQLRLAFLMHSWKDTLDYSSNTMESALQYEKFLNEFFLNVKDILRAPVDITGQFEKWGEEEAELNKNFYDKKTAIHKALCDNVDTRTVMEEMRALVSQCNLYMAARKAVRKRPNQALLENIALYLTHMLKIFGAVEEDSSLGFPVGGPGTSLSLEATVMPYLQVLSEFREGVRKIAREQKVPEILQLSDALRDNILPELGVRFEDHEGLPTVVKLVDRNTLLKEREEKRRVEEEKRKKKEEAARRKQEQEAAKLAKMKIPPSEMFLSETDKYSKFDENVSMVCPHMTWRAKSSAKGKPRS

SEQ ID NO: 841137 - protein, 686 aa, Homo sapiens
MADSSGQQGKGRRVQPQWSPPAGTQPCRLHLYNSLTRNKEVFIPQDGKKVTWYCCGPTVYDASHMGHARSYISFDILRRVLKDYFKFDVFYCMNITDIDDKIIKRARQNHLFEQYREKRPEAAQLLEDVQAALKPFSVKLNETTDPDKKQMLERIQHAVQLATEPLEKAVQSRLTGEEVNSCVEVLLEEAKDLLSDWLDSTLGCDVTDNSIFSKLPKFWEGDFHRDMEALNVLPPDVLTRVSEYVPEIVNFVQKIVDNGYGYVSNGSVYFDTAKFASSEKHSYGKLVPEAVGDQKALQEGEGDLSISADRLSEKRSPNDFALWKASKPGEPSWPCPWGKGRPGWHIECSAMAGTLLGASMDIHGGGFDLRFPHHDNELAQSEAYFENDCWVRYFLHTGHLTIAGCKMSKSLKNFITIKDALKKHSARQLRLAFLMHSWKDTLDYSSNTMESALQYEKFLNEFFLNVKDILRAPVDITGQFEKWGEEEAELNKNFYDKKTAIHKALCDNVDTRTVMEEMRALVSQCNLYMAARKAVRKRPNQALLENIALYLTHMLKIFGAVEEDSSLGFPVGGPGTSLSLEATVMPYLQVLSEFREGVRKIAREQKVPEILQLSDALRDNILPELGVRFEDHEGLPTVVKLVDRNTLLKEREEKRRVEEEKRKKKEEAARRKQEQEHSESEGLEAS

SEQ ID NO: 841138 - protein, 652 aa, Homo sapiens
PRVNRHRKDYFKFDVFYCMNITDIDDKIIKRARQNHLFEQYREKRPEAAQLLEDVQAALKPFSVKLNETTDPDKKQMLERIQHAVQLATEPLEKAVQSRLTGEEVNSCVEVLLEEAKDLLSDWLDSTLGCDVTDNSIFSKLPKFWEGDFHRDMEALNVLPPDVLTRVSEYVPEIVNFVQKIVDNGYGYVSNGSVYFDTAKFASSEKHSYGKLVPEAVGDQKALQEGEGDLSISADRLSEKRSPNDFALWKASKPGEPSWPCPWGKGRPGWHIECSAMAGTLLGASMDIHGGGFDLRFPHHDNELAQSEAYFENDCWVRYFLHTGHLTIAGCKMSKSLKNFITIKDALKKHSARQLRLAFLMHSWKDTLDYSSNTMESALQYEKFLNEFFLNVKDILRAPVDITGQFEKWGEEEAELNKNFYDKKTAIHKALCDNVDTRTVMEEMRALVSQCNLYMAARKAVRKRPNQALLENIALYLTHMLKIFGAVEEDSSLGFPVGGPGTSLSLEATVMPYLQVLSEFREGVRKIAREQKVPEILQLSDALRDNILPELGVRFEDHEGLPTVVKLVDRNTLLKEREEKRRVEEEKRKKKEEAARRKQEQEAAKLAKMKIPPSEMFLSETDKYSKFDENVSMVCPHMTWRAKSSAKGKPRS

SEQ ID NO: 841139 - protein, 484 aa, Homo sapiens
HHHPGDGLVILVDRKAIFCLKGIVLLILGRKTELEGKEHSYGKLVPEAVGDQKALQEGEGDLSISADRLSEKRSPNDFALWKASKPGEPSWPCPWGKGRPGWHIECSAMAGTLLGASMDIHGGGFDLRFPHHDNELAQSEAYFENDCWVRYFLHTGHLTIAGCKMSKSLKNFITIKDALKKHSARQLRLAFLMHSWKDTLDYSSNTMESALQYEKFLNEFFLNVKDILRAPVDITGQFEKWGEEEAELNKNFYDKKTAIHKALCDNVDTRTVMEEMRALVSQCNLYMAARKAVRKRPNQALLENIALYLTHMLKIFGAVEEDSSLGFPVGGPGTSLSLEATVMPYLQVLSEFREGVRKIAREQKVPEILQLSDALRDNILPELGVRFEDHEGLPTVVKLVDRNTLLKEREEKRRVEEEKRKKKEEAARRKQEQEAAKLAKMKIPPSEMFLSETDKYSKFDENVSMVCPHMTWRAKSSAKGKPRS

SEQ ID NO: 841140 - protein, 341 aa, Homo sapiens
RPVPCGDAQRSPAPLSPALPCPALPCPAPGARPPRRIHVQTRQLRLAFLMHSWKDTLDYSSNTMESALQYEKFLNEFFLNVKDILRAPVDITGQFEKWGEEEAELNKNFYDKKTAIHKALCDNVDTRTVMEEMRALVSQCNLYMAARKAVRKRPNQALLENIALYLTHMLKIFGAVEEDSSLGFPVGGPGTSLSLEATVMPYLQVLSEFREGVRKIAREQKVPEILQLSDALRDNILPELGVRFEDHEGLPTVVKLVDRNTLLKEREEKRRVEEEKRKKKEEAARRKQEQEAAKLAKMKIPPSEMFLSETDKYSKFDENVSMVCPHMTWRAKSSAKGKPRS

SEQ ID NO: 841141 - protein, 676 aa, Homo sapiens
MADSSGQQGKGRRVQPQWSPPAGTQPCRLHLYNSLTRNKEVFIPQDGKKVTWYCCGPTVYDASHMGHARSYISFDILRRVLKDYFKFDVFYCMNITDIDDKIIKRARQNHLFEQYREKRPEAAQLLEDVQAALKPFSVKLNETTDPDKKQMLERIQHAVQLATEPLEKAVQSRLTGEEVNSCVEVLLEEAKDLLSDWLDSTLGCDVTDNSIFSKLPKFWEGDFHRDMEALNVLPPDVLTRVSEYVPEIVNFVQKIVDNGYGYVSNGSVYFDTAKFASSEKHSYGKLVPEAVGDQKALQEGEGDLSISADRLSEKRSPNDFALWKASKPGEPSWPCPWGKGRPGWHIECSAMAGTLLGASMDIHGGGFDLRFPHHDNELAQSEAYFENDCWVRYFLHTGHLTIAGCKMSKSLKNFITIKDALKKHSARQLRLAFLMHSWKDTLDYSSNTMESALQYEKFLNEFFLNVKDILRAPVDITGQFEKWGEEEAELNKNFYDKKTAIHKALCDNVDTRTVMEEMRALVSQCNLYMAARKAVRKRPNQALLENIALYLTHMLKIFGAVEEDSSLGFPVGGPGTSLSLEATVMPYLQVLSEFREGVRKIAREQKVPEILQLSDALRDNILPELGVRFEDHEGLPTVVKLVDRNTLLKEREEKRRADGSKMRQSSSHQGSGHPED

SEQ ID NO: 841142 - protein, 672 aa, Homo sapiens
MADSSGQQGKGRRVQPQWSPPAGTQPCRLHLYNSLTRNKEVFIPQDGKKVTWYCCGPTVYDASHMGHARSYISFDILRRVLKDYFKFDVFYCMNITDIDDKIIKRARQNHLFEQYREKRPEAAQLLEDVQAALKPFSVKLNETTDPDKKQMLERIQHAVQLATEPLEKAVQSRLTGEEVNSCVEVLLEEAKDLLSDWLDSTLGCDVTDNSIFSKLPKFWEGDFHRDMEALNVLPPDVLTRVSEYVPEIVNFVQKIVDNGYGYVSNGSVYFDTAKFASSEKHSYGKLVPEAVGDQKALQEGEGDLSISADRLSEKRSPNDFALWKASKPGEPSWPCPWGKGRPGWHIECSAMAGTLLGASMDIHGGGFDLRFPHHDNELAQSEAYFENDCWVRYFLHTGHLTIAGCKMSKSLKNFITIKDALKKHSARQLRLAFLMHSWKDTLDYSSNTMESALQYEKFLNEFFLNVKDILRAPVDITGQFEKWGEEEAELNKNFYDKKTAIHKALCDNVDTRTVMEEMRALVSQCNLYMAARKAVRKRPNQALLENIALYLTHMLKIFGAVEEDSSLGFPVGGPGTSLSLEATVMPYLQVLSEFREGVRKIAREQKVPEILQLSDALRDNILPELGVRFEDHEGLPTVVKWRRKGDMEKEGQTERLADACTPHWVPSAVMPT

SEQ ID NO: 841143 - protein, 182 aa, Homo sapiens
TPSTSCTPLYAEIFGAVEEDSSLGFPVGGPGTSLSLEATVMPYLQVLSEFREGVRKIAREQKVPEILQLSDALRDNILPELGVRFEDHEGLPTVVKLVDRNTLLKEREEKRRVEEEKRKKKEEAARRKQEQEAAKLAKMKIPPSEMFLSETDKYSKFDENVSMVCPHMTWRAKSSAKGKPRS

SEQ ID NO: 841144 - protein, 188 aa, Homo sapiens
MADSSGQQGKGRRVQPQWSPPAGTQPCRLHLYNSLTRNKEVFIPQDGKKVTWYCCGPTVYDASHMGHARSYISFDILRRVLKDYFKFDVFYCMNITDIDDKIIKRARQNHLFEQYREKRPEAAQLLEDVQAALKPFSVKLNETTDPDKKQMLERIQHAVQLATEPLEKAVQSRLTGEEVNSCVEKPRS

SEQ ID NO: 841145 - protein, 147 aa, Homo sapiens
MADSSGQQGKGRRVQPQWSPPAGTQPCRLHLYNSLTRNKEVFIPQDGKKVTWYCCGPTVYDASHMGHARSYISFDILRRVLKDYFKFDVFYCMNITDIDDKIIKRARQNHLFEQYREKRPEAAQLLEDAQEKLYKEYLQMAQNGSFQ

SEQ ID NO: 841146 - protein, 58 aa, Homo sapiens
GFPHSHAPRAFHPSIKLSNVKSCISQKSSCLLNGGNPGVKRQLFPLVVFLMPSKIPST

SEQ ID NO: 841147 - protein, 74 aa, Homo sapiens
PSLAVGSWREKKGGFPRLRETASPWATPASCSLPGDQVVATGVPRFPPLGSRAATRTKGDVRGASQQSWDAGST

SEQ ID NO: 841148 - protein, 379 aa, Homo sapiens
AGPSNGSFCSPGSEPPGAARGLAAPRPRCPPGVPLLRAPAAGCQLFGAPSRTQRRERARDKLELRPPRPSPAPLPLPPRGRAPTMLQGPGSLLLLFLASHCCLGSARGLFLFGQPDFSYKRSNCKPIPANLQLCHGIEYQNMRLPNLLGHETMKEVLEQAGAWIPLVMKQCHPDTKKFLCSLFAPVCLDDLDETIQPCHSLCVQVKDRCAPVMSAFGFPWPDMLECDRFPQDNDLCIPLASSDHLLPATEEAPKVCEACKNKNDDDNDIMETLCKNDFALKIKVKEITYINRDTKIILETKSKTIYKLNGVSERDLKKSVLWLKDSLQCTCEEMNDINAPYLVMGQKQGGELVITSVKRWQKGQREFKRISRSIRKLQC

SEQ ID NO: 841149 - protein, 301 aa, Homo sapiens
ARSSPPSASDDLDETIQPCHSHCCLGSARGLFLFGQPDFSYKRSNCKPIPANLQLCHGIEYQNMRLPNLLGHETMKEVLEQAGAWIPLVMKQCHPDTKKFLCSLFAPVCLDDLDETIQPCHSLCVQVKDRCAPVMSAFGFPWPDMLECDRFPQDNDLCIPLASSDHLLPATEEAPKVCEACKNKNDDDNDIMETLCKNDFALKIKVKEITYINRDTKIILETKSKTIYKLNGVSERDLKKSVLWLKDSLQCTCEEMNDINAPYLVMGQKQGGELVITSVKRWQKGQREFKRISRSIRKLQC

SEQ ID NO: 841150 - protein, 344 aa, Homo sapiens
AVPQQRLILLPRVGAPRSCARACSASPALSSRCPASPRPSRRLPAFRGPESHPAKRAGPGQARTPAASPFPGSVFLFGQPDFSYKRSNCKPIPANLQLCHGIEYQNMRLPNLLGHETMKEVLEQAGAWIPLVMKQCHPDTKKFLCSLFAPVCLDDLDETIQPCHSLCVQVKDRCAPVMSAFGFPWPDMLECDRFPQDNDLCIPLASSDHLLPATEEAPKVCEACKNKNDDDNDIMETLCKNDFALKIKVKEITYINRDTKIILETKSKTIYKLNGVSERDLKKSVLWLKDSLQCTCEEMNDINAPYLVMGQKQGGELVITSVKRWQKGQREFKRISRSIRKLQC

SEQ ID NO: 841151 - protein, 367 aa, Homo sapiens
AVPQQRLILLPRVGAPRSCARACSASPALSSRCPASPRPSRRLPAFRGPESHPAKRAGPGQARTPAASPFPGSAPSAPSGSRAHDAAGPWLAAAALPRLALLPGLGARALPLWPARLLLQAQQLQAHPGQPAAVPRHRIPEHAAAQPAGPRDHEGGAECHPDTKKFLCSLFAPVCLDDLDETIQPCHSLCVQVKDRCAPVMSAFGFPWPDMLECDRFPQDNDLCIPLASSDHLLPATEEAPKVCEACKNKNDDDNDIMETLCKNDFALKIKVKEITYINRDTKIILETKSKTIYKLNGVSERDLKKSVLWLKDSLQCTCEEMNDINAPYLVMGQKQGGELVITSVKRWQKGQREFKRISRSIRKLQC

SEQ ID NO: 841152 - protein, 322 aa, Homo sapiens
AGPSNGSFCSPGSEPPGAARGLAAPRPRCPPGVPLLRAPAAGCQLFGAPSRTQRRERARDKLELRPPRPSPAPLPLPPRGRAPTMLQGPGSLLLLFLASHCCLGSARGLFLFGQPDFSYKRSNCKPIPANLQLCHGIEYQNMRLPNLLGHETMKEVLEQAGAWIPLVMKQCHPDTKKFLCSLFAPVCLDDLDETIQPCHSLCVQVKDRCAPVMSAFGFPWPDMLECDRFPQDNDLCIPLASSDHLLPATEEAPKVCEACKNKNDDDNDSLQCTCEEMNDINAPYLVMGQKQGGELVITSVKRWQKGQREFKRISRSIRKLQC

SEQ ID NO: 841153 - protein, 379 aa, Homo sapiens; identical to SEQ ID NO: 841148

SEQ ID NO: 841154 - protein, 322 aa, Homo sapiens; identical to SEQ ID NO: 841152

SEQ ID NO: 841155 - protein, 354 aa, Homo sapiens
AGPSNGSFCSPGSEPPGAARGLAAPRPRCPPGVPLLRAPAAGCQLFGAPSRTQRRERARDKLELRPPRPSPAPLPLPPRGRAPTMLQGPGSLLLLFLASHCCLGSARGLFLFGQPDFSYKRSNCKPIPANLQLCHGIEYQNMRLPNLLGHETMKEVLEQAGAWIPLVMKQCHPDTKKFLCSLFAPVCLDDLDETIQPCHSLCVQVKDRCAPVMSAFGFPWPDMLECDRFPQDNDLCIPLASSDHLLPATEEAPKVCEACKNKNDDDNDIMETLCKNDFALKIKVKEITYINRDTKIILETKSKTIYKLNGVSERDLKKSVLWLKDSLQCTCEEMNDINAPYLVMGQKQGGELQC

SEQ ID NO: 841156 - protein, 354 aa, Homo sapiens; identical to SEQ ID NO: 841155

SEQ ID NO: 841157 - protein, 206 aa, Homo sapiens
AGPSNGSFCSPGSEPPGAARGLAAPRPRCPPGVPLLRAPAAGCQLFGAPSRTQRRERARDKLELRPPRPSPAPLPLPPRGRAPTMLQGPGSLLLLFLASHCCLGSARGLFLFGQPDFSYKRSNCKPIPANLQLCHGIEYQNMRLPNLLGHETMKEVLEQAGAWIPLVMKQCHPDTKKFLCSLFAPVCLDDLDETIQQPRRSTRPRI

SEQ ID NO: 841158 - protein, 56 aa, Homo sapiens
QTMPDVQRTNDLASAYFSGLSFVPARDFPLGTSSPPPPALLRFELWATLPTPSGFQ

SEQ ID NO: 841159 - protein, 680 aa, Homo sapiens
MGLKAAQKTLFPLRSIDDVVRLFAAELGREEPDLVLLSLVLGFVEHFLAVNRVIPTNVPELTFQPSPAPDPPGGLTYFPVADLSIIAALYARFTAQIRGAVDLSLYPREGGVSSRELVKKVSDVIWNSLSRSYFKDRAHIQSLFSFITGTKLDSSGVAFAVVGACQALGLRDVHLALSEDHAWVVFGPNGEQTAEVTWHGKGNEDRRGQTVNAGVAERVLFPPPSLVPFITVVAQATQGTPFSWATPLSSHHHPHRKGRQKSPFSWLSFPEAGTGWAIMRHMISSPPKSWLYLKGSYMRCDRKMEVAFMVCAINPSIDLHTDSLELLQLQQKLLWLLYDLGHLERYPMALGNLADLEELEPTPGRPDPLTLYHKGIASAKTYYRDEHIYPYMYLAGYHCRNRNVREALQAWADTATVIQDYNYCREDEEIYKEFFEVANDVIPNLLKEAASLLEAGEERPGEQSQGTQSQGSALQDPECFAHLLRFYDGICKWEEGSPTPVLHVGWATFLVQSLGRFEGQVRQKVRIVSREAEAAEAEEPWGEEAREGRRRGPRRESKPEEPPPPKKPALDKGLGTGQGAVSGPPRKPPGTVAGTARGPEGGSTAQVPAPAASPPPEGPVLTFQSEKMKGMKELLVATKINSSAIKLQLTAQSQVQMKKQKVSTPSDYTLSFLKRQRKGL

SEQ ID NO: 841160 - protein, 801 aa, Homo sapiens
LGNKSYSSLGNKSCCFREGFLAEPMMRLPNTVPIPAPRNPSSSSEPLTQSQTNVTQGSSQLVGAEVLTLNHKEHRSHLPAREPRTTQPLGVYFRTSEFNILRSKLRAPNNFSPAPEFGNPRFLSFVSRVWDTELRPQSMSGHWGSSLGCLGRTPSGTGRPGIVGDKKALQSRLRGLTDKRGEAGRRPPPAAMGLKAAQKTLFPLRSIDDVVRLFAAELGREEPDLVLLSLVLGFVEHFLAVNRVIPTNVPELTFQPSPAPDPPGGLTYFPVADLSIIAALYARFTAQIRGAVDLSLYPREGGVSSRELVKKVSDVIWNSLSRSYFKDRAHIQSLFSFITGTKLDSSGVAFAVVGACQALGLRDVHLALSEDHAWVVFGPNGEQTAEVTWHGKGNEDRRGQTVNAGVAERSWLYLKGSYMRCDRKMEVAFMVCAINPSIDLHTDSLELLQLQQKLLWLLYDLGHLERYPMALGNLADLEELEPTPGRPDPLTLYHKGIASAKTYYRDEHIYPYMYLAGYHCRNRNVREALQAWADTATVIQDYNYCREDEEIYKEFFEVANDVIPNLLKEAASLLEAGEERPGEQSQGTQSQGSALQDPECFAHLLRFYDGICKWEEGSPTPVLHVGWATFLVQSLGRFEGQVRQKVRIVSREAEAAEAEEPWGEEAREGRRRGPRRESKPEEPPPPKKPALDKGLGTGQGAVSGPPRKPPGTVAGTARGPEGGSTAQVPAPAASPPPEGPVLTFQSEKMKGMKELLVATKINSSAIKLQLTAQSQVQMKKQKVSTPSDYTLSFLKRQRKGL

SEQ ID NO: 841161 - protein, 834 aa, Homo sapiens
MGLKAAQKTLFPLRSIDDVVRLFAAELGREEPDLVLLSLVLGFVEHFLAVNRVIPTNVPELTFQPSPAPDPPGGLTYFPVADLSIIAALYARFTAQIRGAVDLSLYPREGGVSSRELVKKVSDVIWNSLSRSYFKDRAHIQSLFSFITGTKLDSSGVAFAVVGACQALGLRDVHLALSEDHAWVVFGPNGEQTAEVTWHGKGNEDRRGQTVNAGVAERVLFPPPSLVPFITVVAQATQGTPFSWATPLSSHHHPHRKGRQKSPFSWLSFPEAGTGWAIMRHMISSPPKSWLYLKGSYMRCDRKMEVAFMVCAINPSIDLHTDSLELLQLQQKLLWLLYDLGHLERYPMALGNLADLEELEPTPGRPDPLTLYHKGIASAKTYYRDEHIYPYMYLAGYHCRNRNVREALQAWADTATVIQELRIPLLGPAACPFFPSISFQPPSSRTEAWLPRPIPFSIQSLGSKATITQEVGTLIKVSIFPSLPSPPNFFFLRTVSNLQCLTTIIQQWDFHPRPHAPLLILAFFLWADPDSIILQGGPHLLPQPLGAPSPARSLGLPPMVRPLQTLQRPHCSHSYNYCREDEEIYKEFFEVANDVIPNLLKEAASLLEAGEERPGEQSQGTQSQGSALQDPECFAHLLRFYDGICKWEEGSPTPVLHVGWATFLVQSLGRFEGQVRQKVRIVSREAEAAEAEEPWGEEAREGRRRGPRRESKPEEPPPPKKPALDKGLGTGQGAVSGPPRKPPGTVAGTARGPEGGSTAQVPAPAASPPPEGPVLTFQSEKMKGMKELLVATKINSSAIKLQLTAQSQVQMKKQKVSTPSDYTLSFLKRQRKGL

SEQ ID NO: 841162 - protein, 276 aa, Homo sapiens [sequence omitted]

SEQ ID NO: 841163 - protein, 278 aa, Homo sapiens
MGLKAAQKTLFPLRSIDDVVRLFAAELGREEPDLVLLSLVLGFVEHFLAVNRVIPTNVPELTFQPSPAPDPPGGLTYFPVADLSIIAALYARFTAQIRGAVDLSLYPREGGVSSRELVKKVSDVIWNSLSRSYFKDRAHIQSLFSFITGTKLDSSGVAFAVVGACQALGLRDVHLALSEDHAWVVFGPNGEQTAEVTWHGKGNEDRRGQTVNAGVAERSWVFLKGSSCAVTADGVGSRGVQNLMNGNDRVSLDGKMSVPYRLDARLDGIRVAREPTQG

SEQ ID NO: 841164 - protein, 83 aa, Homo sapiens
GGVSSRELVKKVSDVIWNSLSRSYFKDRAHIQSLFSFITGSPEVGILSMTHFFKTLHGLQNPFKNCKPCEVRQVLFSSLQLGN

SEQ ID NO: 841165 - protein, 610 aa, Homo sapiens; identical to SEQ ID NO: 776279

SEQ ID NO: 841166 - protein, 610 aa, Homo sapiens; identical to SEQ ID NO: 776279

SEQ ID NO: 841167 - protein, 610 aa, Homo sapiens; identical to SEQ ID NO: 776279

SEQ ID NO: 841168 - protein, 610 aa, Homo sapiens; identical to SEQ ID NO: 776279

SEQ ID NO: 841169 - protein, 795 aa, Homo sapiens
MGLKAAQKTLFPLRSIDDVVRLFAAELGREEPDLVLLSLVLGFVEHFLAVNRVIPTNVPELTFQPSPAPDPPGGLTYFPVADLSIIAALYARFTAQIRGAVDLSLYPREGGVSSRELVKKVSDVIWNSLSRSYFKDRAHIQSLFSFITGTKLDSSGVAFAVVGACQALGLRDVHLALSEDHAWVVFGPNGEQTAEVTWHGKGNEDRRGQTVNAGVAERVLFPPPSLVPFITVVAQATQGTPFSWATPLSSHHHPHRKGRQKSPFSWLSFPEAGTGWAIMRHMISSPPKSWLYLKGSYMRCDRKMEVAFMVCAINPSIDLHTDSLELLQLQQKLLWLLYDLGHLERYPMALGNLADLEELEPTPGRPDPLTLYHKGIASAKTYYRDEHIYPYMYLAGYHCRNRNVREALQAWADTATVIQELRIPLLGPAACPFFPSISFQPPSSRTEAWLPRPIPFSIQSLGSKATITQEVGTLIKVSIFPSLPSPPNFFFLRTVSNLQCLTTIIQQWDFHPRPHAPLLILAFFLWADPDSIILHYNYCREDEEIYKEFFEVANDVIPNLLKEAASLLEAGEERPGEQSQGTQSQGSALQDPECFAHLLRFYDGICKWEEGSPTPVLHVGWATFLVQSLGRFEGQVRQKVRIVSREAEAAEAEEPWGEEAREGRRRGPRRESKPEEPPPPKKPALDKGLGTGQGAVSGPPRKPPGTVAGTARGPEGGSTAQVPAPAASPPPEGPVLTFQSEKMKGMKELLVATKINSSAIKLQLTAQSQVQMKKQKVSTPSDYTLSFLKRQRKGL

SEQ ID NO: 841170 - protein, 278 aa, Homo sapiens; identical to SEQ ID NO: 841163

SEQ ID NO: 841171 - protein, 215 aa, Homo sapiens
GLVRGWFSGKTNAWLGAAASEVSLASVLPPVHKHGEHLRQPHSRAFLAKKEMRILMVGLDAAGKTTILYKLKLGEIVTTIPTIGFNVETVEYKNISFTVWDVGGQDKIRPLWRHYFQNTQGLIFVVDSNDRERVNEAREELMRMLAEDELRDAVLLVFANKQDLPNAMNAAEITDKLGLHSLRHRNWYIQATCATSGDGLYEGLDWLSNQLRNQK

SEQ ID NO: 841172 - protein, 102 aa, Homo sapiens
MRWLDSLRPLLTGIASFNASGLISVSRPCMTMERVTERRIHSDGLLSQPSELRDAVLLVFANKQDLPNAMNAAEITDTLWARMSGAFTPAGARAKPGRRVPP

SEQ ID NO: 841173 - protein, 219 aa, Homo sapiens
KQIASQPGVNRTRRNKHWLGAAASEVSLASVLPPVHKHGEHLRQPHSRAFLAKKEMRILMVGLDAAGKTTILYKLKLGEIVTTIPTIGFNVETVEYKNISFTVWDVGGQDKIRPLWRHYFQNTQGLIFVVDSNDRERVNEAREELMRMLAEDELRDAVLLVFANKQDLPNAMNAAEITDKLGLHSLRHRNWYIQATCATSGDGLYEGLDWLSNQLRNQK

SEQ ID NO: 841174 - protein, 231 aa, Homo sapiens
PPLTRRAPRPEALTWPPSEPPSCGSKTNAWLGAAASEVSLASVLPPVHKHGEHLRQPHSRAFLAKKEMRILMVGLDAAGKTTILYKLKLGEIVTTIPTIGFNVETVEYKNISFTVWDVGGQDKIRPLWRHYFQNTQGLIFVVDSNDRERVNEAREELMRMLAEDELRDAVLLVFANKQDLPNAMNAAEITDKLGLHSLRHRNWYIQATCATSGDGLYEGLDWLSNQLRNQK

SEQ ID NO: 841175 - protein, 214 aa, Homo sapiens
GLRGEFDTRTNAWLGAAASEVSLASVLPPVHKHGEHLRQPHSRAFLAKKEMRILMVGLDAAGKTTILYKLKLGEIVTTIPTIGFNVETVEYKNISFTVWDVGGQDKIRPLWRHYFQNTQGLIFVVDSNDRERVNEAREELMRMLAEDELRDAVLLVFANKQDLPNAMNAAEITDKLGLHSLRHRNWYIQATCATSGDGLYEGLDWLSNQLRNQK

SEQ ID NO: 841176 - protein, 223 aa, Homo sapiens
TPHNTDDAECGPGSFSARATRWLGAAASEVSLASVLPPVHKHGEHLRQPHSRAFLAKKEMRILMVGLDAAGKTTILYKLKLGEIVTTIPTIGFNVETVEYKNISFTVWDVGGQDKIRPLWRHYFQNTQGLIFVVDSNDRERVNEAREELMRMLAEDELRDAVLLVFANKQDLPNAMNAAEITDKLGLHSLRHRNWYIQATCATSGDGLYEGLDWLSNQLRNQK

SEQ ID NO: 841177 - protein, 214 aa, Homo sapiens; identical to SEQ ID NO: 841175

SEQ ID NO: 841178 - protein, 214 aa, Homo sapiens; identical to SEQ ID NO: 841175

SEQ ID NO: 841179 - protein, 214 aa, Homo sapiens; identical to SEQ ID NO: 841175

SEQ ID NO: 841180 - protein, 164 aa, Homo sapiens
MRILMVGLDAAGKTTILYKLKLGEIVTTIPTIGFNVETVEYKNISFTVWDVGGQDKIRPLWRHYFQNTQGLIFVVDSNDRERVNEAREELMRMLAEDELRDAVLLVFANKQDLPNAMNAAEITDKLGLHSLRHRNWYIQATCATSGDGLYEGLDWLSNQLRNQK

SEQ ID NO: 841181 - protein, 214 aa, Homo sapiens; identical to SEQ ID NO: 841175

SEQ ID NO: 841182 - protein, 141 aa, Homo sapiens
MSEYPPYGLNRCKSALSPGHISFTVWDVGGQDKIRPLWRHYFQNTQGLIFVVDSNDRERVNEAREELMRMLAEDELRDAVLLVFANKQDLPNAMNAAEITDKLGLHSLRHRNWYIQATCATSGDGLYEGLDWLSNQLRNQK

SEQ ID NO: 841183 - protein, 214 aa, Homo sapiens; identical to SEQ ID NO: 841175

SEQ ID NO: 841184 - protein, 214 aa, Homo sapiens; identical to SEQ ID NO: 841175

SEQ ID NO: 841185 - protein, 117 aa, Homo sapiens
GLRGEFDTRTNAWLGAAASEVSLASVLPPVHKHGEHLRQPHSRAFLAKKEMRILMVGLDAAGKTTILYKLKLGEIVTTIPTIGFNVETVEYKTTCATSGDGLYEGLDWLSNQLRNQK

SEQ ID NO: 841186 - protein, 214 aa, Homo sapiens; identical to SEQ ID NO: 841175

SEQ ID NO: 841187 - protein, 214 aa, Homo sapiens; identical to SEQ ID NO: 841175

SEQ ID NO: 841188 - protein, 214 aa, Homo sapiens; identical to SEQ ID NO: 841175

SEQ ID NO: 841189 - protein, 214 aa, Homo sapiens; identical to SEQ ID NO: 841175

SEQ ID NO: 841190 - protein, 221 aa, Homo sapiens
GLRGEFDTRTNAWLGAAASEVSLASVLPPVHKHGEHLRQPHSRAFLAKKEMRILMVGLDAAGKTTILYKLKLGEIVTTIPTIGFNVETVEYKNISFTVWDVGGQDKIRPLWRHYFQNTQGLIFVVDSNDRERVNEAREELMRMLAEDELRDAVLLVFANKQDLPNAMNAAEITDKLGLHSLRHRNWYIQATCATSGDGLPQPARVRFAHRKRQPLLFSFVF

SEQ ID NO: 841191 - protein, 166 aa, Homo sapiens
GLRGEFDTRTNAWLGAAASEVSLASVLPPVHKHGEHLRQPHSRAFLAKKEMRILMVGLDAAGKTTILYKLKLGEIVTTIPTIGFNVETVEYKNISFTVWDVGGQDKIRPLWRHYFQNTQGLIFVVDSNDRERVNEAREELMRMLAEDELRDAVLLVFANKQTSPTP

SEQ ID NO: 841192 - protein, 105 aa, Homo sapiens
MCLSLCSHGSQGPGWEPTATPTKCRRPPLPTFKASLWERRAPSVPSVAVWPRSGSVVPQQLVLASDTLGQDVWGPHPSRSACKAGQAGSTLDPHKPLGSTPHLCV

SEQ ID NO: 841193 - protein, 215 aa, Homo sapiens; identical to SEQ ID NO: 841171

SEQ ID NO: 841194 - protein, 231 aa, Homo sapiens; identical to SEQ ID NO: 841174

SEQ ID NO: 841195 - protein, 116 aa, Homo sapiens
MRILMVGLDAAGKTTILYKLKLGEIVTTIPTIGFNVETVEYKNISFTVWDVGGQDKIRPLWRHYFQNTQGLIFVVDSNDRERVNEAREELMRMLAEDELRDAVLLVFANKQTSPTP

SEQ ID NO: 841196 - protein, 214 aa, Homo sapiens; identical to SEQ ID NO: 841175

SEQ ID NO: 841197 - protein, 214 aa, Homo sapiens; identical to SEQ ID NO: 841175

SEQ ID NO: 841198 - protein, 214 aa, Homo sapiens; identical to SEQ ID NO: 841175

SEQ ID NO: 841199 - protein, 214 aa, Homo sapiens; identical to SEQ ID NO: 841175

SEQ ID NO: 841200 - protein, 214 aa, Homo sapiens; identical to SEQ ID NO: 841175

SEQ ID NO: 841201 - protein, 214 aa, Homo sapiens; identical to SEQ ID NO: 841175

SEQ ID NO: 841202 - protein, 214 aa, Homo sapiens; identical to SEQ ID NO: 841175

SEQ ID NO: 841203 - protein, 263 aa, Homo sapiens
GLRGEFDTRTNAWLGAAASEVSLASVLPPVHKHGEHLRQPHSRAFLAKKEMRILMVGLDAAGKTTILYKLKLGEIVTTIPTIGFNVETVEYKNISFTVWDVGGQDKIRPLWRHYFQNTQGPDLVLTTIPTIGFNVETVEYKNISFTVWDVGGQDKIRPLWRHYFQNTQGLIFVVDSNDRERVNEAREELMRMLAEDELRDAVLLVFANKQDLPNAMNAAEITDKLGLHSLRHRNWYIQATCATSGDGLYEGLDWLSNQLRNQK

SEQ ID NO: 841204 - protein, 259 aa, Homo sapiens
GLRGEFDTRTNAWLGAAASEVSLASVLPPVHKHGEHLRQPHSRAFLAKKEMRILMVGLDAAGKTTILYKLKLGEIVTTIPTIGFNVETVEYKNISFTVWDVGGQDKIRPLWRHYFQNTQGLIFVVDSNDRERVNEAREELMRMLAEDELRDAVLLVFANKQVGARASLGNVRSQCGFRLVVGVTGGWWGPFLCPVDSPSHQPFLPPDLPNAMNAAEITDKLGLHSLRHRNWYIQATCATSGDGLYEGLDWLSNQLRNQK

SEQ ID NO: 841205 - protein, 192 aa, Homo sapiens
GLRGEFDTRTNAWLGAAASEVSLASVLPPVHKHGEHLRQPHSRAFLAKKEMRILMVGLDAAGKTTILYKLKLGEIVTTIPTIGFNVETVEYKNISFTVWDVGGQDKIRPLWRHYFQNTQGLIFVVDSNDRERVNEAREEDLPNAMNAAEITDKLGLHSLRHRNWYIQATCATSGDGLYEGLDWLSNQLRNQK

SEQ ID NO: 841206 - protein, 214 aa, Homo sapiens; identical to SEQ ID NO: 841175

SEQ ID NO: 841207 - protein, 214 aa, Homo sapiens; identical to SEQ ID NO: 841175

SEQ ID NO: 841208 - protein, 214 aa, Homo sapiens; identical to SEQ ID NO: 841175

SEQ ID NO: 841209 - protein, 297 aa, Homo sapiens
GLRGEFDTRTNAWLGAAASEVSLASVLPPVHKHGEHLRQPHSRAFLAKKEMRILMVGLDAAGKTTILYKLKLGEIVTTIPTIGFNVETVEYKNISFTVWDVGGQDKIRPLWRHYFQNTQGLIFVVDSNDRERVNEAREELMRMLAEDELRDAVLLVFANKQDLPNAMNAAEITDTVIIAIRIKSLNYLKKKKNNMPHTKNTKKNKDEDTPRTPSTHNSEHPSYEDIYSTEHDLTGTTKTIANKSQSEDHMSSQHGRGRKHNSTADQDGSSSHKRRDNEQNTRDGRQHDPRQRATTQT

SEQ ID NO: 841210 - protein, 172 aa, Homo sapiens
GLRGEFDTRTNAWLGAAASEVSLASVLPPVHKHGEHLRQPHSRAFLAKKEMRILMVGLDAAGKTTILYKLKLGEIVTTIPTIGFNVETVEYKNISFTVWDVGGQDKIRPLWRHYFQNTQGLIFVVDSNDRERVNEAREELMRMLAEDELRDAVLLVFANKQAIQRLRPFNAS

SEQ ID NO: 841211 - protein, 108 aa, Homo sapiens
MGGGRASGRQAWSCGPGVHPLGPSHPQRGPGVPKGTLVDVIVVAATILFVSGAFASVRPSRTLWGGGSEGPRGETEAQGSERACPAGYWMRLCPLTMLDLAAGGETEA

SEQ ID NO: 841212 - protein, 992 aa, Homo sapiens
RPPEGSPRLRRLRGGRAAAGAMLEELECGAPGARGAATAMDCKDRPAFPVKKLIQARLPFKRLNLVPKGKADDMSDDQGTSVQSKSPDLEASLDTLENNCHVGSDIDFRPKLVNGKGPLDNFLRNRIETSIGQSTVIIDLTEDSNEQPDSLVDHNKLNSEASPSREAINGQREDTGDQQGLLKAIQNDKLAFPGETLSDIPCKTEEEGVGCGGAGRRGDSQECSPRSCPELTSGPRMCPRKEQDSWSEAGGILFKGKVPMVVLQDILAVRPPQIKSLPATPQGKNMTPESEVLESFPEEDSVLSHSSLSSPSSTSSPEGPPAPPKQHSSTSPFPTSTPLRRITKKFVKGSTEKNKLRLQRDQERLGKQLKLRAEREEKEKLKEEAKRAKEEAKKKKEEEKELKEKERREKREKDEKEKAEKQRLKEERRKERQEALEAKAKSRLKCHLLSHRAKLEEKRKKEEEKRLREEEKRIKAEKAEITRFFQKPKTPQAPKTLAGSCGKFAPFEIKEHMVLAPRRRTAFHPDLCSQLDQLLQQQSGEFSFLKDLKGRQPLRSGPTHVSTRNADIFNSDVVIVERGKGDGVPERRKFGRMKLLQFCENHRPAYWGTWNKKTALIRARDPWAQDTKLLDYEVDSDEEWEEEEPGESLSHSEGDDDDDMGEDEDEDDGFFVPHGYLSEDEGVTEECADPENHKVRQKLKAKEWDEFLAKGKRFRVLQPVKIGCVWAADRDCAGDDLKVLQQFAACFLETLPAQEEQTPKASKRERRDEQILAQLLPLLHGNVNGSKVIIREFQEHCRRGLLSNHTGSPRSPSTTYLHTPTPSEDAAIPSKSRLKRLISENSVYEKRPDFRMCWYVHPQVLQSFQQEHLPVPCQWSYVTSVPSAPKEDSGSVPSTGPSQGTPISLKRKSAGSMCITQFMKKRRHDGQIGAEDMDGFQADTEEEEEEEGDCMIVDVPDAVEVQAPCGAASGAGGGVGVDTGKATLTASPLGAS

SEQ ID NO: 841213 - protein, 480 aa, Homo sapiens
MVLAPRRRTAFHPDLCSQLDQLLQQQSGEFSFLKDLKGRQPLRSGPTHVSTRNADIFNSDVVIVERGKGDGVPERRKFGRMKLLQFCENHRPAYWGTWNKKTALIRARDPWAQDTKLLDYEVDSDEEWEEEEPGESLSHSEGDDDDDMGEDEDEDDGFFVPHGYLSEDEGVTEECADPENHKVRQKLKAKEWDEFLAKGKRFRVLQPVKIGCVWAADRDCAGDDLKVLQQFAACFLETLPAQEEQTPKASKRERRDEQILAQLLPLLHGNVNGSKVIIREFQEHCRRGLLSNHTGSPRSPSTTYLHTPTPSEDAAIPSKSRLKRLISENSVYEKRPDFRMCWYVHPQVLQSFQQEHLPVPCQWSYVTSVPSAPKEDSGSVPSTGPSQGTPISLKRKSAGSMCITQFMKKRRHDGQIGAEDMDGFQADTEEEEEEEGDCMIVDVPDAVEVQAPCGAASGAGGGVGVDTGKATLTASPLGAS

SEQ ID NO: 841214 - protein, 743 aa, Homo sapiens
RPPEGSPRLRRLRGGRAAAGAMLEELECGAPGARGAATAMDCKDRPAFPVKKLIQARLPFKRLNLVPKGKADDMSDDQGTSVQSKSPDLEASLDTLENNCHVGSDIDFRPKLVNGKGPLDNFLRNRIETSIGQSTVIIDLTEDSNEQPDSLVDHNKLNSEASPSREAINGQREDTGDQQGLLKAIQNDKLAFPGETLSDIPCKTEEEGVGCGGAGRRGDSQECSPRSCPELTSGPRMCPRKEQDSWSEAGGILFKGKVPMVVLQDILAVRPPQIKSLPATPQGKNMTPESEVLESFPEEDSVLSHSSLSSPSSTSSPEGPPAPPKQHSSTSPFPTSTPLRRITKKFVKGSTEKNKLRLQRDQERLGKQLKLRAEREEKEKLKEEAKRAKEEAKKKKEEEKELKEKERREKREKDEKEKAEKQRLKEERRKERQEALEAKLEEKRKKEEEKRLREEEKRIKAEKAEITRFFQKPKTPQAPKTLAGSCGKFAPFEIKEHMVLAPRRRTAFHPDLCSQLDQLLQQQSGEFSFLKDLKGRQPLRSGPTHVSTRNADIFNSDVVIVERGKGDGVPERRKFGRMKLLQFCENHRPAYWGTWNKKTALIRARDPWAQDTKLLDYEVDSDEEWEEEEPGESLSHSEGDDDDDMGEDEDEDDGFFVPHGYLSEDEGVTEECADPENHKVRQKLKAKEWDEFLAKGKRFRVLQPVKIGCVWAADRDCAGDDLKVLQQFAACFLETLPAQEADT

SEQ ID NO: 841215 - protein, 960 aa, Homo sapiens
RPPEGSPRLRRLRGGRAAAGAMLEELECGAPGARGAATARLPFKRLNLVPKGKADDMSDDQGTSVQSKSPDLEASLDTLENNCHVGSDIDFRPKLVNGKGPLDNFLRNRIETSIGQSTVIIDLTEDSNEQPDSLVDHNKLNSEASPSREAINGQREDTGDQQGLLKAIQNDKLAFPGETLSDIPCKTEEEGVGCGGAGRRGDSQECSPRSCPELTSGPRMCPRKEQDSWSEAGGILFKGKVPMVVLQDILAVRPPQIKSLPATPQGKNMTPESEVLESFPEEDSVLSHSSLSSPSSTSSPEGPPAPPKQHSSTSPFPTSTPLRRITKKFVKGSTEKNKLRLQRDQERLGKQLKLRAEREEKEKLKEEAKRAKEEAKKKKEEEKELKEKERREKREKDEKEKAEKQRLKEERRKERQEALEAKLEEKRKKEEEKRLREEEKRIKAEKAEITRFFQKPKTPQAPKTLAGSCGKFAPFEIKEHMVLAPRRRTAFHPDLCSQLDQLLQQQSGEFSFLKDLKGRQPLRSGPTHVSTRNADIFNSDVVIVERGKGDGVPERRKFGRMKLLQFCENHRPAYWGTWNKKTALIRARDPWAQDTKLLDYEVDSDEEWEEEEPGESLSHSEGDDDDDMGEDEDEDDGFFVPHGYLSEDEGVTEECADPENHKVRQKLKAKEWDEFLAKGKRFRVLQPVKIGCVWAADRDCAGDDLKVLQQFAACFLETLPAQEEQTPKASKRERRDEQILAQLLPLLHGNVNGSKVIIREFQEHCRRGLLSNHTGSPRSPSTTYLHTPTPSEDAAIPSKSRLKRLISENSVYEKRPDFRMCWYVHPQVLQSFQQEHLPVPCQWSYVTSVPSAPKEDSGSVPSTGPSQGTPISLKRKSAGSMCITQFMKKRRHDGQIGAEDMDGFQADTEEEEEEEGDCMIVDVPDAVEVQAPCGAASGAGGGVGVDTGKATLTASPLGAS

SEQ ID NO: 841216 - protein, 453 aa, Homo sapiens
RPPEGSPRLRRLRGGRAAAGAMLEELECGAPGARGAATAMDCKDRPAFPVKKLIQARLPFKRLNLVPKGKADDMSDDQGTSVQSKSPDLEASLDTLENNCHVGSDIDFRPKLVNGKGPLDNFLRNRIETSIGQSTVIIDLTEDSNEQPDSLVDHNKLNSEASPSREAINGQREDTGDQQGLLKAIQNDKLAFPGETLSDIPCKTEEEGVGCGGAGRRGDSQECSPRSCPELTSGPRMCPRKEQDSWSEAGGILFKGKVPMVVLQDILAVRPPQIKSLPATPQGKNMTPESEVLESFPEEDSVLSHSSLSSPSSTSSPEGPPAPPKQHSSTSPFPTSTPLRRITKKFVKGSTEKNKLRLQRDQERLGKQLKLRAEREEKEKLKEEAKRAKEEAKKKKEEEKELKEKERREKREKDEKEKAEKQRLKEERRKERQEALELNLRKKGKGWSWIQRS

SEQ ID NO: 841217 - protein, 600 aa, Homo sapiens
MKIGSDEEEEKKEEAKKKKEEEKELKEKERREKREKDEKEKAEKQRLKEERRKERQEALEAKLEEKRKKEEEKRLREEEKRIKAEKAEITRFFQKPKTPQAPKTLAGSCGKFAPFEIKEHMVLAPRRRTAFHPDLCSQLDQLLQQQSGEFSFLKDLKGRQPLRSGPTHVSTRNADIFNSDVVIVERGKGDGVPERRKFGRMKLLQFCENHRPAYWGTWNKKTALIRARDPWAQDTKLLDYEVDSDEEWEEEEPGESLSHSEGDDDDDMGEDEDEDDGFFVPHGYLSEDEGVTEECADPENHKVRQKLKAKEWDEFLAKGKRFRVLQPVKIGCVWAADRDCAGDDLKVLQQFAACFLETLPAQEEQTPKASKRERRDEQILAQLLPLLHGNVNGSKVIIREFQEHCRRGLLSNHTGSPRSPSTTYLHTPTPSEDAAIPSKSRLKRLISENSVYEKRPDFRMCWYVHPQVLQSFQQEHLPVPCQWSYVTSVPSAPKEDSGSVPSTGPSQGTPISLKRKSAGSMCITQFMKKRRHDGQIGAEDMDGFQADTEEEEEEEGDCMIVDVPDAVEVQAPCGAASGAGGGVGVDTGKATLTASPLGAS

SEQ ID NO: 841218 - protein, 590 aa, Homo sapiens
RPPEGSPRLRRLRGGRAAAGAMLEELECGAPGARGAATAMDCKDRPAFPVKKLIQARLPFKRLNLVPKGKADDMSDDQGTSVQSKSPDLEASLDTLENNCHVGSDIDFRPKLVNGKGPLDNFLRNRIETSIGQSTVIIDLTEDSNEQPDSLVDHNKLNSEASPSREAINGQREDTGDQQGLLKAIQNDKLAFPGETLSDIPCKTEEEGVGCGGAGRRGDSQECSPRSCPELTSGPRMCPRKEQDSWSEAGGILFKGKVPMVVLQDILAVRPPQIKSLPATPQGKNMTPESEVLESFPEEDSVLSHSSLSSPSSTSSPEGPPAPPKQHSSTSPFPTSTPLRRITKKFVKGSTEKNKLRLQRDQERLGKQLKLRAEREEKEKLKEEAKRAKEEAKKKKEEEKELKEKERREKREKDEKEKAEKQRLKEERRKERQEALEAKAKSRLKCHLLSHRAKLEEKRKKEEEKRLREEEKRIKAEKAEITRFFQKPKTPQAPKTLAGSCGKFAPFEIKEHMVLAPRRRTAFHPDLCSQLDQLLQQQSGEFSFLKDLKGQRAKEEAKKKKEEEKELKEKERREKREKDEKENASPLGAS

SEQ ID NO: 841219 - protein, 140 aa, Homo sapiens
GKAALRQQGRARWISGALAKEEVQRPCSRLRGRSVPGWWGAGRVNLRAGEQVTSRRGTTPQPLPVPTVRWRVPPWGCCRPHEAAGWGLPPGSPEGPASSRPSLSCPAEVQAPCGAASGAGGGVGVDTGKATLTASPLGAS

SEQ ID NO: 841220 - protein, 977 aa, Homo sapiens
RPPEGSPRLRRLRGGRAAAGAMLEELECGAPGARGAATAMDCKDRPAFPVKKLIQARLPFKRLNLVPKGKADDMSDDQGTSVQSKSPDLEASLDTLENNCHVGSDIDFRPKLVNGKGPLDNFLRNRIETSIGQSTVIIDLTEDSNEQPDSLVDHNKLNSEASPSREAINGQREDTGDQQGLLKAIQNDKLAFPGETLSDIPCKTEEEGVGCGGAGRRGDSQECSPRSCPELTSGPRMCPRKEQDSWSEAGGILFKGKVPMVVLQDILAVRPPQIKSLPATPQGKNMTPESEVLESFPEEDSVLSHSSLSSPSSTSSPEGPPAPPKQHSSTSPFPTSTPLRRITKKFVKGSTEKNKLRLQRDQERLGKQLKLRAEREEKEKLKEEAKRAKEEAKKKKEEEKELKEKERREKREKDEKEKAEKQRLKEERRKERQEALEAKLEEKRKKEEEKRLREEEKRIKAEKAEITRFFQKPKTPQAPKTLAGSCGKFAPFEIKEHMVLAPRRRTAFHPDLCSQLDQLLQQQSGEFSFLKDLKGRQPLRSGPTHVSTRNADIFNSDVVIVERGKGDGVPERRKFGRMKLLQFCENHRPAYWGTWNKKTALIRARDPWAQDTKLLDYEVDSDEEWEEEEPGESLSHSEGDDDDDMGEDEDEDDGFFVPHGYLSEDEGVTEECADPENHKVRQKLKAKEWDEFLAKGKRFRVLQPVKIGCVWAADRDCAGDDLKVLQQFAACFLETLPAQEEQTPKASKRERRDEQILAQLLPLLHGNVNGSKVIIREFQEHCRRGLLSNHTGSPRSPSTTYLHTPTPSEDAAIPSKSRLKRLISENSVYEKRPDFRMCWYVHPQVLQSFQQEHLPVPCQWSYVTSVPSAPKEDSGSVPSTGPSQGTPISLKRKSAGSMCITQFMKKRRHDGQIGAEDMDGFQADTEEEEEEEGDCMIVDVPDAVEVQAPCGAASGAGGGVGVDTGKATLTASPLGAS

SEQ ID NO: 841221 - protein, 977 aa, Homo sapiens; identical to SEQ ID NO: 841220

SEQ ID NO: 841222 - protein, 902 aa, Homo sapiens
RPPEGSPRLRRLRGGRAAAGAMLEELECGAPGARGAATAMDCKDRPAFPVKKLIQARLPFKRLNLVPKGKADDMSDDQGTSVQSKSPDLEASLDTLENNCHVGSDIDFRPKLVNGKGPLDNFLRNRIETSIGQSTVIIDLTEDSNEQPDSLVDHNKLNSEASPSREAINGQREDTGDQQGLLKAIQNDKLAFPGETLSDIPCKTEEEGVGCGGAGRRGDSQECSPRSCPELTSGPRMCPRKEQDSWSEAGGILFKGKVPMVVLQDILAVRPPQIKSLPATPQGKNMTPESEVLESFPEEDSVLSHSSLSSPSSTSSPEGPPAPPKQHSSTSPFPTSTPLRRITKKFVKGSTEKNKLRLQRDQERLGKQLKLRAEREEKEKLKEEAKRAKEEAKKKKEEEKELKEKERREKREKDEKEKAEKQRLKEERRKERQEALEAKLEEKRKKEEEKRLREEEKRIKAEKAEITRFFQKPKTPQAPKTLAGSCGKFAPFEIKEHMVLAPRRRTAFHPDLCSQLDQLLQQQSGEFSFLKDLKGRQPLRSGPTHVSTRNADIFNSDVVIVERGKGDGVPERRKFGRMKLLQFCENHRPAYWGTWNKKTALIRARDPWAQDTKLLDYEVDSDEEWEEEEPGESLSHSEGDDDDDMGEDEDEDDGFFVPHGYLSEDEGVTEECADPENHKVRQKLKAKEWDEFLAKGKRFRVLQPVKIGCVWAADRDCAGDDLKVLQQFAACFLETLPAQEEQTPKASKRERRDEQILAQLLPLLHGNVNGSKVIIREFQEHCRRGLLSNHTGSPRSPSTTYLHTPTPSEDAAIPSKSRLKRLISENQFMKKRRHDGQIGAEDMDGFQADTEEEEEEEGDCMIVDVPDAVEVQAPCGAASGAGGGVGVDTGKATLTASPLGAS

SEQ ID NO: 841223 - protein, 900 aa, Homo sapiens
RPPEGSPRLRRLRGGRAAAGAMLEELECGAPGARGAATAMDCKDRPAFPVKKLIQARLPFKRLNLVPKGKADDMSDDQGTSVQSKSPDLEASLDTLENNCHVGSDIDFRPKLVNGKGPLDNFLRNRIETSIGQSTVIIDLTEDSNEQPDSLVDHNKLNSEASPSREAINGQREDTGDQQGLLKAIQNDKLAFPGETLSDIPCKTEEEGVGCGGAGRRGDSQECSPRSCPELTSGPRMCPRKEQDSWSEAGGILFKGKVPMVVLQDILAVRPPQIKSLPATPQGKNMTPESEVLESFPEEDSVLSHSSLSSPSSTSSPEGPPAPPKQHSSTSPFPTSTPLRRITKKFVKGSTEKNKLRLQRDQERLGKQLKLRAEREEKEKLKEEAKRAKEEAKKKKEEEKELKEKERREKREKDEKEKAEKQRLKEERRKERQEALEAKLEEKRKKEEEKRLREEEKRIKAEKAEITRFFQKPKTPQAPKTLAGSCGKFAPFEIKEHMVLAPRRRTAFHPDLCSQLDQLLQQQSGEFSFLKDLKGRQPLRSGPTHVSTRNADIFNSDVVIVERGKGDGVPERRKFGRMKLLQFCENHRPAYWGTWNKKTALIRARDPWAQDTKLLDYEVDSDEEWEEEEPGESLSHSEGDDDDDMGEDEDEDDGFFVPHGYLSEDEGVTEECADPENHKVRQKLKAKEWDEFLAKGKRFRVLQPVKIGCVWAADRDCAGDDLKVLQQFAACFLETLPAQEEQTPKASKRERRDEQILAQLLPLLHGNVNGSKVIIREFQEHCRRGLLSNHTGSPRSPSTTYLHTPTPSEDAAIPSKSRLKRLISENSVYEKRPDFRMCWYVHPQVLQSFQQEHLPVPCQWSYVTSVPQPGHSHLAEEEVSGQHVHHPIHEEAQARRPDWC

SEQ ID NO: 841224 - protein, 904 aa, Homo sapiens [sequence omitted]

SEQ ID NO: 841225 - protein, 480 aa, Homo sapiens; identical to SEQ ID NO: 841213

SEQ ID NO: 841226 - protein, 356 aa, Homo sapiens
RPPEGSPRLRRLRGGRAAAGAMLEELECGAPGARGAATAMDCKDRPAFPVKKLIQARLPFKRLNLVPKGKADDMSDDQGTSVQSKSPDLEASLDTLENNCHVGSDIDFRPKLVNGKGPLDNFLRNRIETSIGQSTVIIDLTEDSNEQPDSLVDHNKLNSEASPSREAINGQREDTGDQQGLLKAIQNDKLAFPGETLSDIPCKTEEEGVGCGGAGRRGDSQECSPRSCPELTSGPRMCPRKEQDSWSEAGGILFKGKVPMVVLQDILAVRPPQIKSLPATPQGKNMTPESEVLESFPEEDSVLSHSSLSSPSSTSSPEGPPAPPKQHSSTSPFPTSTPLRRITKEIRQRSTEKEPS

SEQ ID NO: 841227 - protein, 31 aa, Homo sapiens
MRSCCFFPVLAVTCLLALQSWHFYPQGQLGH

SEQ ID NO: 841228 - protein, 344 aa, Homo sapiens
MASGVGAAFEELPHDGTCDECEPDEAPGAEEVCRECGFCYCRRHAEAHRQKFLSHHLAEYVHGSQAWTPPADGEGAGKEEAEVKVEQEREIESEAGEESESEEESESEEESETEEESEDESDEESEEDSEEEMEDEQESEAEEDNQEEGESEAEGETEAESEFDPEIEMEAERVAKRKCPDHGLDLSTYCQEDRQLICVLCPVIGAHQGHQLSTLDEAFEELRSKDSGGLKAAMIELVERLKFKSSDPKVTRDQMKMFIQQEFKKVQKVIADEEQKALHLVDIQEAMATAHVTEILADIQSHMDRLMTQMAQAKEQLDTSNESAEPKAEGDEEGPSGASEEEDT

SEQ ID NO: 841229 - protein, 218 aa, Homo sapiens
MASRMLREERRESEAEEDNQEEGESEAEGETEAESEFDPEIEMEAERVAKRKCPDHGLDLSTYCQEDRQLICVLCPVIGAHQGHQLSTLDEAFEELRSKDSGGLKAAMIELVERLKFKSSDPKVTRDQMKMFIQQEFKKVQKVIADEEQKALHLVDIQEAMATAHVTEILADIQSHMDRLMTQMAQAKEQLDTSNESAEPKAEGDEEGPSGASEEEDT

SEQ ID NO: 841230 - protein, 128 aa, Homo sapiens
GIGLNEKFLYCCEKWIQLLEKIEEALKVDVANSLPELLEQQKTYKMLEAEVSINQTIADSYVTQSLQLLDTTEIENRPEFITEFSKLTDRWQNAVQGVRQRKGDVDGLVRQWQDFTTSVENLFRFLTD

SEQ ID NO: 841231 - protein, 99 aa, Homo sapiens
WCAGVGVGVGVDVGVQVLVWVLVCGAGVGVGVGVGVQVLVWMLVWVLVCTYWCAGVGVDVGVDIGVQVLVWVLVWTLACRCWCGCWCAGVGVDIGVQVL

SEQ ID NO: 841232 - protein, 101 aa, Homo sapiens
MRRTLRPPAAPRSPGIRRLRRADGELCLGLPSRKTTGRGACISAVPPALRFFECVSKVEEEEADSWDGKSLHLGTQGQIWGWAPTVYFMQISRGKYGAGHP

SEQ ID NO: 841233 - protein, 131 aa, Homo sapiens
MPDVGRPAATQRCESTPEDQALGEVDAPMIVQISDISLQDYLAVTEKFAKYLPSPVAGGLMPAKAFRKAQCAIVERLNKSMIDARRNKGQEGHDVGIGPGLLGDINLPPGEPSEACGAPIHGPGDHPWGRR

SEQ ID NO: 841234 - protein, 587 aa, Homo sapiens
RPRPGLRGGRAPCEVTMEAGGLPLELWRMILAYLHLPDLGRCSLVCRAWYELILSLDSTRWRQLCLGCTECRHPNWPNQPDVEPESWREAFKQHYLASKTWTKNALDLESSICFSLFRRRRERRTLSVGPGREFDSLGSALAMASLYDRIVLFPGVYEEQGEIILKVPVEIVGQGKLGEVALLASIDQHCSTTRLCNLVFTPAWFSPIMYKTTSGHVQFDNCNFENGHIQVHGPGTCQVKFCTFKNTHIFLHNVPLCVLENCEFVGSENNSVTVEGHPSADKNWAYKYLLGLIKSSPTFLPTEDSDFLMSLDLESRDQAWSPKTCDIVIEGSQSPTSPASSSPKPGSKAGSQEAEVGSDGERVAQTPDSSDGGLSPSGEDEDEDQLMYRLSYQVQGPRPVLGGSFLGPPLPGASIQLPSCLVLNSLQQELQKDKEAMALANSVQGCLIRKCLFRDGKGGVFVCSHGRAKMEGNIFRNLTYAVRCIHNSKIIMLRNDIYRCRASGIFLRLEGGGLIAGNNIYHNAEAGVDIRKKSNPLILCNQIHHGLRSGIVVLGNGKGIIRNNQIFSNKEAGIYILYHGNPVVRCV

SEQ ID NO: 841235 - protein, 571 aa, Homo sapiens
MEAGGLPLELWRMILAYLHLPDLGRCSLVCRAWYELILSLDSTRWRQLCLGCTECRHPNWPNQPDVEPESWREAFKQHYLASKTWTKNALDLESSICFSLFRRRRERRTLSVGPGREFDSLGSALAMASLYDRIVLFPGVYEEQGEIILKVPVEIVGQGKLGEVALLASIDQHCSTTRLCNLVFTPAWFSPIMYKTTSGHVQFDNCNFENGHIQVHGPGTCQVKFCTFKNTHIFLHNVPLCVLENCEFVGSENNSVTVEGHPSADKNWAYKYLLGLIKSSPTFLPTEDSDFLMSLDLESRDQAWSPKTCDIVIEGSQSPTSPASSSPKPGSKAGSQEAEVGSDGERVAQTPDSSDGGLSPSGEDEDEDQLMYRLSYQVQGPRPVLGGSFLGPPLPGASIQLPSCLVLNSLQQELQKDKEAMALANSVQGCLIRKCLFRDGKGGVFVCSHGRAKMEGNIFRNLTYAVRCIHNSKIIMLRNDIYRCRASGIFLRLEGGGLIAGNNIYHNAEAGVDIRKKSNPLILCNQIHHGLRSGIVVLGNGKGIIRNNQIFSNKEAGIYILYHGNPVVRCV

SEQ ID NO: 841236 - protein, 44 aa, Homo sapiens
STVPARNLWIQHASPISEEKAKRTTSDNSPLESMREALSKTSLT

SEQ ID NO: 841237 - protein, 107 aa, Homo sapiens
RCKPLRPALDTSFIETWLNQEVGKGVYLGVRQFEDILIQEEEKLKKINGDRSSCGRRGSKEPAVMTENMGLKESQLRPLGRSRERRWGTRWISSRIQFLVRFLKFMA

SEQ ID NO: 841238 - protein, 526 aa, Homo sapiens
RSMFTSGLTESTQKEVRIVGVEAESMDLVLNYAYTSRVILTEANVQALFTAASIFQIPSIQDQCAKYMISHLDPQNSIGVFIFADHYGHQELGDRSKEYIRKKFLCVTKEQEFLQLTKDQLISILDSDDLNVDREEHVYESIIRWFEHEQNEREVHLPEIFAKCIRFPLMEDTFIEKIPPQFAQAIAKSCVEKGPSNTNGCTQRLGMTASEMIICFDAAHKHSGKKQTVPCLDIVTGRVFKLCKPPNDLREVGILVSPDNDIYIAGGYRPSSSEVSIDHKAENDFWMYDHSTNRWLSKPSLLRARIGCKLVYCCGKMYAIGGRVYEGDGRNSLKSVECYDSRENCWTTVCAMPVAMEFHNAVEYKEKIYVLQGEFFLFYEPQKDYWGFLTPMTVPRIQGLAAVYKDSIYYIAGTCGNHQRMFTVEAYDIELNKWTRKKDFPCDQSINPYLKLVLFQNKLHLFVRATQVTVEEHVFRTSRKNSLYQYDDIADQWMKVYETPDRLWDLGRHFECAVAKLYPQCLQKVL

SEQ ID NO: 841239 - protein, 526 aa, Homo sapiens; identical to SEQ ID NO: 841238

SEQ ID NO: 841240 - protein, 112 aa, Homo sapiens [sequence omitted]

SEQ ID NO: 841241 - protein, 177 aa, Homo sapiens
MPQTPPFSAMFDSSGYNRNLYQSAEDSCGGLYYHDNNLLSGSLEALIQHLVPNVDYYPDRTYIFTFLLSSRLFMHPYELMAKVCHLCVEHQRLSDPDSDKNQMRKIAPKILQLLTEWTETFPYDFRDERMMRNLKDLAHRIASGEEQTYRKNVQQMMQCLIRKLAALSQYEEVLAKI

SEQ ID NO: 841242 - protein, 31 aa, Homo sapiens
MMLAVGRACPLSDPGPSLLCLGYSIFLSCRG

SEQ ID NO: 841243 - protein, 344 aa, Homo sapiens
MLSSFPHRKTWRKSKKTVKVTRSYPTFPSLNAWEEFRGLLPVDGEPNPGAGLGVEEGLLCRVVHSPEFNLFLDSVVFESNFIQVKRGRNWRDVYKASNTMALGVTSSVPCLPLPNILLMASVKWHQGQNQTWNRPSIAPNIFLKRILPLRFVELQVCDHYQRILQLRTVTEKIYYLKLHPDHPETVFHFWIRLVQILQKGLSITTKDPRILVTHCLVPKNCSSPSGDSKLVQKKLQASQPSESLIQLMTKGESEALSQIFADLHQQNQLSFRSSRKVETNKNSSGKDSSREDSIPCTCDLRWRASFTYGEWERENPSGLQPLSLLSTLAASTGPQLAPPIGNSI

SEQ ID NO: 841244 - protein, 245 aa, Homo sapiens
MALGVTSSVPCLPLPNILLMASVKWHQGQNQTWNRPSIAPNIFLKRILPLRFVELQVCDHYQRILQLRTVTEKIYYLKLHPDHPETVFHFWIRLVQILQKGLSITTKDPRILVTHCLVPKNCSSPSGDSKLVQKKLQASQPSESLIQLMTKGESEALSQIFADLHQQNQLSFRSSRKVETNKNSSGKDSSREDSIPCTCDLRWRASFTYGEWERENPSGLQPLSLLSTLAASTGPQLAPPIGNSI

SEQ ID NO: 841245 - protein, 262 aa, Homo sapiens
MVKRGRNWRDVYKASNTMALGVTSSVPCLPLPNILLMASVKWHQGQNQTWNRPSIAPNIFLKRILPLRFVELQVCDHYQRILQLRTVTEKIYYLKLHPDHPETVFHFWIRLVQILQKGLSITTKDPRILVTHCLVPKNCSSPSGDSKLVQKKLQASQPSESLIQLMTKGESEALSQIFADLHQQNQLSFRSSRKVETNKNSSGKDSSREDSIPCTCDLRWRASFTYGEWERENPSGLQPLSLLSTLAASTGPQLAPPIGNSI

SEQ ID NO: 841246 - protein, 423 aa, Homo sapiens
TRLRSDRRRASASAAMIPPEQPQQQLQPPSPAPPNHVVTTIENLPAEGSGGGGSLSASSRAGVRQRIRKVLNREMLISVALGQVLSLLICGIGLTSKYLSEDFHANTPVFQSFLNYILLFLVYTTTLAVRQGEENLLAILRRRWWKYMILGLIDLEANYLVVKAYQYTTLTSIQLLDCFVIPVVILLSWFFLLIRYKAVHFIGIVVCILGMGCMVGADVLVGRHQGAGENKLVGDLLVLGGATLYGISNVWEEYIIRTLSRVEFLGMIGLFGAFFSGIQLAIMEHKELLKVPWDWQIGLLYVGFSACMFGLYSFMPVVIKKTSATSVNLSLLTADLYSLFCGLFLFHYKFSGLYLLSFFTILIGLVLYSSTSTYIAQDPRVYKQFRNPSGPVVDLPTTAQVEPSVTYTSLGQETEEEPHVRVA

SEQ ID NO: 841247 - protein, 2882 aa, Homo sapiens
ARGAASPPAPGRAWPRQTPGRDSRAPARWMLPAHRSRVRRLPKDRYPRIRHPDKMPKRAHWGALSVVLILLWGHPRVALACPHPCACYVPSEVHCTFRSLASVPAGIAKHVERINLGFNSIQALSETSFAGLTKLELLMIHGNEIPSIPDGALRDLSSLQVFKFSYNKLRVITGQTLQGLSNLMRLHIDHNKIEFIHPQAFNGLTSLRLLHLEGNLLHQLHPSTFSTFTFLDYFRLSTIRHLYLAENMVRTLPASMLRNMPLLENLYLQGNPWTCDCEMRWFLEWDAKSRGILKCKKDKAYEGGQLCAMCFSPKKLYKHEIHKLKDMTCLKPSIESPLRQNRSRSIEEEQEQEEDGGSQLILEKFQLPQWSISLNMTDEHGNMVNLVCDIKKPMDVYKIHLNQTDPPDIDINATVALDFECPMTRENYEKLWKLIAYYSEVPVKLHRELMLSKDPRVSYQYRQDADEEALYYTGVRAQILAEPEWVMQPSIDIQLNRRQSTAKKVLLSYYTQYSQTISTKDTRQARGRSWVMIEPSGAVQRDQTVLEGGPCQLSCNVKASESPSIFWVLPDGSILKAPMDDPDSKFSILSSGWLRIKSMEPSDSGLYQCIAQVRDEMDRMVYRVLVQSPSTQPAEKDTVTIGKNPGESVTLPCNALAIPEAHLSWILPNRRIINDLANTSHVYMLPNGTLSIPKVQVSDSGYYRCVAVNQQGADHFTVGITVTKKGSGLPSKRGRRPGAKALSRVREDIVEDEGGSGMGDEENTSRRLLHPKDQEVFLKTKDDAINGDKKAKKGRRKLKLWKHSEKEPETNVAEGRRVFESRRRINMANKQINPERWADILAKVRGKNLPKGTEVPPLIKTTSPPSLSLEVTPPFPAISPPSASPVQTVTSAEESSADVPLLGEEEHVLGTISSASMGLEHNHNGVILVEPEVTSTPLEEVVDDLSEKTEEITSTEGDLKGTAAPTLISEPYEPSPTLHTLDTVYEKPTHEETATEGWSAADVGSSPEPTSSEYEPPLDAVSLAESEPMQYFDPDLETKSQPDEDKMKEDTFAHLTPTPTIWVNDSSTSQLFEDSTIGEPGVPGQSHLQGLTDNIHLVKSSLSTQDTLLIKKGMKEMSQTLQGGNMLEGDPTHSRSSESEGQESKSITLPDSTLGIMSSMSPVKKPAETTVGTLLDKDTTTATTTPRQKVAPSSTMSTHPSRRRPNGRRRLRPNKFRHRHKQTPPTTFAPSETFSTQPTQAPDIKISSQVESSLVPTAWVDNTVNTPKQLEMEKNAEPTSKGTPRRKHGKRPNKHRYTPSTVSSRASGSKPSPSPENKHRNIVTPSSETILLPRTVSLKTEGPYDSLDYMTTTRKIYSSYPKVQETLPVTYKPTSDGKEIKDDVATNVDKHKSDILVTGESITNAIPTSRSLVSTMGEFKEESSPVGFPGTPTWNPSRTAQPGRLQTDIPVTTSGENLTDPPLLKELEDVDFTSEFLSSLTVSTPFHQEEAGSSTTLSSIKVEVASSQAETTTLDQDHLETTVAILLSETRPQNHTPTAARMKEPASSSPSTILMSLGQTTTTKPALPSPRISQASRDSKENVFLNYVGNPETEATPVNNEGTQHMSGPNELSTPSSDQDAFNLSTKLELEKQVFGSRSLPRGPDSQRQDGRVHASHQLTRVPAKPILPTATVRLPEMSTQSASRYFVTSQSPRHWTNKPEITTYPSGALPENKQFTTPRLSSTTIPLPLHMSKPSIPSKFTDRRTDQFNGYSKVFGNNNIPEARNPVGKPPSPRIPHYSNGRLPFFTNKTLSFPQLGVTRRPQIPTSPAPVMRERKVIPGSYNRIHSHSTFHLDFGPPAPPLLHTPQTTGSPSTNLQNIPMVSSTQSSISFITSSVQSSGSFHQSSSKFFAGGPPASKFWSLGEKPQILTKSPQTVSVTAETDTVFPCEATGKPKPFVTWTKVSTGALMTPNTRIQRFEVLKNGTLVIRKVQVQDRGQYMCTASNLHGLDRMVVLLSVTVQQPQILASHYQDVTVYLGDTIAMECLAKGTPAPQISWIFPDRRVWQTVSPVEGRITLHENRTLSIKEASFSDRGVYKCVASNAAGADSLAIRLHVAALPPVIHQEKLENISLPPGLSIHIHCTAKAAPLPSVRWVLGDGTQIRPSQFLHGNLFVFPNGTLYIRNLAPKDSGRYECVAANLVGSARRTVQLNVQRAAANARITGTSPRRTDVRYGGTLKLDCSASGDPWPRILWRLPSKRMIDALFSFDSRIKVFANGTLVVKSVTDKDAGDYLCVARNKVGDDYVVLKVDVVMKPAKIEHKEENDHKVFYGGDLKVDCVATGLPNPEISWSLPDGSLVNSFMQSDDSGGRTKRYVVFNNGTLYFNEVGMREEGDYTCFAENQVGKDEMRVRVKVVTAPATIRNKTYLAVQVPYGDVVTVACEAKGEPMPKVTWLSPTNKVIPTSSEKYQIYQDGTLLIQKAQRSDSGNYTCLVRNSAGEDRKTVWIHVNVQPPKINGNPNPITTVREIAAGGSRKLIDCKAEGIPTPRVLWAFPEGVVLPAPYYGNRITVHGNGSLDIRSLRKSDSVQLVCMARNEGGEARLILQLTVLEPMEKPIFHDPISEKITAMAGHTISLNCSAAGTPTPSLVWVLPNGTDLQSGQQLQRFYHKADGMLHISGLSSVDAGAYRCVARNAAGHTERLVSLKVGLKPEANKQYHNLVSIINGETLKLPCTPPGAGQGRFSWTLPNGMHLEGPQTLGRVSLLDNGTLTVREASVFDRGTYVCRMETEYGPSVTSIPVIVIAYPPRITSEPTPVIYTRPGNTVKLNCMAMGIPKADITWELPDKSHLKAGVQARLYGNRFLHPQGSLTIQHATQRDAGFYKCMAKNILGSDSKTTYIHVF

SEQ ID NO: 841248 - protein, 2847 aa, Homo sapiens
ARGAASPPAPGRAWPRQTPGRDSRAPARWMLPAHRSRVRRLPKDRYPRIRHPDKMPKRAHWGALSVVLILLWGHPRVALACPHPCACYVPSEVHCTFRSLASVPAGIAKHVERINLGFNSIQALSETSFAGLTKLELLMIHGNEIPSIPDGALRDLSSLQVFKFSYNKLRVITGQTLQGLSNLMRLHIDHNKIEFIHPQAFNGLTSLRLLHLEGNLLHQLHPSTFSTFTFLDYFRLSTIRHLYLAENMVRTLPASMLRNMPLLENLYLQGNPWTCDCEMRWFLEWDAKSRGILKCKKDKAYEGGQLCAMCFSPKKLYKHEIHKLKDMTCLKPSIESPLRQNRSRSIEEEQEQEEDGGSQLILEKFQLPQWSISLNMTDEHGNMVNLVCDIKKPMDVYKIHLNQTDPPDIDINATVALDFECPMTRENYEKLWKLIAYYSEVPVKLHRELMLSKDPRVSYQYRQDADEEALYYTGVRAQILAEPEWVMQPSIDIQLNRRQSTAKKVLLSYYTQYSQTISTKDTRQARGRSWVMIEPSGAVQRDQTVLEGGPCQLSCNVKASESPSIFWVLPDGSILKAPMDDPDSKFSILSSGWLRIKSMEPSDSGLYQCIAQVRDEMDRMVYRVLVQSPSTQPAEKDTVTIGKNPGESVTLPCNALAIPEAHLSWILPNRRIINDLANTSHVYMLPNGTLSIPKVQVSDSGYYRCVAVNQQGADHFTVGITVTKKGSGLPSKRGRRPGAKALSRVREDIVEDEGGSGMGDEENTSRRLLHPKDQEVFLKTKDDAINGDKKAKKGRRKLKLWKHSEKEPETNVAEGRRVFESRRRINMANKQINPERWADILAKVRGKNLPKGTEVPPLIKTTSPPSLSLEVTPPFPAISPPSASPVQTVTSAEESSADVPLLGEEEHVLGTISSASMGLEHNHNGVILVEPEVTSTPLEEVVDDLSEKTEEITSTEGDLKGTAAPTLISEPYEPSPTLHTLDTVYEKPTHEETATEGWSAADVGSSPEPTSSEYEPPLDAVSLAESEPMQYFDPDLETKSQPDEDKMKEDTFAHLTPTPTIWVNDSSTSQLFEDSTIGEPGVPGQSHLQGLTDNIHLVKSSLSTQDTLLIKKGMKEMSQTLQGGNMLEGDPTHSRSSESEGQESKSITLPDSTLGIMSSMSPVKKPAETTVGTLLDKDTTTATTTPRQKVAPSSTMSTHPSRRRPNGRRRLRPNKFRHRHKQTPPTTFAPSETFSTQPTQAPDIKISSQVESSLVPTAWVDNTVNTPKQLEMEKNAEPTSKGTPRRKHGKRPNKHRYTPSTVSSRASGSKPSPSPENKHRNIVTPSSETILLPRTVSLKTEGPYDSLDYMTTTRKIYSSYPKVQETLPVTYKPTSDGKEIKDDVATNVDKHKSDILVTGESITNAIPTSRSLVSTMGEFKEESSPVGFPGTPTWNPSRTAQPGRLQTDIPVTTSGENLTDPPLLKELEDVDFTSEFLSSLTVSTPFHQEEAGSSTTLSSIKVEVASSQAETTTLDQDHLETTVAILLSETRPQNHTPTAARMKEPASSSPSTILMSLGQTTTTKPALPSPRISQASRDSKENVFLNYVGNPETEATPVNNEGTQHMSGPNELSTPSSDQDAFNLSTKLELEKQVFGSRSLPRGPDSQRQDGRVHASHQLTRVPAKPILPTATVRLPEMSTQSASRYFVTSQSPRHWTNKPEITTYPSGALPENKQFTTPRLSSTTIPLPLHMSKPSIPSKFTDRRTDQFNGYSKVFGNNNIPEARNPVGKPPSPRIPHYSNGRLPFFTNKTLSFPQLGVTRRPQIPTSPAPVMRERKVIPGSYNRIHSHSTFHLDFGPPAPPLLHTPQTTGSPSTNLQNIPMVSSTQSSISFITSSVQSSGSFHQSSSKFFAGGPPASKFWSLGEKPQILTKSPQTVSVTAETDTVFPCEATGKPKPFVTWTKVSTGALMTPNTRIQRFEVLKNGTLVIRKVQVQDRGQYMCTASNLHGLDRMVVLLSVTVQQPQILASHYQDVTVYLGDTIAMECLAKGTPAPQISWIFPDRRVWQTVSPVEGRITLHENRTLSIKEASFSDRGVYKCVASNAAGADSLAIRLHVAALPPVIHQEKLENISLPPGLSIHIHCTAKAAPLPSVRWVLGDGTQIRPSQFLHGNLFVFPNGTLYIRNLAPKDSGRYECVAANLVGSARRTVQLNVQRAAANARITGTSPRRTDVRYGGTLKLDCSASGDPWPRILWRLPSKRMIDALFSFDSRIKVFANGTLVVKSVTDKDAGDYLCVARNKVGDDYVVLKVDVVMKPAKIEHKEENDHKVFYGGDLKVDCVATGLPNPEISWSLPDGSLVNSFMQSDDSGGRTKRYVVFNNGTLYFNEVGMREEGDYTCFAENQVGKDEMRVRVKVVTAPATIRNKTYLAVQVPYGDVVTVACEAKGEPMPKVTWLSPTNKVIPTSSEKYQIYQDGTLLIQKAQRSDSGNYTCLVRNSAGEDRKTVWIHVNVQPPKINGNPNPITTVREIAAGGSRKLIDCKAEGIPTPRVLWAFPEGVVLPAPYYGNRITVHGNGSLDIRSLRKSDSVQLVCMARNEGGEARLILQLTVLEPMEKPIFHDPDLQSGQQLQRFYHKADGMLHISGLSSVDAGAYRCVARNAAGHTERLVSLKVGLKPEANKQYHNLVSIINGETLKLPCTPPGAGQGRFSWTLPNGMHLEGPQTLGRVSLLDNGTLTVREASVFDRGTYVCRMETEYGPSVTSIPVIVIAYPPRITSEPTPVIYTRPGNTVKLNCMAMGIPKADITWELPDKSHLKAGVQARLYGNRFLHPQGSLTIQHATQRDAGFYKCMAKNILGSDSKTTYIHVF

SEQ ID NO: 841249 - protein, 166 aa, Homo sapiens
MHFCLLTDSFTYYFLSLVSQVTLFEYQQPYTQEHRGFTVEMGKEFKTTCLFLSITYFHLSHRKKKTHSYLGKAPRNPQRLSWICWALMLLWPAPLQIVRPAIPQRRNKICWPLFHPLLLPYAFFSWFHSFLWLCHLYAYCCQVCITIPSEYFLLHITLFYPDAYWT

SEQ ID NO: 841250 - protein, 222 aa, Homo sapiens
VQLEAQARLLGQRANGPSRREPGDYAAPCRSTFRLGGSTMKKVKKKRSEARRHRDSTSQHASSNSTSQQPSPESTPQQPSPESTPQHSSLETTSRQPAFQALPAPEIRRSSCCLLSPDANVKAAPQSRKAGPLIRAGPHSCSCATCPCSSACWRRLGLCHSRIFDVLLPRDWQMAPGRGLPNLLTFYRKSSRKPSSHRNACPPSPRNCGCGSGGSRSCLLHH

SEQ ID NO: 841251 - protein, 231 aa, Homo sapiens
VQLEAQARLLGQRANGPSRREPGDYAAPCRSTFRLGGSTMKKVKKKRSEARRHRDSTSQHASSNSTSQQPSPESTPQQPSPESTPQQPSPESTPQHSSLETTSRQPAFQALPAPEIRRSSCCLLSPDANVKAAPQSRKAGPLIRAGPHSCSCATCPCSSACWRRLGLCHSRIFDVLLPRDWQMAPGRGLPNLLTFYRKSSRKPSSHRNACPPSPRNCGCGSGGSRSCLLHH

SEQ ID NO: 841252 - protein, 222 aa, Homo sapiens; identical to SEQ ID NO: 841250

SEQ ID NO: 841253 - protein, 177 aa, Homo sapiens
VQLEAQARLLGQRANGPSRREPGDYAAPCRSTFRLGGSTMKKVKKKRSEARRHRDSTSQHASSNSTSQQPSPESTPQQPSPESTPQQPSPESTPQHSSLETTSRQPAFQALPAPEIRRSSCCLLSPDANVKAAPQSRKAENLQENPPVIVTRVLQALGTVAVALGALGAAYYITESL

SEQ ID NO: 841254 - protein, 222 aa, Homo sapiens; identical to SEQ ID NO: 841250

SEQ ID NO: 841255 - protein, 177 aa, Homo sapiens; identical to SEQ ID NO: 841253

SEQ ID NO: 841256 - protein, 41 aa, Homo sapiens
ATTVTSKTKVSGRYQDTRKGAGSRAGSKLGPGGQKKRQETK

SEQ ID NO: 841257 - protein, 582 aa, Homo sapiens
MSSSLGKEKDSKEKDPKVPSAKEREKEAKASGGFGKESKEKEPKTKGKDAKDGKKDSSAAQPGVAFSVDNTIKRPNPAPGTRKKSSNAEVIKELNKCREENSMRLDLSKRSIHILPSSIKELTQLTELYLYSNKLQSLPAEVGCLVNLMTLALSENSLTSLPDSLDNLKKLRMLDLRHNKLREIPSVVYRLDSLTTLYLRFNRITTVEKDIKNLSKLSMLSIRENKIKQLPAEIGELCNLITLDVAHNQLEHLPKEIGNCTQITNLDLQHNELLDLPDTIGNLSSLSRLGLRYNRLSAIPRSLAKCSALEELNLENNNISTLPESLLSSLVKLNSLTLARNCFQLYPVGGPSQFSTIYSLNMEHNRINKIPFGIFSRAKVLSKLNMKDNQLTSLPLDFGTWTSMVELNLATNQLTKIPEDVSGLVSLEVLILSNNLLKKLPHGLGNLRKLRELDLEENKLESLPNEIAYLKDLQKLVLTNNQLTTLPRGIGHLTNLTHLGLGENLLTHLPEEIGTLENLEELYLNDNPNLHSLPFELALCSKLSIMSIENCPLSHLPPQIVAGGPSFIIQFLKMQGPYRAMV

SEQ ID NO: 841258 - protein, 582 aa, Homo sapiens; identical to SEQ ID NO: 841257

SEQ ID NO: 841259 - protein, 564 aa, Homo sapiens
MSSSLGKEKDSKEKDPKVPSAKEREKEAKASGGFGKESKEKEPKTKGKDAKDGKKDSSAAQPGVAFSVDNTIKRPNPAPGTRKKSSNAEVIKELNKCREENSMRLDLSKRSIHILPSSIKELTQLTELYLYSNKLQSLPAEVGCLVNLMTLALSENSLTSLPDSLDNLKKLRMLDLRHNKLREIPSVVYRLDSLTTLYLRFNRITTVEKDIKNLSKLSMLSIRENDVAHNQLEHLPKEIGNCTQITNLDLQHNELLDLPDTIGNLSSLSRLGLRYNRLSAIPRSLAKCSALEELNLENNNISTLPESLLSSLVKLNSLTLARNCFQLYPVGGPSQFSTIYSLNMEHNRINKIPFGIFSRAKVLSKLNMKDNQLTSLPLDFGTWTSMVELNLATNQLTKIPEDVSGLVSLEVLILSNNLLKKLPHGLGNLRKLRELDLEENKLESLPNEIAYLKDLQKLVLTNNQLTTLPRGIGHLTNLTHLGLGENLLTHLPEEIGTLENLEELYLNDNPNLHSLPFELALCSKLSIMSIENCPLSHLPPQIVAGGPSFIIQFLKMQGPYRAMV

SEQ ID NO: 841260 - protein, 341 aa, Homo sapiens
GEWGRGGRGAAVGQRRFLGGGGRGGRRASEEDGGVGAPDGNLSSLSRLGLRYNRLSAIPRSLAKCSALEELNLENNNISTLPESLLSSLVKLNSLTLARNCFQLYPVGGPSQFSTIYSLNMEHNRINKIPFGIFSRAKVLSKLNMKDNQLTSLPLDFGTWTSMVELNLATNQLTKIPEDVSGLVSLEVLILSNNLLKKLPHGLGNLRKLRELDLEENKLESLPNEIAYLKDLQKLVLTNNQLTTLPRGIGHLTNLTHLGLGENLLTHLPEEIGTLENLEELYLNDNPNLHSLPFELALCSKLSIMSIENCPLSHLPPQIVAGGPSFIIQFLKMQGPYRAMV

SEQ ID NO: 841261 - protein, 288 aa, Homo sapiens
MSSSLGKEKDSKEKDPKVPSAKEREKEAKASGGFGKESKEKEPKTKGKDAKDGKKDSSAAQPGVAFSVDNTIKRPNPAPGTRKKSSNAEVIKELNKCREENSMRLDLSKRSIHILPSSIKELTQLTELYLYSNKLQSLPAEVGCLVNLMTLALSENSLTSLPDSLDNLKKLRMLDLRHNKLREIPSVVYRLDSLTTLYLRFNRITTVEKDIKNLSKLSMLSIRENKIKQLPAEIGELCNLITLDVAHNQLEHLPKEIGNCTQITNLDLQHNELLDLPDTIGMRGERRY

SEQ ID NO: 841262 - protein, 292 aa, Homo sapiens
GEWGRGGRGAAVGQRRFLGGGGRGGRRASEEDGGVGAPDGNLSSLSRLGLRYNRLSAIPRSLAKCSALEELNLENNNISTLPESLLSSLVKLNSLTLARNCFQLYPVGGPSQFSTIYSLNMEHNRINKIPFGIFSRAKVLSKLNMKDNQLTSLPLDFGTWTSMVELNLATNQLTKIPEDVSGLVSLEVLILSNNLLKKLPHGLGNLRKLRELDLEENKLESLPNEIAYLKDLQKLVLTNNQLTTLPRGIGHLTNLTHLGLGENLLTHLPEEIGTLENLGRTCIWKWTSPNLD

SEQ ID NO: 841263 - protein, 582 aa, Homo sapiens; identical to SEQ ID NO: 841257

SEQ ID NO: 841264 - protein, 582 aa, Homo sapiens; identical to SEQ ID NO: 841257

SEQ ID NO: 841265 - protein, 582 aa, Homo sapiens; identical to SEQ ID NO: 841257

SEQ ID NO: 841266 - protein, 199 aa, Homo sapiens
SSVGGLLVSVKSPPGDVHAARACAPGRHSGEGPPQGNLSPSCPAEAGHGCASTGRQVGVSGAGSSPPGPAPCVKCSAWVGTCFPLSLLQAAGGPTGSPNGFCPEPWAPDHASTLHGLNKSLRQGPRSGGAQRKPRAHTGEGVSGLSLTQPRLSSSLRISWHLLACVATQVGCARRLREKTLGEDYVSAFLPSTGPSWAH

SEQ ID NO: 841267 - protein, 68 aa, Homo sapiens
KNKKQTNKKTYFLGLLGTSSYPKGNARFIASFSFGISAKISLLALTLAISTISHAFKRIFSICLSIYQ

SEQ ID NO: 841268 - protein, 70 aa, Homo sapiens
LLAYTCKIWQLLFGYMLGNPIASGVARSGGTREISMAVPAVTSGWGQEWDSGVWEGPAKNLSEPSALEEL

SEQ ID NO: 841269 - protein, 116 aa, Homo sapiens
PLHLRALTSSSSSLLLTSSSQWYLRCSSRPPSCELLSLGLTPYSTPPEDWPTIFEGVPGLSLEKDMIKMKGMREEGREKQTNRQRERGRGKALPQANPASVVVYFPEFLPAAPLCA

SEQ ID NO: 841270 - protein, 634 aa, Homo sapiens
MDNAVDGLDKASIANSDGPTAGSQTPPFKRKGKLSTIGKIFKPWKWRKKKTSDKFRETSAVLERKISTRQSREELIRRGVLKELPDQDGDVTVNFENSNGHMIPIGEESTREENVVKSEEGNGSVSEKTPPLEEQAEDKKENTENHSETPAAPALPPSAPPKPRPKPKPKKSPVPPKGATAGASHKGDEVPPIKKNTKAPGKQAPVPPPKPASRNTTREAAGSSHSKKTTGSKASASPSTSSTSSRPKASKETVSSKAGTVGTTKGKRKTDKQPITSHLSSDTTTSGTSDLKGEPAETRVESFKLEQTVPGAEEQNTGKFKSMVPPPPVAPAPSPLAPPLPLEDQCITASDTPVVLVSVGADLPVSALDPSQLLWAEEPTNRTTLYSGTGLSVNRENAKCFTTKEELGKTVPQLLTPGLMGESSESFSASEDEGHREYQANDSDSDGPILYTDDEDEDEDEDGSGESALASKIRRRDTLAIKLGNRPSKKELEDKNILQRTSEEERQEIRQQIGTKLVRRLSQRPTTEELEQRNILKQKNEEEEQEAKMELKRRLSRKLSLRPTVAELQARRILRFNEYVEVTDSPDYDRRADKPWARLTPADKAAIRKELNEFKSTEMEVHEESRQFTRFHRP

SEQ ID NO: 841271 - protein, 513 aa, Homo sapiens
FIIILRNDLILTCAVFFLKVLERKISTRQSREELIRRGVLKELPDQDGDVTVNFENSNGHMIPIGEESTREENVVKSEEGNGSVSEKTPPLEEQAEDKKAGSSHSKKTTGSKASASPSTSSTSSRPKASKETVSSKAGTVGTTKGKRKTDKQPITSHLSSDTTTSGTSDLKGEPAETRVESFKLEQTVPGAEEQNTGKFKSMVPPPPVAPAPSPLAPPLPLEDQCITASDTPVVLVSVGADLPVSALDPSQLLWAEEPTNRTTLYSGTGLSVNRENAKCFTTKEELGKTVPQLLTPGLMGESSESFSASEDEGHREYQANDSDSDGPILYTDDEDEDEDEDGSGESALASKIRRRDTLAIKLGNRPSKKELEDKNILQRTSEEERQEIRQQIGTKLVRRLSQRPTTEELEQRNILKQKNEEEEQEAKMELKRRLSRKLSLRPTVAELQARRILRFNEYVEVTDSPDYDRRADKPWARLTPADKAAIRKELNEFKSTEMEVHEESRQFTRFHRP

SEQ ID NO: 841272 - protein, 512 aa, Homo sapiens
AKSGRSVIGRGRNRQKKKENTENHSETPAAPALPPSAPPKPRPKPKPKKSPVPPKGATAGASHKGDEVPPIKKNTKAPGKQAPVPPPKPASRNTTREAAGSSHSKKTTGSKASASPSTSSTSSRPKASKETVSSKAGTVGTTKGKRKTDKQPITSHLSSDTTTSGTSDLKGEPAETRVESFKLEQTVPGAEEQNTGKFKSMVPPPPVAPAPSPLAPPLPLEDQCITASDTPVVLVSVGADLPVSALDPSQLLWAEEPTNRTTLYSGTGLSVNRENAKCFTTKEELGKTVPQLLTPGLMGESSESFSASEDEGHREYQANDSDSDGPILYTDDEDEDEDEDGSGESALASKIRRRDTLAIKLGNRPSKKELEDKNILQRTSEEERQEIRQQIGTKLVRRLSQRPTTEELEQRNILKQKNEEEEQEAKMELKRRLSRKLSLRPTVAELQARRILRFNEYVEVTDSPDYDRRADKPWARLTPADKAAIRKELNEFKSTEMEVHEESRQFTRFHRP

SEQ ID NO: 841273 - protein, 334 aa, Homo sapiens
CPSPFVRPSPFVCPSPFVCPSPFVCPPPVAPAPSPLAPPLPLEDQCITASDTPVVLVSVGADLPVSALDPSQLLWAEEPTNRTTLYSGTGLSVNRENAKCFTTKEELGKTVPQLLTPGLMGESSESFSASEDEGHREYQANDSDSDGPILYTDDEDEDEDEDGSGESALASKIRRRDTLAIKLGNRPSKKELEDKNILQRTSEEERQEIRQQIGTKLVRRLSQRPTTEELEQRNILKQKNEEEEQEAKMELKRRLSRKLSLRPTVAELQARRILRFNEYVEVTDSPDYDRRADKPWARLTPADKAAIRKELNEFKSTEMEVHEESRQFTRFHRP

SEQ ID NO: 841274 - protein, 565 aa, Homo sapiens
SSSRGRPLRVHISGSVDGLDKASIANSDGPTAGSQTPPFKRKGKLSTIGKIFKPWKWRKKKTSDKFRETSAVLERKISTRQSREELIRRGVLKELPDQDGDVTVNFENSNGHMIPIGEESTREENVVKSEEGNGSVSEKTPPLEEQAEDKKAGSSHSKKTTGSKASASPSTSSTSSRPKASKETVSSKAGTVGTTKGKRKTDKQPITSHLSSDTTTSGTSDLKGEPAETRVESFKLEQTVPGAEEQNTGKFKSMVPPPPVAPAPSPLAPPLPLEDQCITASDTPVVLVSVGADLPVSALDPSQLLWAEEPTNRTTLYSGTGLSVNRENAKCFTTKEELGKTVPQLLTPGLMGESSESFSASEDEGHREYQANDSDSDGPILYTDDEDEDEDEDGSGESALASKIRRRDTLAIKLGNRPSKKELEDKNILQRTSEEERQEIRQQIGTKLVRRLSQRPTTEELEQRNILKQKNEEEEQEAKMELKRRLSRKLSLRPTVAELQARRILRFNEYVEVTDSPDYDRRADKPWARLTPADKAAIRKELNEFKSTEMEVHEESRQFTRFHRP

SEQ ID NO: 841275 - protein, 565 aa, Homo sapiens; identical to SEQ ID NO: 841274

SEQ ID NO: 841276 - protein, 184 aa, Homo sapiens
SSSRGRPLRVHISGSVDGLDKASIANSDGPTAGSQTPPFKRKGKLSTIGKIFKPWKWRKKKTSDKFRETSAVLERKISTRQSREELIRRGVLKELPDQDGDVTVNFENSNGHMIPIGEESTREENVVKSEEGNGSVSEKTPPLEEQAEDKKGKIKTNPYYLLQYIAQCLEPALRLQLVTLKPAV

SEQ ID NO: 841277 - protein, 634 aa, Homo sapiens; identical to SEQ ID NO: 841270

SEQ ID NO: 841278 - protein, 565 aa, Homo sapiens; identical to SEQ ID NO: 841274

SEQ ID NO: 841279 - protein, 512 aa, Homo sapiens
MGQTSVSTLSPQPGSVDGLDKASIANSDGPTAGSQTPPFKRKGKLSTIGKIFKPWKWRKKKTSDKFRETSAVLERKISTRQSREELIRRGVLKELPDQAGSSHSKKTTGSKASASPSTSSTSSRPKASKETVSSKAGTVGTTKGKRKTDKQPITSHLSSDTTTSGTSDLKGEPAETRVESFKLEQTVPGAEEQNTGKFKSMVPPPPVAPAPSPLAPPLPLEDQCITASDTPVVLVSVGADLPVSALDPSQLLWAEEPTNRTTLYSGTGLSVNRENAKCFTTKEELGKTVPQLLTPGLMGESSESFSASEDEGHREYQANDSDSDGPILYTDDEDEDEDEDGSGESALASKIRRRDTLAIKLGNRPSKKELEDKNILQRTSEEERQEIRQQIGTKLVRRLSQRPTTEELEQRNILKQKNEEEEQEAKMELKRRLSRKLSLRPTVAELQARRILRFNEYVEVTDSPDYDRRADKPWARLTPADKAAIRKELNEFKSTEMEVHEESRQFTRFHRP

SEQ ID NO: 841280 - protein, 565 aa, Homo sapiens; identical to SEQ ID NO: 841274

SEQ ID NO: 841281 - protein, 565 aa, Homo sapiens; identical to SEQ ID NO: 841274

SEQ ID NO: 841282 - protein, 1936 aa, Homo sapiens
MDRVGGGKGPGGSYYRVSSSAARSRKLCPGRVNRGLSAQSTAATATMGGKNKQRTKGNLRPSNSGRAAELLAKEQGTVPGFIGFGTSQSDLGYVPAIQGAEEIDSLVDSDFRMVLRKLSKKDVTTKLKAMQEFGTMCTERDTETVKGVLPYWPRIFCKISLDHDRRVREATQQAFEKLILKVKKQLAPYLKSLMGYWLMAQCDTYTPAAFAAKDAFEAAFPPSKQPEAIAFCKDEITSVLQDHLIKETPDTLSDPQTVPEEEREAKFYRVVTCSLLALKRLLCLLPDNELDSLEEKFKSLLSQNKFWKYGKHSVPQIRSAYFELVSALCQRIPQLMKEEASKVSPSVLLSIDDSDPIVCPALWEAVLYTLTTIEDCWLHVNAKKSVFPKLSTVIREGGRGLATVIYPYLLPFISKLPQSITNPKLDFFKNFLTSLVAGLSTERTKTSSSESSAVISAFFECLRFIMQQNLGEEEIEQMLVNDQKSTQKTSVTKYVEISPTQQAVSSAADTSYVSSNSILTIYLEIVSDLTGLGLSPTRPLPTSDANRKPQAVLPGLLTNQLYIKIRDPMTPSWGLLNLLDCLTELRETIYQFTINDITKDTNEDMHTLIPFIDAVLKDPGLQHGQLFNHLAETLSSWEAKADTEKDEKTAHNLENVLIHFWERLSEICVAKISEPEADVESVLGVSNLLQVLQKPKSSLKSSKKKNGKVRFADEILESNKENEKCVSSEGEKIEGWELTTEPSLTHNSSGLLSPLRKKPLEDLVCKLADISINYVNERKSEQHLRFLSTLLDSFSSSRVFKMLLGDEKQSIVQAKPLEIAKLVQKNPAVQFLYQKLIGWLNEDQRKDFGFLVDILYSALRCCDNDMERKKVLDDLTKVDLKWNSLLKIIEKACPSSDKHALVTPWLKGDILGEKLVNLADCLCNEDLESRVSSESHFSERWTLLSLVLSQHVKNDYLIGDVYVERIIVRLHETLFKTKKLSEAESSDSSVSFICDVAYNYFSSAKGCLLMPSSEDLLLTLFQLCAQSKEKTHLPDFLICKLKNTWLSGVNLLVHQTDSSYKESTFLHLSALWLKNQVQASSLDINSLQVLLSAVDDLLNTLLESEDSYLMGVYIGSVMPNDSEWEKMRQSLPMQWLHRPLLEGRLSLNYECFKTDFKEQDIKTLPSHLCTSALLSKMVLIALRKETVLENNELEKIIAELLYSLQWCEELDNPPIFLIGFCEILQKMNITYDNLRVLGNTSGLLQLLFNRSREHGTLWSLIIAKLILSRSISSDEVKPHYKRKESFFPLTEGNLHTIQSLCPFLSKEEKKEFSAQCIPALLGWTKKDLCSTNGGFGHLAIFNSCLQTKSIDDGELLHGILKIIISWKKEHEDIFLFSCNLSEASPEVLGVNIEIIRFLSLFLKYCSSPLAESEWDFIMCSMLAWLETTSENQALYSIPLVQLFACVSCDLACDLSAFFDSTTLDTIGNLPVNLISEWKEFFSQGIHSLLLPILVTVTGENKDVSETSFQNAMLKPMCETLTYISKEQLLSHKLPARLVADQKTNLPEYLQTLLNTLAPLLLFRARPVQIAVYHMLYKLMPELPQYDQDNLKSYGDEEEEPALSPPAALMSLLSIQEDLLENVLGCIPVGQIVTIKPLSEDFCYVLGYLLTWKLILTFFKAASSQLRALYSMYLRKTKSLNKLLYHLFRLMPENPTYAETAVEVPNKDPKTFFTEELQLSIRETTMLPYHIPHLACSVYHMTLKDLPAMVRLWWNSSEKRVFNIVDRFTSKYVSSVLSFQEISSVQTSTQLFNGMTVKARATTREVMATYTIEDIVIELIIQLPSNYPLGSIIVESGKRVGVAVQQWRNWMLQLSTYLTHQNGSIMEGLALWKNNVDKRFEGVEDCMICFSVIHGFNYSLPKKACRTCKKKFHSACLYKWFTSSNKSTCPLCRETFF

SEQ ID NO: 841283 - protein, 1812 aa, Homo sapiens [sequence omitted]

SEQ ID NO: 841284 - protein, 1181 aa, Homo sapiens
MDRVGGGKGPGGSYYRVSSSAARSRKLCPGRVNRGLSAQSTAATATMGGKNKQRTKGNLRPSNSGRAAELLAKEQGTVPGFIGFGTSQSDLGYVPAIQGAEEIDSLVDSDFRMVLRKLSKKDVTTKLKAMQEFGTMCTERDTETVKGVLPYWPRIFCKISLDHDRRVREATQQAFEKLILKVKKQLAPYLKSLMGYWLMAQCDTYTPAAFAAKDAFEAAFPPSKQPEAIAFCKDEITSVLQDHLIKETPDTLSDPQTVPEEEREAKFYRVVTCSLLALKRLLCLLPDNELDSLEEKFKSLLSQNKFWKYGKHSVPQIRSAYFELVSALCQRIPQLMKEEASKVSPSVLLSIDDSDPIVCPALWEAVLYTLTTIEDCWLHVNAKKSVFPKLSTVIREGGRGLATVIYPYLLPFISKLPQSITNPKLDFFKNFLTSLVAGLSTERTKTSSSESSAVISAFFECLRFIMQQNLGEEEIEQMLVNDQLIPFIDAVLKDPGLQHGQLFNHLAETLSSWEAKADTEKDEKTAHNLENVLIHFWERLSEICVAKISEPEADVESVLGVSNLLQVLQKPKSSLKSSKKKNGKVRFADEILESNKENEKCVSSEGEKIEGWELTTEPSLTHNSSGLLSPLRKKPLEDLVCKLADISINYVNERKSEQHLRFLSTLLDSFSSSRVFKMLLGDEKQSIVQAKPLEIAKLVQKNPAVQFLYQKLIGWLNEDQRKDFGFLVDILYSALRCCDNDMERKKVLDDLTKVDLKWNSLLKIIEKACPSSDKHALVTPWLKGDILGEKLVNLADCLCNEDLESRVSSESHFSERWTLLSLVLSQHVKNDYLIGDVYVERIIVRLHETLFKTKKLSEAESSDSSVSFICDVAYNYFSSAKGCLLMPSSEDLLLTLFQLCAQSKEKTHLPDFLICKLKNTWLSGVNLLVHQTDSSYKESTFLHLSALWLKNQVQASSLDINSLQVLLSAVDDLLNTLLESEDSYLMGVYIGSVMPNDSEWEKMRQSLPMQWLHRPLLEGRLSLNYECFKTDFKEQDIKTLPSHLCTSALLSKMVLIALRKETVLENNELEKIIAELLYSLQWCEELDNPPIFLIGFCEILQKMNITYDNLRVLGNTSGLLQLLFNRSREHGTLWYVIIIKPPFENGCAPKVSFASLTRGELQGQPWPRPKLCSEKINICPT

SEQ ID NO: 841285 - protein, 519 aa, Homo sapiens [sequence omitted]

SEQ ID NO: 841286 - protein, 1812 aa, Homo sapiens [sequence omitted]

SEQ ID NO: 841287 - protein, 1812 aa, Homo sapiens [sequence omitted]

SEQ ID NO: 841288 - protein, 1556 aa, Homo sapiens
MDRVGGGKGPGGSYYRVSSSAARSRKLCPGRVNRGLSAQSTAATATMGGKNKQRTKGNLRPSNSGRAAELLAKEQGTVPGFIGFGTSQSDLGYVPAIQGAEEIDSLVDSDFRMVLRKLSKKDVTTKLKAMQEFGTMCTERDTETVKGVLPYWPRIFCKISLDHDRRVREATQQAFEKLILKVKKQLAPYLKSLMGYWLMAQCDTYTPAAFAAKDAFEAAFPPSKQPEAIAFCKDEITSVLQDHLIKETPDTLSDPQTVPEEEREAKFYRVVTCSLLALKRLLCLLPDNELDSLEEKFKSLLSQNKFWKYGKHSVPQIRSAYFELVSALCQRIPQLMKEEASKVSPSVLLSIDDSDPIVCPALWEAVLYTLTTIEDCWLHVNAKKSVFPKLSTVIREGGRGLATVIYPYLLPFISKLPQSITNPKLDFFKNFLTSLVAGLSTERTKTSSSESSAVISAFFECLRFIMQQNLGEEEIEQMLVNDQLIPFIDAVLKDPGLQHGQLFNHLAETLSSWEAKADTEKDEKTAHNLENVLIHFWERLSEICVAKISEPEADVESVLGVSNLLQVLQKPKSSLKSSKKKNGKVRFADEILESNKENEKCVSSEGEKIEGWELTTEPSLTHNSSGLLSPLRKKPLEDLVCKLADISINYVNERKSEQHLRFLSTLLDSFSSSRVFKMLLGDEKQSIVQAKPLEIAKLVQKNPAVQFLYQKLIGWLNEDQRKDFGFLVDILYSALRCCDNDMERKKVLDDLTKVDLKWNSLLKIIEKACPSSDKHALVTPWLKGDILGEKLVNLADCLCNEDLESRVSSESHFSERWTLLSLVLSQHVKNDYLIGDVYVERIIVRLHETLFKTKKLSEAESSDSSVSFICDVAYNYFSSAKGCLLMPSSEDLLLTLFQLCAQSKEKTHLPDFLICKLKNTWLSGVNLLVHQTDSSYKESTFLHLSALWLKNQVQASSLDINSLQVLLSAVDDLLNTLLESEDSYLMGVYIGSVMPNDSEWEKMRQSLPMQWLHRPLLEGRLSLNYECFKTDFKEQDIKTLPSHLCTSALLSKMVLIALRKETVLENNELEKIIAELLYSLQWCEELDNPPIFLIGFCEILQKMNITYDNLRVLGNTSGLLQLLFNRSREHGTLWSLIIAKLILSRSISSDEVKPHYKRKESFFPLTEGNLHTIQSLCPFLSKEEKKEFSAQCIPALLGWTKKDLCSTNGGFGHLAIFNSCLQTKSIDDGELLHGILKIIISWKKEHEDIFLFSCNLSEASPEVLGVNIEIIRFLSLFLKYCSSPLAESEWDFIMCSMLAWLETTSENQALYSIPLVQLFACVSCDLACDLSAFFDSTTLDTIGNLPVNLISEWKEFFSQGIHSLLLPILVTVTGENKDVSETSFQNAMLKPMCETLTYISKEQLLSHKLPARLVADQKTNLPEYLQTLLNTLAPLLLFRARPVQIAVYHMLYKLMPELPQYDQDNLKSYGDEEEEPALSPPAALMSLLSIQEDLLENVLGCIPVGQIVTIKPLSEDFCYVLGYLLTWKLILTFFKAASSQVNKYVTTFDSSVLICF

SEQ ID NO: 841289 - protein, 260 aa, Homo sapiens
FFALHQLRALYSMYLRKTKSLNKLLYHLFRLMPENPTYAETAVEVPNKDPKTFFTEELQLSIRETTMLPYHIPHLACSVYHMTFFNIVDRFTSKYVSSVLSFQEISSVQTSTQLFNGMTVKARATTREVMATYTIEDIVIELIIQLPSNYPLGSIIVESGKRVGVAVQQWRNWMLQLSTYLTHQNGSIMEGLALWKNNVDKRFEGVEDCMICFSVIHGFNYSLPKKACRTCKKKFHSACLYKWFTSSNKSTCPLCRETFF

SEQ ID NO: 841290 - protein, 166 aa, Homo sapiens
SSYMSEFSGDLNRGIEDCLGIPHEELLKICKYIQETQETERMTLRFSHISLLAIPHILGRLLPLHLSIFPLQGMLESHISPWLTLLPSSSLCSNRFNQPIGNTTSQFLALPNPFPVLFHSPSYVLLRYLLFVFLPSLECKLYDVGDSQGSFSLRPRYLEDHRRGTL

SEQ ID NO: 841291 - protein, 408 aa, Homo sapiens
MSEHVEPAAPGPGPNGGGGGPAPARGPRTPNLNPNPLINVRDRLFHALFFKMAVTYSRLFPPAFRRLFEFFVLLKALFVLFVLAYIHIVFSRSPINCLEHVRDKWPREGILRVEVRHNSSRAPVFLQFCDSGGRGSFPGLAVEPGSNLDMEDEEEEELTMEMFGNSSIKFELDIEPKVFKPPSSTEALNDSQEFPFPETPTKVWPQDEYIVEYSLEYGFLRLSQATRQRLSIPVMVVTLDPTRDQCFGDRFSRLLLDEFLGYDDILMSSVKGLAENEENKGFLRNVVSGEHYRFVSMWMARTSYLAAFAIMVIFTLSVSMLLRYSHHQIFVFIVDLLQMLEMNMAIAFPAAPLLTVILALVGMEAIMSEFFNDTTTAFYIILIVWLADQYDAICCHTSTSKRHWLRIP

SEQ ID NO: 841292 - protein, 152 aa, Homo sapiens
  misc_feature (149)..(149): Xaa can be any naturally occurring amino acid
GFRPRFRTACSSLARTSSAEYNVNNLVSPVLFQEALWHVPEHAVVLEIRPRLLLDEFLGYDDILMSSVKGLAENEENKGFLRNVVSGEHYRFVSMWMARTSYLAAFAIMVIFTLSVSMLLRYSHHQIFVFIVDLLQMLEMDMASPSQSXRIV

SEQ ID NO: 841293 - protein, 620 aa, Homo sapiens
MSEHVEPAAPGPGPNGGGGGPAPARGPRTPNLNPNPLINVRDRLFHALFFKMAVTYSRLFPPAFRRLFEFFVLLKALFVLFVLAYIHIVFSRSPINCLEHVRDKWPREGILRVEVRHNSSRAPVFLQFCDSGGRGSFPGLAVEPGSNLDMEDEEEEELTMEMFGNSSIKFELDIEPKVFKPPSSTEALNDSQEFPFPETPTKVWPQDEYIVEYSLEYGFLRLSQATRQRLSIPVMVVTLDPTRDQCFGDRFSRLLLDEFLGYDDILMSSVKGLAENEENKGFLRNVVSGEHYRFVSMWMARTSYLAAFAIMVIFTLSVSMLLRYSHHQIFVFIVDLLQMLEMNMAIAFPAAPLLTVILALVGMEAIMSEFFNDTTTAFYIILIVWLADQYDAICCHTSTSKRHWLRFFYLYHFAFYAYHYRFNGQYSSLALVTSWLFIQHSMIYFFHHYELPAILQQVRIQEMLLQAPPLGPGTPTALPDDMNNNSGAPATAPDSAGQPPALGPVSPGASGSPGPVAAAPSSLVAAAASVAAAAGGDLGWMAETAAIITDASFLSGLSASLLERRPASPLGPAGGLPHAPQDSVPPSDSAASDTTPLGAAVGGPSPASMAPTEAPSEVGS

SEQ ID NO: 841294 - protein, 677 aa, Homo sapiens
MSEHVEPAAPGPGPNGGGGGPAPARGPRTPNLNPNPLINVRDRLFHALFFKMAVTYSRLFPPAFRRLFEFFVLLKALFVLFVLAYIHIVFSRSPINCLEHVRDKWPREGILRVEVRHNSSRAPVFLQFCDSGGRGSFPGLAVEPGSNLDMEDEEEEELTMEMFGNSSIKFELDIEPKVFKPPSSTEALNDSQEFPFPETPTKVWPQDEYIVEYSLEYGFLRLSQATRQRLSIPVMVVTLDPTRDQCFGDRFSRLLLDEFLGYDDILMSSVKGLAENEENKGFLRNVVSGEHYRFVSMWMARTSYLAAFAIMVIFTLSVSMLLRYSHHQIFVFIVDLLQMLEMNMAIAFPAAPLLTVILALVGMEAIMSEFFNDTTTAFYIILIVWLADQYDAICCHTSTSKRHWLRRAWRGGRVEWVLVGRGRGLPEGGALEAGVVAAPRGNPRGWAWQGGTCSPDALTPPRRFFYLYHFAFYAYHYRFNGQYSSLALVTSWLFIQHSMIYFFHHYELPAILQQVRIQEMLLQAPPLGPGTPTALPDDMNNNSGAPATAPDSAGQPPALGPVSPGASGSPGPVAAAPSSLVAAAASVAAAAGGDLGWMAETAAIITDASFLSGLSASLLERRPASPLGPAGGLPHAPQDSVPPSDSAASDTTPLGAAVGGPSPASMAPTEAPSEVGS

SEQ ID NO: 841295 - protein, 480 aa, Homo sapiens
MSEHVEPAAPGPGPNGGGGGPAPARGPRTPNLNPNPLINVRDRLFHALFFKMAVTYSRLFPPAFRRLFEFFVLLKALFVLFVLAYIHIVFSRSPINCLEHVRDKWPREGILRVEVRHNSSRAPVFLQFCDSGGRGSFPGLAVEPGSNLDMEDEEEEELTMEMFGNSSIKFELDIEPKVFKPPSSTEALNDSQEFPFPETPTKVWPQDEYIVEYSLEYGFLRLSQATRQRLSIPVMVVTLDPTRDQCFGDRFSRLLLDEFLGYDDILMSSVKGLAENEENKGFLRNVVSGEHYRFVSMWMARTSYLAAFAIMVIFTLSVSMLLRYSHHQIFVFIVDLLQMLEMNMAIAFPAAPLLTVILALVGMEAIMSEFFNDTTTAFYIILIVWLADQYDAICCHTSTSKRHWLRFFYLYHFAFYAYHYRFNGQYSSLALVTSWLFIQQVRIQEMLLQAPPLGPGTPTALPGRRLSSPWCEVAPEACTR

SEQ ID NO: 841296 - protein, 617 aa, Homo sapiens
MSEHVEPAAPGPGPNGGGGGPAPARGPRTPNLNPNPLINVRDRLFHALFFKMAVTYSRLFPPAFRRLFEFFVLLKALFVLFVLAYIHIVFSRSPINCLEHVRDKWPREGILRVEVRHNSSRAPVFLQFCDSGGRGSFPGLAVEPGSNLDMEDEEEEELTMEMFGNSSIKFELDIEPKVFKPPSSTEALNDSQEFPFPETPTKVWPQDEYIVEYSLEYGFLRLSQATRQRLSIPVMVVTLDPTRDQCFGDRFSRLLLDEFLGYDDILMSSVKGLAENEENKGFLRNVVSGEHYRFVSMWMARTSYLAAFAIMVIFTLSVSMLLRYSHHQIFVFIVDLLQMLEMNMAIAFPAAPLLTVILALVGMEAIMSEFFNDTTTAFYIILIVWLADQYDAICCHTSTSKRHWLRFFYLYHFAFYAYHYRFNGQYSSLALVTSWLFIQHSMIYFFHHYELPAILQQVRIQEMLLQAPPLGPGTPTALPDDMNNNSGAPATAPDSAGQPPALGPVSPGASGSPGPVAAAPSSLVAAAASVAAAAGGDLGWMAETAAIITDASFLSGLSASLLERRPASPLGPAGGLPHAPQDSVPPSDSESHSGMEWAGGQTSHSGRNAEERSFHSI

SEQ ID NO: 841297 - protein, 711 aa, Homo sapiens
MSEHVEPAAPGPGPNGGGGGPAPARGPRTPNLNPNPLINVRDRLFHALFFKMAVTYSRLFPPAFRRLFEFFVLLKALFVLFVLAYIHIVFSRSPINCLEHVRDKWPREGILRVEVRHNSSRAPVFLQFCDSGGRGSFPGLAVEPGSNLDMEDEEEEELTMEMFGNSSIKFELDIEPKVFKPPSSTEALNDSQEFPFPETPTKVWPQDEYIVEYSLEYGFLRLSQATRQRLSIPVMVVTLGESELLGLGSSMAGPPLLPRVSSCWCGTGGCAGSTGVCPAPGTLPRAGVLDGFPKNGQGQEAGQASAMEPAGAGPRGGLGGAPGSLIHPPADPTRDQCFGDRFSRLLLDEFLGYDDILMSSVKGLAENEENKGFLRNVVSGEHYRFVSMWMARTSYLAAFAIMVIFTLSVSMLLRYSHHQIFVFIVDLLQMLEMNMAIAFPAAPLLTVILALVGMEAIMSEFFNDTTTAFYIILIVWLADQYDAICCHTSTSKRHWLRFFYLYHFAFYAYHYRFNGQYSSLALVTSWLFIQHSMIYFFHHYELPAILQQVRIQEMLLQAPPLGPGTPTALPDDMNNNSGAPATAPDSAGQPPALGPVSPGASGSPGPVAAAPSSLVAAAASVAAAAGGDLGWMAETAAIITDASFLSGLSASLLERRPASPLGPAGGLPHAPQDSVPPSDSAASDTTPLGAAVGGPSPASMAPTEAPSEVGS

SEQ ID NO: 841298 - protein, 668 aa, Homo sapiens
MSWGNICYQTPLVLWKACRLTQRPDPGVHAPLSQQGILEKELLVRYLEQRRGKSRAIGCNEVTPFCPTTSGSDFPSIPYYNPNPLINVRDRLFHALFFKMAVTYSRLFPPAFRRLFEFFVLLKALFVLFVLAYIHIVFSRSPINCLEHVRDKWPREGILRVEVRHNSSRAPVFLQFCDSGGRGSFPGLAVEPGSNLDMEDEEEEELTMEMFGNSSIKFELDIEPKVFKPPSSTEALNDSQEFPFPETPTKVWPQDEYIVEYSLEYGFLRLSQATRQRLSIPVMVVTLDPTRDQCFGDRFSRLLLDEFLGYDDILMSSVKGLAENEENKGFLRNVVSGEHYRFVSMWMARTSYLAAFAIMVIFTLSVSMLLRYSHHQIFVFIVDLLQMLEMNMAIAFPAAPLLTVILALVGMEAIMSEFFNDTTTAFYIILIVWLADQYDAICCHTSTSKRHWLRFFYLYHFAFYAYHYRFNGQYSSLALVTSWLFIQHSMIYFFHHYELPAILQQVRIQEMLLQAPPLGPGTPTALPDDMNNNSGAPATAPDSAGQPPALGPVSPGASGSPGPVAAAPSSLVAAAASVAAAAGGDLGWMAETAAIITDASFLSGLSASLLERRPASPLGPAGGLPHAPQDSVPPSDSAASDTTPLGAAVGGPSPASMAPTEAPSEVGS

SEQ ID NO: 841299 - protein, 420 aa, Homo sapiens
MSEHVEPAAPGPGPNGGGGGPAPARGPRTPNLNPNPLINVRDRLFHALFFKMAVTYSRLFPPAFRRLFEFFVLLKALFVLFVLAYIHIVFSRSPINCLEHVRDKWPREGILRVEVRHNSSRAPVFLQFCDSGGRGSFPGLAVEPGSNLDMEDEEEEELTMEMFGNSSIKFELDIEPKVFKPPSSTEALNDSQEFPFPETPTKVWPQDEYIVEYSLEYGFLRLSQATRQRLSIPVMVVTLDPTRDQCFGDRFSRLLLDEFLGYDDILMSSVKGLAENEENKGFLRNVVSGEHYRFVSMWMARTSYLAAFAIMVIFTLSVSMLLRYSHHQIFVFIVDLLQMLEMNMAIAFPAAPLLTVILALVGMEAIMSEFFNDTTTAFYIILIVWLADQYDAICCHTSTSKRHWLRLLSLRPRRFLHITR

SEQ ID NO: 841300 - protein, 406 aa, Homo sapiens
MSEHVEPAAPGPGPNGGGGGPAPARGPRTPNLNPNPLINVRDRLFHALFFKMAVTYSRLFPPAFRRLFEFFVLLKALFVLFVLAYIHIVFSRSPINCLEHVRDKWPREGILRVEVRHNSSRAPVFLQFCDSGGRGSFPGLAVEPGSNLDMEDEEEEELTMEMFGNSSIKFELDIEPKVFKPPSSTEALNDSQEFPFPETPTKVWPQDEYIVEYSLEYGFLRLSQATRQRLSIPVMVVTLDPTRDQCFGDRFSRLLLDEFLGYDDILMSSVKGLAENEENKGFLRNVVSGEHYRFVSMWMARTSYLAAFAIMVIFTLSVSMLLRYSHHQIFVFIVDLLQMLEMNMAIAFPAAPLLTVILALVGMEAIMSEFFNDTTTAFYIILIVWLADQYDAICCHTSTSKRHWLR

SEQ ID NO: 841301 - protein, 794 aa, Homo sapiens
MSEHVEPAAPGPGPNGGGGGPAPARGPRTPNLNPNPLINVRDRLFHALFFKMAVTYSRLFPPAFRRLFEFFVLLKALFVLFVLAYIHIVFSRSPINCLEHVRDKWPREGILRVEVRHNSSRAPVFLQFCDSGGRGSFPGLAVEPGSNLDMEDEEEEELTMEMFGNSSIKFELDIEPKVFKPPSSTEALNDSQEFPFPETPTKVWPQDEYIVEYSLEYGFLRLSQATRQRLSIPVMVVTLGESELLGLGSSMAGPPLLPRVSSCWCGTGGCAGSTGVCPAPGTLPRAGVLDGFPKNGQGQEAGQASAMEPAGAGPRGGLGGAPGSLIHPPADPTRDQCFGDRFSRLLLDEFLGYDDILMSSVKGLAENEENKGFLRNVVSGEHYRFVSMWMARTSYLAAFAIMVIFTLSVSMLLRYSHHQIFVFIGECPAGAGRGGRPPGPHRAPAALLPAVDLLQMLEMNMAIAFPAAPLLTVILALVGMEAIMSEFFNDTTTAFYIILIVWLADQYDAICCHTSTSKRHWLRRAWRGGRVEWVLVGRGRGLPEGGALEAGVVAAPRGNPRGWAWQGGTCSPDALTPPRRFFYLYHFAFYAYHYRFNGQYSSLALVTSWLFIQHSMIYFFHHYELPAILQQVRIQEMLLQAPPLGPGTPTALPDDMNNNSGAPATAPDSAGQPPALGPVSPGASGSPGPVAAAPSSLVAAAASVAAAAGGDLGWMAETAAIITDASFLSGLSASLLERRPASPLGPAGGLPHAPQDSVPPSDSAASDTTPLGAAVGGPSPASMAPTEAPSEVGS

SEQ ID NO: 841302 - protein, 423 aa, Homo sapiens
MSEHVEPAAPGPGPNGGGGGPAPARGPRTPNLNPNPLINVRDRLFHALFFKMAVTYSRLFPPAFRRLFEFFVLLKALFVLFVLAYIHIVFSRSPINCLEHVRDKWPREGILRVEVRHNSSRAPVFLQFCDSGGRGSFPGLAVEPGSNLDMEDEEEEELTMEMFGNSSIKFELDIEPKVFKPPSSTEALNDSQEFPFPETPTKGPHPAPQFFYLYHFAFYAYHYRFNGQYSSLALVTSWLFIQHSMIYFFHHYELPAILQQVRIQEMLLQAPPLGPGTPTALPDDMNNNSGAPATAPDSAGQPPALGPVSPGASGSPGPVAAAPSSLVAAAASVAAAAGGDLGWMAETAAIITDASFLSGLSASLLERRPASPLGPAGGLPHAPQDSVPPSDSAASDTTPLGAAVGGPSPASMAPTEAPSEVGS

SEQ ID NO: 841303 - protein, 497 aa, Homo sapiens
MSEHVEPAAPGPGPNGGGGGPAPARGPRTPNLNPNPLINVRDRLFHALFFKMAVTYSRLFPPAFRRLFEFFVLLKALFVLFVLAYIHIVFSRSPINCLEHVRDKWPREGILRVEVRHNSSRAPVFLQFCDSGGRGSFPGLAVEPGSNLDMEDEEEEELTMEMFGNSSIKFELDIEPKVFKPPSSTEALNDSQEFPFPETPTKVWPQDEYIVEYSLEYGFLRLSQATRQRLSIPVMVVTLGESELLGLGSSMAGPPLLPRVSSCWCGTGGCAGSTGVCPAPGTLPRAGVLDGFPKNGQGQEAGQASAMEPAGAGPRGGLGGAPGSLIHPPADPTRDQCFGDRFSRLLLDEFLGYDDILMSSVKGLAENEENKGFLRNVVSGEHYRFVSMWMARTSYLAAFAIMVIFTLSVSMLLRYSHHQIFVFIVDLLQMLEMNMAIAFPAAPLLTVILALVGMEAIMSEFFNDTTTAFYIILIVWLADQYDAICCHTSTSKRHWLR

SEQ ID NO: 841304 - protein, 462 aa, Homo sapiens
KNRCLATLRSNFELDIEPKVFKPPSSTEALNDSQEFPFPETPTKVWPQDEYIVEYSLEYGFLRLSQATRQRLSIPVMVVTLDPTRDQCFGDRFSRLLLDEFLGYDDILMSSVKGLAENEENKGFLRNVVSGEHYRFVSMWMARTSYLAAFAIMVIFTLSVSMLLRYSHHQIFVFIVDLLQMLEMNMAIAFPAAPLLTVILALVGMEAIMSEFFNDTTTAFYIILIVWLADQYDAICCHTSTSKRHWLRFFYLYHFAFYAYHYRFNGQYSSLALVTSWLFIQHSMIYFFHHYELPAILQQVRIQEMLLQAPPLGPGTPTALPDDMNNNSGAPATAPDSAGQPPALGPVSPGASGSPGPVAAAPSSLVAAAASVAAAAGGDLGWMAETAAIITDASFLSGLSASLLERRPASPLGPAGGLPHAPQDSVPPSDSAASDTTPLGAAVGGPSPASMAPTEAPSEVGS

SEQ ID NO: 841305 - protein, 166 aa, Homo sapiens
MSEHVEPAAPGPGPNGGGGGPAPARGPRTPNLNPNPLINVRDRLFHALFFKMAVTYSRLFPPAFRRLFEFFVLLKALFVLFVLAYIHIVFSRSPINCLEHVRDKWPREGILRVEVRHNSSRAPVFLQFCGVQPARWALLGASPTPPRTVSPRVTPQLLTQLPWGLR

SEQ ID NO: 841306 - protein, 184 aa, Homo sapiens
FQKGLQFPLDFAHKGGPQKVRAVYSCTREAPARIFSSASCPLLRYSHHQIFVFIAPLLTVILALVGMEAIMSEFFNDTTTAFYIILIVWLADQYDAICCHTSTSKRHWLRFFYLYHFAFYAYHYRFNGQYSSLALVTSWLFIQQVRIQEMLLQAPPLGPGTPTALPGRRLSSPWCEVAPEACTR

SEQ ID NO: 841307 - protein, 166 aa, Homo sapiens; identical to SEQ ID NO: 841305

SEQ ID NO: 841308 - protein, 96 aa, Homo sapiens
GREKRTWCGIRRVVDLLQMLEMNMAIAFPAAPLLTVILALVGMEAIMSEFFNDTTTAFYIILIVWLADQYDAICCHTSTSKRHWLRLLSLPPQCRN

SEQ ID NO: 841309 - protein, 603 aa, Homo sapiens
MSEHVEPAAPGPGPNGGGGGPAPARGPRTPNLNPNPLINVRDRLFHALFFKMAVTYSRLFPPAFRRLFEFFVLLKALFVLFVLAYIHIVFSRSPINCLEHVRDKWPREGILRVEVRHNSSRAPVFLQFCDSGGRGSFPGLAVEPGSNLDMEDEEEEELTMEMFGNSSIKFELDIEPKVFKPPSSTEALNDSQEFPFPETPTKVWPQDEYIVEYSLEYGFLRLSQATRQRLSIPVMVVTLDPTRDQCFGDRFSRLLLDEFLGYDDILMSSVKGLAENEENKGFLRNVVSGEHYRFVSMWMARTSYLAAFAIMVIFTLSVSMLLRYSHHQIFVFIAPLLTVILALVGMEAIMSEFFNDTTTAFYIILIVWLADQYDAICCHTSTSKRHWLRFFYLYHFAFYAYHYRFNGQYSSLALVTSWLFIQHSMIYFFHHYELPAILQQVRIQEMLLQAPPLGPGTPTALPDDMNNNSGAPATAPDSAGQPPALGPVSPGASGSPGPVAAAPSSLVAAAASVAAAAGGDLGWMAETAAIITDASFLSGLSASLLERRPASPLGPAGGLPHAPQDSVPPSDSAASDTTPLGAAVGGPSPASMAPTEAPSEVGS

SEQ ID NO: 841310 - protein, 620 aa, Homo sapiens; identical to SEQ ID NO: 841293

SEQ ID NO: 841311 - protein, 574 aa, Homo sapiens
MSEHVEPAAPGPGPNGGGGGPAPARGPRTPNLNPNPLINVRDRLFHALFFKMAVTYSRLFPPAFRRLFEFFVLLKALFVLFVLAYIHIVFSRSPINCLEHVRDKWPREGILRVEVRHNSSRAPVFLQFCDSGGRGSFPGLAVEPGSNLDMEDEEEEELTMEMFGNSSIKFELDIEPKVFKPPSSTEALNDSQEFPFPETPTKVWPQDEYIVEYSLEYGFLRLSQATRQRLSIPVMVVTLDPTRDQCFGDRFSRLLLDEFLGYDDILMSSVKGLAENEENKGFLRNVVSGEHYRFVSMWMARTSYLAAFAIMVIFTLSVSMLLRYSHHQIFVFIVDLLQMLEMNMAIAFPAAPLLTVILALVGMEAIMSEFFNDTTTAFYIILIVWLADQYDAICCHTSTSKRHWLRFFYLYHFAFYAYHYRFNGQYSSLALVTSWLFIQHSMIYFFHHYELPAILQQVRIQEMLLQAPPLGPGTPTALPDDMNNNSGAPATAPDSAGQPPALGPVSPGASGSPGPVAAAPSSLVAAAASVAAAAGGDLGWMAETAAIITDASFLSGGQTSHSGRNAEERSFHSI

SEQ ID NO: 841312 - protein, 666 aa, Homo sapiens
MSEHVEPAAPGPGPNGGGGGPAPARGPRTPNLNPNPLINVRDRLFHALFFKMAVTYSRLFPPAFRRLFEFFVLLKALFVLFVLAYIHIVFSRSPINCLEHVRDKWPREGILRVEVRHNSSRAPVFLQFCDSGGRGSFPGLAVEPGSNLDMEDEEEEELTMEMFGNSSIKFELDIEPKVFKPPSSTEALNDSQEFPFPETPTKVWPQDEYIVEYSLEYGFLRLSQATRQRLSIPVMVVTLGESELLGLGSSMAGPPLLPRVSSCWCGTGGCAGSTGAPGSLIHPPADPTRDQCFGDRFSRLLLDEFLGYDDILMSSVKGLAENEENKGFLRNVVSGEHYRFVSMWMARTSYLAAFAIMVIFTLSVSMLLRYSHHQIFVFIVDLLQMLEMNMAIAFPAAPLLTVILALVGMEAIMSEFFNDTTTAFYIILIVWLADQYDAICCHTSTSKRHWLRFFYLYHFAFYAYHYRFNGQYSSLALVTSWLFIQHSMIYFFHHYELPAILQQVRIQEMLLQAPPLGPGTPTALPDDMNNNSGAPATAPDSAGQPPALGPVSPGASGSPGPVAAAPSSLVAAAASVAAAAGGDLGWMAETAAIITDASFLSGLSASLLERRPASPLGPAGGLPHAPQDSVPPSDSAASDTTPLGAAVGGPSPASMAPTEAPSEVGS

SEQ ID NO: 841313 - protein, 416 aa, Homo sapiens
MSEHVEPAAPGPGPNGGGGGPAPARGPRTPNLNPNPLINVRDRLFHALFFKMAVTYSRLFPPAFRRLFEFFVLLKALFVLFVLAYIHIVFSRSPINCLEHVRDKWPREGILRVEVRHNSSRAPVFLQFCDSGGRGSFPGLAVEPGSNLDMEDEEEEELTMEMFGNSSIKFELDIEPKVFKPPSSTEALNDSQEFPFPETPTKVWPQDEYIVEYSLEYGFLRLSQATRQRLSIPVMVVTLDPTRDQCFGDRFSRLLLDEFLGYDDILMSSVKGLAENEENKGFLRNVVSGEHYRFVSMWMARTSYLAAFAIMVIFTLSVSMLLRYSHHQIFVFIVDLLQMLEMNMAIAFPAAPLLTVILALVGMEAIMSEFFNDTTTAFYIILIVWLADQYDAICCHTSTSKRHWLRLLSLPPQCRN

SEQ ID NO: 841314 - protein, 626 aa, Homo sapiens
MSEHVEPAAPGPGPNGGGGGPAPARGPRTPNLNPNPLINVRDRLFHALFFKMAVTYSRLFPPAFRRLFEFFVLLKALFVLFVLAYIHIVFSRSPINCLEHVRDKWPREGILRVEVRHNSSRAPVFLQFCDSGGRGSFPGLAVEPGSNLDMEDEEEEELTMEMFGNSSIKVPGRPQFELDIEPKVFKPPSSTEALNDSQEFPFPETPTKVWPQDEYIVEYSLEYGFLRLSQATRQRLSIPVMVVTLDPTRDQCFGDRFSRLLLDEFLGYDDILMSSVKGLAENEENKGFLRNVVSGEHYRFVSMWMARTSYLAAFAIMVIFTLSVSMLLRYSHHQIFVFIVDLLQMLEMNMAIAFPAAPLLTVILALVGMEAIMSEFFNDTTTAFYIILIVWLADQYDAICCHTSTSKRHWLRFFYLYHFAFYAYHYRFNGQYSSLALVTSWLFIQHSMIYFFHHYELPAILQQVRIQEMLLQAPPLGPGTPTALPDDMNNNSGAPATAPDSAGQPPALGPVSPGASGSPGPVAAAPSSLVAAAASVAAAAGGDLGWMAETAAIITDASFLSGLSASLLERRPASPLGPAGGLPHAPQDSVPPSDSAASDTTPLGAAVGGPSPASMAPTEAPSEVGS

SEQ ID NO: 841315 - protein, 718 aa, Homo sapiens
GRSCPAWRLASVSSAAAGRESGRWRRRPGGREESGGCEGGRWRPGGALGHLRVVRARRWEACRSTWSPQLRGPGPTAAAAARPPRAGLAPPISTPTPSSTCATGSSTRCSSRWLSPIRGSSRPPSAVSSSSSCCSSDSGGRGSFPGLAVEPGSNLDMEDEEEEELTMEMFGNSSIKFELDIEPKVFKPPSSTEALNDSQEFPFPETPTKVWPQDEYIVEYSLEYGFLRLSQATRQRLSIPVMVVTLGESELLGLGSSMAGPPLLPRVSSCWCGTGGCAGSTGVCPAPGTLPRAGVLDGFPKNGQGQEAGQASAMEPAGAGPRGGLGGAPGSLIHPPADPTRDQCFGDRFSRLLLDEFLGYDDILMSSVKGLAENEENKGFLRNVVSGEHYRFVSMWMARTSYLAAFAIMVIFTLSVSMLLRYSHHQIFVFIVDLLQMLEMNMAIAFPAAPLLTVILALVGMEAIMSEFFNDTTTAFYIILIVWLADQYDAICCHTSTSKRHWLRFFYLYHFAFYAYHYRFNGQYSSLALVTSWLFIQHSMIYFFHHYELPAILQQVRIQEMLLQAPPLGPGTPTALPDDMNNNSGAPATAPDSAGQPPALGPVSPGASGSPGPVAAAPSSLVAAAASVAAAAGGDLGWMAETAAIITDASFLSGLSASLLERRPASPLGPAGGLPHAPQDSVPPSDSAASDTTPLGAAVGGPSPASMAPTEAPSEVGS

SEQ ID NO: 841316 - protein, 280 aa, Homo sapiens
MQDMKKKSAIEHLEPVILALVGMEAIMSEFFNDTTTAFYIILIVWLADQYDAICCHTSTSKRHWLRFFYLYHFAFYAYHYRFNGQYSSLALVTSWLFIQHSMIYFFHHYELPAILQQVRIQEMLLQAPPLGPGTPTALPDDMNNNSGAPATAPDSAGQPPALGPVSPGASGSPGPVAAAPSSLVAAAASVAAAAGGDLGWMAETAAIITDASFLSGLSASLLERRPASPLGPAGGLPHAPQDSVPPSDSAASDTTPLGAAVGGPSPASMAPTEAPSEVGS

SEQ ID NO: 841317 - protein, 140 aa, Homo sapiens
KKAAATKKPATAPDSAGQPPALGPVSPGASGSPGPVAAAPSSLVAAAASVAAAAGGDLGWMAETAAIITDASFLSGLSASLLERRPASPLGPAGGLPHAPQDSVPPSDSAASDTTPLGAAVGGPSPASMAPTEAPSEVGS

SEQ ID NO: 841318 - protein, 160 aa, Homo sapiens [sequence omitted]

SEQ ID NO: 841319 - protein, 160 aa, Homo sapiens [sequence omitted]

SEQ ID NO: 841320 - protein, 160 aa, Homo sapiens [sequence omitted]

SEQ ID NO: 841321 - protein, 132 aa, Homo sapiens
MELFLWPHICESIRKGMGTVQKGMPHKCYHGKTGRVYNVTQHAVGIVVNKQVKGKILAKRINVRIEHIKHSKSRDSFLKRVKENDQKKKEAKEKGTWVQLKRQPAPPREAHFVRTNGKEPELLEPIPYEFMA

SEQ ID NO: 841322 - protein, 64 aa, Homo sapiens
MTHSGTESTIKNNHSGPQTRHGNDTHPGGTASTTSELHNTHSEARKRINGQQENIIEDTEKHNA

SEQ ID NO: 841323 - protein, 83 aa, Homo sapiens
SLGAKTSGWNGCAWEPAETDAAEATVKKKEIGACLEPTPTFEGPDRATSQLPGLVVASSLQKPWKSLESVFPGWGCQITPVGG

SEQ ID NO: 841324 - protein, 42 aa, Homo sapiens
VCFCMNSPRSVFAAGPHSRLFVSGPDVFSVLQNHLEKRELDI

SEQ ID NO: 841325 - protein, 93 aa, Homo sapiens
AATFIKDTLVKLKAHIAPHTITVGDFNTPLSSMDRSWKQKLNRDTVKLTKVMKQMDLTVINRTFCPKTKGYTFFSAPHGTFSKIDHILGHKTG

SEQ ID NO: 841326 - protein, 83 aa, Homo sapiens
LRIPHTPKAHTEQILMDEVVAAHAELTIHTQIAVDEVVANLNGQKLLRPDSYFSDFQPFSFVRALYIYHETTAPSLICHISFS

SEQ ID NO: 841327 - protein, 38 aa, Homo sapiens
MRAEQKEPALRSPNTEIPLEGRVVEEEEEFSQEEEEFA

SEQ ID NO: 841328 - protein, 173 aa, Homo sapiens
KRRSNRQVKRKKYTEDLDIKITDDEEEEEVDVTGPIKPEPILPEPVQEPDGETLPSMQFFVENPSEEDAAIVDKVLSMRIVKKELPSGQYTEAEEFFVKYKNYSYLHCEWATISQLEKDKRIHQKLKRFKTKMAQMRHFFHEDEEPFNPDYVEVDRILDESHSIDKDNGEVSC

SEQ ID NO: 841329 - protein, 482 aa, Homo sapiens
LFPGIAMETPGASASSLLLPAASRPPRKREAGEAGAATSKQRVLDEEEYIEGLQTVIQRDFFPDVEKLQAQKEYLEAEENGDLERMRQIAIKFGSALGKMSREPPPPYVTPATFETPEVHAGTGVVGNKPRPRGRGLEDGEAGEEEEKEPLPSLDVFLSRYTSEDNASFQEIMEVAKERSRARHAWLYQAEEEFEKRQKDNLELPSAEHQAIESSQASVETWKYKAKNSLMYYPEGVPDEEQLFKKPRQVVHKNTRFLRDPFSQALSRCQLQQAAALNAQHKQGKVGPDGKELIPQESPRVGGFGFVATPSPAPGVNESPMMTWGEVENTPLRVEGSETPYVDRTPGPAFKILEPGRRERLGLKMANEAAAKNRAKKQEALRRVTENLASLTPKGLSPAMSPALQRLVSRTASKYTDRALRASYTPSPARSTHLKTPASGLQTPTSTPAPGSATRTPLTQDPASITDNLLQLPARRKASDFF

SEQ ID NO: 841330 - protein, 588 aa, Homo sapiens
LFPGIAMETPGASASSLLLPAASRPPRKREAGEAGAATSKQRVLDEEEYIEGLQTVIQRDFFPDVEKLQAQKEYLEAEENGDLERMRQIAIKFGSALGKMSREPPPPYVTPATFETPEVHAGTGVVGNKPRPRGRGLEDGEAGEEEEKEPLPSLDVFLSRYTSEDNASFQEIMEVAKERSRARHAWLYQAEEEFEKRQKDNLELPSAEHQAIESSQASVETWKYKAKNSLMYYPEGKWRASQPNGEVLGRAVCVWLCLEQPPGVYGRAPLQFGLLMGTGLSKGGQVCVRSAVSETLSSGTGACVLLNAFVHLGVTWPRSELLMLLRLLPFCHLLLPLLRLPGVPDEEQLFKKPRQVVHKNTRFLRDPFSQALSRCQLQQAAALNAQHKQGKVGPDGKELIPQESPRVGGFGFVATPSPAPGVNESPMMTWGEVENTPLRVEGSETPYVDRTPGPAFKILEPGRRERLGLKMANEAAAKNRAKKQEALRRVTENLASLTPKGLSPAMSPALQRLVSRTASKYTDRALRASYTPSPARSTHLKTPASGLQTPTSTPAPGSATRTPLTQDPASITDNLLQLPARRKASDFF

SEQ ID NO: 841331 - protein, 472 aa, Homo sapiens
SVTLRKALEFKTSRPPRKREAGEAGAATSKQRVLDEEEYIEGLQTVIQRDFFPDVEKLQAQKEYLEAEENGDLERMRQIAIKFGSALGKMSREPPPPYVTPATFETPEVHAGTGVVGNKPRPRGRGLEDGEAGEEEEKEPLPSLDVFLSRYTSEDNASFQEIMEVAKERSRARHAWLYQAEEEFEKRQKDNLELPSAEHQAIESSQASVETWKYKAKNSLMYYPEGVPDEEQLFKKPRQVVHKNTRFLRDPFSQALSRCQLQQAAALNAQHKQGKVGPDGKELIPQESPRVGGFGFVATPSPAPGVNESPMMTWGEVENTPLRVEGSETPYVDRTPGPAFKILEPGRRERLGLKMANEAAAKNRAKKQEALRRVTENLASLTPKGLSPAMSPALQRLVSRTASKYTDRALRASYTPSPARSTHLKTPASGLQTPTSTPAPGSATRTPLTQDPASITDNLLQLPARRKASDFF

SEQ ID NO: 841332 - protein, 632 aa, Homo sapiens
AFSWDSDGDAGRISVVLVASRRVQAPEEARGGRGWGCDEQAAGPGRGRVYRGTTSVRTPATSGPILCFKLLSGSLSRVLTLRLLVEVEEPGVDGPTSQVNRAEEDVCGGRGCSSVVREKRERLSLYGTGVRERRFSVKVLSRSLTNWKDGGKEGFLKSGGSKCECWGSWKETAVVTASRVSGPASPHHRTQKEELKRGLAEGLQTVIQRDFFPDVEKLQAQKEYLEAEENGDLERMRQIAIKFGSALGKMSREPPPPYVTPATFETPEVHAGTGVVGNKPRPRGRGLEDGEAGEEEEKEPLPSLDVFLSRYTSEDNASFQEIMEVAKERSRARHAWLYQAEEEFEKRQKDNLELPSAEHQAIESSQASVETWKYKAKNSLMYYPEGVPDEEQLFKKPRQVVHKNTRFLRDPFSQALSRCQLQQAAALNAQHKQGKVGPDGKELIPQESPRVGGFGFVATPSPAPGVNESPMMTWGEVENTPLRVEGSETPYVDRTPGPAFKILEPGRRERLGLKMANEAAAKNRAKKQEALRRVTENLASLTPKGLSPAMSPALQRLVSRTASKYTDRALRASYTPSPARSTHLKTPASGLQTPTSTPAPGSATRTPLTQDPASITDNLLQLPARRKASDFF

SEQ ID NO: 841333 - protein, 469 aa, Homo sapiens
LFPGIAMETPGASASSLLLPAASRPPRKREAGEAGAATSKQRVLDEEEYIEGLQTVIQRDFFPDVEKLQAQKEYLEAEENGDLERMRQIAIKFGSALGKMSREPPPPYVTPATFETPEVHAGTGVVGNKPRPRGRGLEDGEAGEEEEKEPLPSLDVFLSRYTSEDNASFQEIMEVAKERSRARHAWLYQAEEEFEKRQKDNLELPSAEHQAIESSQASVETWKYKAKNSLMYYPEGVPDEEQLFKKPRQVVHKNTRFLRDPFSQALSRCQLQQAAALNAQHKQGKVGPDGKELIPQESPRVGGFGFVATPSPAPGVNESPMMTWGEVENTPLRVEGSETPYVDRTPGPAFKILEPGRRERLGLKMANEAAAKNRAKKQEALRRVTENLASLTPKGLSPAMSPALQRLVSRTASKPRPVGCRPPQAHRRLALPHAPLSHRTRPPSRTTCCSSLPGAKLRTSFRARPGLGS

SEQ ID NO: 841334 - protein, 118 aa, Homo sapiens
MANEAAAKNRAKKQEALRRVTENLASLTPKGLSPAMSPALQRLVSRTASKYTDRALRASYTPSPARSTHLKTPASGLQTPTSTPAPGSATRTPLTQDPASITDNLLQLPARRKASDFF

SEQ ID NO: 841335 - protein, 128 aa, Homo sapiens
PSLSARRLNSSVQAPEEARGGRGWGCDEQAAGPGRGRVYRGTTSVRTPATSGPILCFKLLSGSLSRVLTLRLLVEVEEPGVDGPTSQVNRAEEDVCGGRGCSSVVREKRERTDNLLQLPARRKASDFF

SEQ ID NO: 841336 - protein, 144 aa, Homo sapiens
FPERLSEVMVLGGTRRQVRSAAPWAGQVGFGAFQGLLVGGDGLWGFCRQQREAGTHHSGFLCEGLPGVWQAWRSYPHTCYLVDPGARPQGAAGSEDGQRGRCQEPGQEAGSLAESDGESGQVRGRLAGGEVRGWLWPAPVRPLP

SEQ ID NO: 841337 - protein, 482 aa, Homo sapiens; identical to SEQ ID NO: 841329

SEQ ID NO: 841338 - protein, 610 aa, Homo sapiens
AFSWDSDGDAGRISVVLVASRRVQAPEEARGGRGWGCDEQAAGPGRGRVYRGTTSVRTPATSGPILCFKLLSGSLSRVLTLRLLVEVEEPGVDGPTSQVNRAEEDVCGGRGCSSVVREKRERLSLYGTGVRERRFSVKVLSRSLTNWKDGGKEGFLKSGGSKCECWGSWKETAVVTASRGLQTVIQRDFFPDVEKLQAQKEYLEAEENGDLERMRQIAIKFGSALGKMSREPPPPYVTPATFETPEVHAGTGVVGNKPRPRGRGLEDGEAGEEEEKEPLPSLDVFLSRYTSEDNASFQEIMEVAKERSRARHAWLYQAEEEFEKRQKDNLELPSAEHQAIESSQASVETWKYKAKNSLMYYPEGVPDEEQLFKKPRQVVHKNTRFLRDPFSQALSRCQLQQAAALNAQHKQGKVGPDGKELIPQESPRVGGFGFVATPSPAPGVNESPMMTWGEVENTPLRVEGSETPYVDRTPGPAFKILEPGRRERLGLKMANEAAAKNRAKKQEALRRVTENLASLTPKGLSPAMSPALQRLVSRTASKYTDRALRASYTPSPARSTHLKTPASGLQTPTSTPAPGSATRTPLTQDPASITDNLLQLPARRKASDFF

SEQ ID NO: 841339 - protein, 310 aa, Homo sapiens
MEVAKERSRARHAWLYQAEEEFEKRQKDNLELPSAEHQAIESSQASVETWKYKAKNSLMYYPEGVPDEEQLFKKPRQVVHKNTRFLRDPFSQALSRCQLQQAAALNAQHKQGKVGPDGKELIPQESPRVGGFGFVATPSPAPGVNESPMMTWGEVENTPLRVEGSETPYVDRTPGPAFKILEPGRRERLGLKMANEAAAKNRAKKQEALRRVTENLASLTPKGLSPAMSPALQRLVSRTASKYTDRALRASYTPSPARSTHLKTPASGLQTPTSTPAPGSATRTPLTQDPASITDNLLQLPARRKASDFF

SEQ ID NO: 841340 - protein, 104 aa, Homo sapiens
PSLSARRLNSSVQAPEEARGGRGWGCDEQAAGPGRGRVYRGTTSVRTPATSGPILCFKLLSGSLSRVLTLRLLVEVEEPGVDGPTSQTDNLLQLPARRKASDFF

SEQ ID NO: 841341 - protein, 83 aa, Homo sapiens
DPHHLHPITYTSIIYTPSPTPRSSIPHHLHLNHLYPITYTLIIYTPSPTSRSSISQSSTPHHLQPDHLYPDHLQPDHLYPITY

SEQ ID NO: 841342 - protein, 73 aa, Homo sapiens
SATIISLSSSSIPPPLLTAAHRLGRVEFGAQLPPNPATTSTALSHTHADFSLAYGHKSVIRWVHVLSLFQASS

SEQ ID NO: 841343 - protein, 112 aa, Homo sapiens
MRLFSAATASRVSVPRSPPPRLLPLPRHESGFLPWRVAETSSPSPHLGSPPALASSGDALGPGAVGSMEGRWLPVIGVVFCAVQLLPCGPLALPRAGARRPGRCCSCFQLTA

SEQ ID NO: 841344 - protein, 108 aa, Homo sapiens
LGVNRPRAAMSKPRASRPAHSDSEQSLSFDPSPAPFPGTPAPRAALPTCLAMETPVPAAAPPCSGAQASSTPLSPTRITLCLHVRMDVTLACACSHCICLVLCLYILT

SEQ ID NO: 841345 - protein, 127 aa, Homo sapiens
RDVAFGLSSQLRGKLGVGWKSRVDPGARPRGEVLGREDKARSSDGGRAGLCVLWGPGKGARLGLEPPGKGWGPLIPKQQAISPRPPPAPPVSEISEAPTGKVSSPASACPWLLASNTWGIMMLPVVS

SEQ ID NO: 841346 - protein, 467 aa, Homo sapiens
MGSSVSLRAGWRMRCRNCGAQHEDQVEQYKKELEKTYSAKLDNARQSAERNSNLVGAAHEELQQSRIRIDSLSAQLSQLQKQLAAKEAKLRDLEDSLARERDTSRRLLAEKEREMAEMRARMQQQLDEYQELLDIKLALDMEIHAYRKLLEGEEERLRLSPSPTSQRSRGRASSHSSQTQGGGSVTKKRKLESTESRSSFSQHARTSGRVAVEEVDEEGKFVRLRNKSNEDQSMGNWQIKRQNGDDPLLTYRFPPKFTLKAGQVVTIWAAGAGATHSPPTDLVWKAQNTWGCGNSLRTALINSTGEEVAMRKLVRSVTVVEDDEDEDGDDLLHHHHGSHCSSSGDPAEYNLRSRTVLCGTCGQPADKAFCQRLRSPGGRTHLLWLFCLQCHGHSHATAVWGAVGVAASGTIWSPAPTSWATPAPEPRAPRTAASCNLGPARQGWGWRLPASSSPHAHPLPCTSWEGA

SEQ ID NO: 841347 - protein, 467 aa, Homo sapiens; identical to SEQ ID NO: 841346

SEQ ID NO: 841348 - protein, 351 aa, Homo sapiens
MRPDWWRLTMGSSVSLRAGWRMRCRNCGAQHEDQVEQYKKELEKTYSAKLDNARQSAERNSNLVGAAHEELQQSRIRIDSLSAQLSQLQKQLAAKEAKLRDLEDSLARERDTSRRLLAEKEREMAEMRARMQQQLDEYQELLDIKLALDMEIHAYRKLLEGEEERLRLSPSPTSQRSRGRASSHSSQTQGGGSVTKKRKLESTESRSSFSQHARTSGRVAVEEVDEEGKFVRLRNKSNEDQSMGNWQIKRQNGDDPLLTYRFPPKFTLKAGQVVTIWAAGAGATHSPPTDLVWKAQNTWGCGNSLRTALINSTGEEVAMRKLVRSVTVVEDDEDEDGDDLLHHHHVSGSRR

SEQ ID NO: 841349 - protein, 354 aa, Homo sapiens
MRPDWWRLTMGSSVSLRAGWRMRCRNCGAQHEDQVEQYKKELEKTYSAKLDNARQSAERNSNLVGAAHEELQQSRIRIDSLSAQLSQLQKQLAAKEAKLRDLEDSLARERDTSRRLLAEKEREMAEMRARMQQQLDEYQELLDIKLALDMEIHAYRKLLEGEEERLRLSPSPTSQRSRGRASSHSSQTQGGGSVTKKRKLESTESRSSFSQHARTSGRVAVEEVDEEGKFVRLRNKSNEDQSMGNWQIKRQNGDDPLLTYRFPPKFTLKAGQVVTIWAAGAGATHSPPTDLVWKAQNTWGCGNSLRTALINSTGEEVAMVSRPGPGCLLDEAPPDGQHRSQLPPTQVCQFRAPF

SEQ ID NO: 841350 - protein, 351 aa, Homo sapiens; identical to SEQ ID NO: 841348

SEQ ID NO: 841351 - protein, 441 aa, Homo sapiens
MRPDWWRLTMGSSVSLRAGWRMRCRNCGAQHEDQVEQYKKELEKTYSAKLDNARQSAERNSNLVGAAHEELQQSRIRIDSLSAQLSQLQKQLAAKEAKLRDLEDSLARERDTSRRLLAEKEREMAEMRARMQQQLDEYQELLDIKLALDMEIHAYRKLLEGEEERLRLSPSPTSQRSRGRASSHSSQTQGGGSVTKKRKLESNEDQSMGNWQIKRQNGDDPLLTYRFPPKFTLKAGQVVTIWAAGAGATHSPPTDLVWKAQNTWGCGNSLRTALINSTGEEVAMRKLVRSVTVVEDDEDEDGDDLLHHHHGSHCSSSGDPAEYNLRSRTVLCGTCGQPADKAFCQRLRSPGGRTHLLWLFCLQCHGHSHATAVWGAVGVAASGTIWSPAPTSWATPAPEPRAPRTAASCNLGPARQGWGWRLPASSSPHAHPLPCTSWEGA

SEQ ID NO: 841352 - protein, 351 aa, Homo sapiens; identical to SEQ ID NO: 841348

SEQ ID NO: 841353 - protein, 351 aa, Homo sapiens; identical to SEQ ID NO: 841348

SEQ ID NO: 841354 - protein, 351 aa, Homo sapiens; identical to SEQ ID NO: 841348

SEQ ID NO: 841355 - protein, 467 aa, Homo sapiens; identical to SEQ ID NO: 841346

SEQ ID NO: 841356 - protein, 333 aa, Homo sapiens
MRPDWWRLTMGSSVSLRAGWRMRCRNCGAQHEDQVEQYKKELEKTYSAKLDNARQSAERNSNLVGAAHEELQQSRIRIDSLSAQLSQLQKQLAAKEAKLRDLEDSLARERDTSRRLLAEKEREMAEMRARMQQQLDEYQELLDIKLALDMEIHAYRKLLEGEEERLRLSPSPTSQRSRGRASSHSSQTQGGGSVTKKRKLESTESRSSFSQHARTSGRVAVEEVDEEGKFVRLRNKSNEDQSMGNWQIKRQNGDDPLLTYRFPPKFTLKAGQVVTTIWSPAPTSWATPAPEPRAPRTAASCNLGPARQGWGWRLPASSSPHAHPLPCTSWEGA

SEQ ID NO: 841357 - protein, 467 aa, Homo sapiens; identical to SEQ ID NO: 841346

SEQ ID NO: 841358 - protein, 354 aa, Homo sapiens; identical to SEQ ID NO: 841349

SEQ ID NO: 841359 - protein, 305 aa, Homo sapiens
  misc_feature (289)..(289): Xaa can be any naturally occurring amino acid
  misc_feature (302)..(302): Xaa can be any naturally occurring amino acid
MRPDWWRLTMGSSVSLRAGWRMRCRNCGAQHEDQVEQYKKELEKTYSAKLDNARQSAERNSNLVGAAHEELQQSRIRIDSLSAQLSQLQKQLAAKEAKLRDLEDSLARERDTSRRLLAEKEREMAEMRARMQQQLDEYQELLDIKLALDMEIHAYRKLLEGEEERLRLSPSPTSQRSRGRASSHSSQTQGGGSVTKKRKLESTESRSSFSQHARTSGRVAVEEVDEEGKFVRLRNKSNEDQSMGNWQIKRQNGDDPLLTYRFPPKFTLKAGQVVTILGLQGSWGANPQXPPNGPLVVGKGTXTTL

SEQ ID NO: 841360 - protein, 229 aa, Homo sapiens
MRPDWWRLTMGSSVSLRAGWRMRCRNCGAQHEDQVEQYKKELEKTYSAKLDNARQSAERNSNLVGAAHEELQQSRIRIDSLSAQLSQLQKQLAAKEAKLRDLEDSLARERDTSRRLLAEKEREMAEMRARMQQQLDEYQELLDIKLALDMEIHAYRKLLEGEEERLRLSPSPTSQRSRGRASSHSSHPGDPVTWCLRGRHRGFSASLLWTAGSLPGPASERERERERTA

SEQ ID NO: 841361 - protein, 218 aa, Homo sapiens
MRPDWWRLTMGSSVSLRAGWRMRCRNCGAQHEDQVEQYKKELEKTYSAKLDNARQSAERNSNLVGAAHEELQQSRIRIDSLSAQLSQLQKQLAAKEAKLRDLEDSLARERDTSRRLLAEKEREMAEMRARMQQQLDEYQELLDIKLALDMEIHAYRKLLEGEEERLRLSPSPTSQRSRGRASSHSSQTQGGGSVTKKRKLESTESRSSFSQHASWCAQ

SEQ ID NO: 841362 - protein, 199 aa, Homo sapiens
MRPDWWRLTMGSSVSLRAGWRMRCRNCGAQHEDQVEQYKKELEKTYSAKLDNARQSAERNSNLVGAAHEELQQSRIRIDSLSAQLSQLQKQLAAKEAKLRDLEDSLARERDTSRRLLAEKEREMAEMRARMQQQLDEYQELLDIKLALDMEIHAYREALEGRRRKGYAVRKAYRARGAFPPLPHGGPSHRTGPRPVSRR

SEQ ID NO: 841363 - protein, 234 aa, Homo sapiens
MGNWQIKRQNGDDPLLTYRFPPKFTLKAGQVVTIWAAGAGATHSPPTDLVWKAQNTWGCGNSLRTALINSTGEEVAMRKLVRSVTVVEDDEDEDGDDLLHHHHGSHCSSSGDPAEYNLRSRTVLCGTCGQPADKAFCQRLRSPGGRTHLLWLFCLQCHGHSHATAVWGAVGVAASGTIWSPAPTSWATPAPEPRAPRTAASCNLGPARQGWGWRLPASSSPHAHPLPCTSWEGA

SEQ ID NO: 841364 - protein, 206 aa, Homo sapiens
TDVLVRGRVLIGRGSAAPTPANPDPEVRQRPAQIPTPARSKPRASRPAHSDSEQSLSFDPSPAPFPGTPAPRAALPTCLAMETPVPAAAPPCSGAQASSTPLSPTRITRLQEKEDLQELNDRLAVYIDRVRSLETENAGLRLRITESEEVVSREVSGIKAAYEAELGDARKTLDSVAKERARLQLELSKVREEFKELKARQYQEGG

SEQ ID NO: 841365 - protein, 206 aa, Homo sapiens; identical to SEQ ID NO: 841364

SEQ ID NO: 841366 - protein, 206 aa, Homo sapiens; identical to SEQ ID NO: 841364

SEQ ID NO: 841367 - protein, 206 aa, Homo sapiens; identical to SEQ ID NO: 841364

SEQ ID NO: 841368 - protein, 310 aa, Homo sapiens
MACNRQEKQIETREGQQRESTRRTNKHRQCPPRARDQRVMSDNREAKSQAKRGGRMEVGEAAQPSQSGASSGASRQARGKQRSQGQRKERSKEHEEVRAEGKERDGRTKEKRAKEERKGRRGESYACPQALLCKRSRGRASSHSSQTQGGGSVTKKRKLESTESRSSFSQHARTSGRVAVEEVDEEGKFVRLRNKSNEDQSMGNWQIKRQNGDDPLLTYRFPPKFTLKAGQVVTIWAAGAGATHSPPTDLVWKAQNTWGCGNSLRTALINSTGEEVAMRKLVRSVTVVEDDEDEDGDDLLHHHHVSGSRR

SEQ ID NO: 841369 - protein, 44 aa, Homo sapiens
LEAAPASAPSLGPRYDFAAQPGLHARLASSGVISSFRLPLASGI

SEQ ID NO: 841370 - protein, 143 aa, Homo sapiens
GRVRGEGVVCGNRAGMKLANAARPLPGPAPAPRRPVLGARFFMEMRRGGRGRGRGAGSRPRSLTAAFSLAPLSPLPAALTLRFPLPLSQSRSRSPAAGRGSRQRRQSPQQRWGESWALRVVGARKGCQAGAGTPWQRMGSPHP

SEQ ID NO: 841371 - protein, 164 aa, Homo sapiens
LVPNLARAKKRKLESTESRSSFSQHARTSGRVAVEEVDEEGKFVRLRNKSNEDQSMGNWQIKRQNGDDPLLTYRFPPKFTLKAGQVVTIWAAGAGATHSPPTDLVWKAQNTWGCGNSLRTALINSTGEEVAMRKLVRSVTVVEDDEDEDGDDLLHHHHVSGSRR

SEQ ID NO: 841372 - protein, 467 aa, Homo sapiens; identical to SEQ ID NO: 841346

SEQ ID NO: 841373 - protein, 351 aa, Homo sapiens; identical to SEQ ID NO: 841348

SEQ ID NO: 841374 - protein, 354 aa, Homo sapiens; identical to SEQ ID NO: 841349

SEQ ID NO: 841375 - protein, 446 aa, Homo sapiens
MGSSVSLRAGWRMRCRNCGAQHEDQVEQYKKELEKTYSAKLDNARQSAERNSNLVGAAHEELQQSRIRIDSLSAQLSQLQKQLAAKEAKLRDLEDSLARERDTSRRLLAEKEREMAEMRARMQQQLDEYQELLDIKLALDMEIHAYRKLLEGEEERLRLSPSPTSQRSRGRASSHSSQTQGGGSVTKKRKLESTESRSSFSQHARTSGRVAVEEVDEEGKFVRLRNKSNEDQSMGNWQIKRQNGDDPLLTYRFPPKFTLKAGQVVTIWAAGAGATHSPPTDLVWKAQNTWGCGNSLRTALINSTGEEVAMAPTAAARGTPLSTTCARAPCCAGPAGSLPTRHSASGSGAQVGGPISSGSSASSVTVTRTLPQCGGQWGWQLRGQSGHPLLPPGQLQPPNPEPPELQHHVIWDLPGRGGGGGFLRPPHLMPTPCPARHGRGLEAKEK

SEQ ID NO: 841376 - protein, 220 aa, Homo sapiens
MRPDWWRLTMGSSVSLRAGWRMRCRNCGAQHEDQVEQYKKELEKTYSAKLDNARQSAERNSNLVGAAHEELQQSRIRIDSLSAQLSQLQKQLAAKEAKLRDLEDSLARERDTSRRLLAEKEREMAEMRARMQQQLDEYQELLDIKLALDMEIHAYRKLLEGEEERLRLSPSPTSPHALAGAWPWRRWMRRASLSGCATSPMRTSPWAIGRSSARMEMIPC

SEQ ID NO: 841377 - protein, 351 aa, Homo sapiens; identical to SEQ ID NO: 841348

SEQ ID NO: 841378 - protein, 351 aa, Homo sapiens; identical to SEQ ID NO: 841348

SEQ ID NO: 841379 - protein, 450 aa, Homo sapiens
MGSSVSLRAGWRMRCRNCGAQHEDQVEQYKKELEKTYSAKLDNARQSAERNSNLVGAAHEELQQSRIRIDSLSAQLSQLQKQLAAKEAKLRDLEDSLARERDTSRRLLAEKEREMAEMRARMQQQLDEYQELLDIKLALDMEIHAYRKLLEGEEERLRLSPSPTSQRSRGRASSHSSQTQGGGSVTKKRKLESTESRSSFSQHARTSGRVAVEEVDEEGKFVRLRNKSNEDQSMGNWQIKRQNGDDPLLTYRFPPKFTLKAGQVVTIWAAGAGATHSPPTDLVWKAQNTWGCGNSLRTALINSTGEEVAMRKLVRSVTVVEDDEDEDGDDLLHHHHGSHCSSSGDPAEYNLRSRTVLCGTCGQPADKAFCQRLRSPGGRTHLLWLFCLQCHGHSHATAVWGAVGVAASGTIWSPAPTSWATPAPEPRAPRTAASCNLGPARQEVVVFLLI

SEQ ID NO: 841380 - protein, 270 aa, Homo sapiens
MRPDWWRLTMGSSVSLRAGWRMRCRNCGAQHEDQVEQYKKELEKTYSAKLDNARQSAERNSNLVGAAHEELQQSRIRIDSLSAQLSQLQKQLAAKEAKLRDLEDSLARERDTSRRLLAEKEREMAEMRARMQQQLDEYQELLDIKLALDMEIHAYRKLLEGEEERLRLSPSPTSQRSRGRASSHSSQTQGGGSVTKKRKLESTESRSSFSQQTIWSPAPTSWATPAPEPRAPRTAASCNLGPARQGWGWRLPASSSPHAHPLPCTSWEGA

SEQ ID NO: 841381 - protein, 319 aa, Homo sapiens
MRPDWWRLTMGSSVSLRAGWRMRCRNCGAQHEDQVEQYKKELEKTYSAKLDNARQSAERNSNLVGAAHEELQQSRIRIDSLSAQLSQLQKQLAAKEAKLRDLEDSLARERDTSRRLLAEKEREMAEMRARMQQQLDEYQELLDIKLALDMEIHAYRKLLEGEEERLRLSPSPTSQRSRGRASSHSSQTQGGGSVTKKRKLESTESRSSFSQHARTSGRVAVEEVDEEGKFVRLRNKSNEDQSMGNWQIKRQNGDDPLLTYRFPPKFTLKAGQVVTIWAAGAGATQSPYDLCGGQKLGWGQAGEVLIHGEKAPGGHWFCP

SEQ ID NO: 841382 - protein, 269 aa, Homo sapiens
MGSSVSLRAGWRMRCRNCGAQHEDQVEQYKKELEKTYSAKLDNARQSAERNSNLVGAAHEELQQSRIRIDSLSAQLSQLQKQLAAKEAKLRDLEDSLARERDTSRRLLAEKEREMAEMRARMQQQLDEYQELLDIKLALDMEIHAYRKLLEGEEERLRLSPSPTSQRSRGRASSHSSQTQGGGSVTKKRKLESTESRSSFSQHSPPTDLVWKAQNTWGCGNSLRTALINSTGEEVAMRKLVRSVTVVEDDEDEDGDDLLHHHHVSGSRR

SEQ ID NO: 841383 - protein, 206 aa, Homo sapiens; identical to SEQ ID NO: 841364

SEQ ID NO: 841384 - protein, 476 aa, Homo sapiens
MRPDWWRLTMGSSVSLRAGWRMRCRNCGAQHEDQVEQYKKELEKTYSAKLDNARQSAERNSNLVGAAHEELQQSRIRIDSLSAQLSQLQKQLAAKEAKLRDLEDSLARERDTSRRLLAEKEREMAEMRARMQQQLDEYQELLDIKLALDMEIHAYRKLLEGEEERLRLSPSPTSQRSRGRASSHSSQTQGGGSVTKKRKLESTESRSSFSQHARTSGRVAVEEVDEEGKFVRLRNKSNEDQSMGNWQIKRQNGDDPLLTYRFPPKFTLKAGQVVTIWAAGAGATHSPPTDLVWKAQNTWGCGNSLRTALINSTGEEVAMRKLVRSVTVVEDDEDEDGDDLLHHHHGSHCSSSGDPAEYNLRSRTVLCGTCGQPADKAFCQRLRSPGGRTHLLWLFCLQCHGHSHATAVWGAVGVAASGTIWSPAPTSWATPAPEPRAPRTAASCNLGPARQGWGWRLPASSSPHAHPLPCTSWEGA

SEQ ID NO: 841385 - protein, 206 aa, Homo sapiens; identical to SEQ ID NO: 841364

SEQ ID NO: 841386 - protein, 435 aa, Homo sapiens
MACNRQEKQIETREGQQRESTRRTNKHRQCPPRARDQRVMSDNREAKSQAKRGGRMEVGEAAQPSQSGASSGASRQARGKQRSQGQRKERSKEHEEVRAEGKERDGRTKEKRAKEERKGRRGESYACPQALLCKRSRGRASSHSSQTQGGGSVTKKRKLESTESRSSFSQHARTSGRVAVEEVDEEGKFVRLRNKSNEDQSMGNWQIKRQNGDDPLLTYRFPPKFTLKAGQVVTIWAAGAGATHSPPTDLVWKAQNTWGCGNSLRTALINSTGEEVAMRKLVRSVTVVEDDEDEDGDDLLHHHHGSHCSSSGDPAEYNLRSRTVLCGTCGQPADKAFCQRLRSPGGRTHLLWLFCLQCHGHSHATAVWGAVGVAASGTIWSPAPTSWATPAPEPRAPRTAASCNLGPARQGWGWRLPASSSPHAHPLPCTSWEGA

SEQ ID NO: 841387 - protein, 235 aa, Homo sapiens
DLRASTRPGVNRPNPLLTYRFPPKFTLKAGQVVTIWAAGAGATHSPPTDLVWKAQNTWGCGNSLRTALINSTGEEVAMRKLVRSVTVVEDDEDEDGDDLLHHHHGSHCSSSGDPAEYNLRSRTVLCGTCGQPADKAFCQRLRSPGGRTHLLWLFCLQCHGHSHATAVWGAVGVAASGTIWSPAPTSWATPAPEPRAPRTAASCNLGPARQGWGWRLPASSSPHAHPLPCTSWEGA

SEQ ID NO: 841388 - protein, 188 aa, Homo sapiens
MGGTHNGRRTLYNTTRDARREAEKQTTKRERGDTEKTRREQKRREKRTHKPGRERKHKKEEKKNKIKRRKEKESARRGKHKKKKEKREEINGGRKNPTTGQHKARKGGEKKNTENDERTETKRQKQQKYDNEREEDTRTKQTKGNRRRKQQPTRDEQRQRKTDTTKEESKKKQQKHKQRAKSKNKEAN

SEQ ID NO: 841389 - protein, 81 aa, Homo sapiens
ADGWSDTEEPQKHPPCCCPEEAGTEGHALYDLIHGKRTEARPAQGWEEGAQERRLWGWCFSRRGWLAHPGTAPQWGWTGCR

SEQ ID NO: 841390 - protein, 933 aa, Homo sapiens
QVSPDGQHLASGDRSGNLRIHELHFMDELVKVEAHDAEVLCLEYSKPETGLTLLASASRDRLIHVLNVEKNYNLEQTLDDHSSSITAIKFAGNRDIQMISCGADKSISVIDFYSGECIAKMFGHSEIITSMKFTYDCHHLITVSGDSCVFIWHLGPEITNCMKQHLLEIDHRQQQQHTNDKKRSGHPRQDTYVSTPSEIHSLSPGEQTEDDLEEECEPEEMLKTPSKDSLDPDPRCLLTNGKLPLWAKRLLGDDDVADGLAFHAKRSYQPHGRWAERAGQEPLKTILDAQDLDCYFTPMKPESLENSILDSLEPQSLASLLSESESPQEAGRGHPSFLPQQKESSEASELILYSLEAEVTVTGTDSQYCRKEVEAGPGDQQGDSYLRVSSDSPKDQSPPEDSGESEADLECSFAAIHSPAPPPDPAPRFATSLPHFPGCAGPTEDELSLPEGPSVPSSSLPQTPEQEKFLRHHFETLTESPCRELFPAALGDVEASEAEDHFFNPRLSISTQFLSSLQKASRFTHTFPPRATQCLVKSPEVKLMDRGGSQPRAGTGYASPDRTHVLAAGKAEETLEAWRPPPPCLTSLASCVPASSVLPTDRNLPTPTSAPTPGLAQGVHAPSTCSYMEATASSRARISRSISLGDSEGPIVATLAQPLRRPSSVGELASLGQELQAITTATTPSLDSEGQEPALRSWGNHEARANLRLTLSSACDGLLQPPVDTQPGVTVPAVSFPAPSPVEESALRLHGSAFRPSLPAPESPGLPAHPSNPQLPEARPGIPGGTASLLEPTSGALGLFQGSPARWSEPWVPVEALPPSPLELSRVGNILHRLQTTFQEALDLYRVLVSSGQVDTGQQQARTELVSTFLWIHSQLEAECLVGTSVAPAQALPSPGPPSPPTLYPLASPDLQALLEHYSELLVQAVRRKARGH

SEQ ID NO: 841391 - protein, 778 aa, Homo sapiens
QVSPDGQHLASGDRSGNLRIHELHFMDELVKVEAHDAEVLCLEYSKPETGLTLLASASRDRLIHVLNVEKNYNLEQTLDDHSSSITAIKFAGNRDIQMISCGADKSISVIDFYSGECIAKMFGHSEIITSMKFTYDCHHLITVSGDSCVFIWHLGPEITNCMKQHLLEIDHRQQQQHTNDKKRSGHPRQDTYVSTPSEIHSLSPGEQTEDDLEEECEPEEMLKTPSKDSLDPDPRCLLTNGKLPLWAKRLLGDDDVADGLAFHAKRSYQPHGRWAERAGQEPLKTILDAQDLDCYFTPMKPESLENSILDSLEPQSLASLLSESESPQEAGRGHPSFLPQQKESSEASELILYSLEAEVTVTGTDSQYCRKEVEAGPGDQQGDSYLRVSSDSPKDQSPPEDSGESEADLECSFAAIHSPAPPPDPAPRFATSLPHFPGCAGPTEDELSLPEGPSVPSSSLPQTPEQEKFLRHHFETLTESPCRELFPAALGDVEASEAEDHFFNPRLSISTQFLSSLQKASRFTHTFPPRATQCLVKSPEVKLMDRGGSQPRAGTGYASPDRTHVLAAGKAEETLEAWRPPPPCLTSLASCVPASSVLPTDRNLPTPTSAPTPGLAQGVHAPSTCSYMEATASSRARISRALGLFQGSPARWSEPWVPVEALPPSPLELSRVGNILHRLQTTFQEALDLYRVLVSSGQVDTGQQQARTELVSTFLWIHSQLEAECLVGTSVAPAQALPSPGPPSPPTLYPLASPDLQALLEHYSELLVQAVRRKARGH

SEQ ID NO: 841392 - protein, 1025 aa, Homo sapiens
QVSPDGQHLASGDRSGNLRIHELHFMDELVKVEAHDAEVLCLEYSKPETGLTLLASASRDRLIHVLNVEKNYNLEQTLDDHSSSITAIKFAGNRDIQMISCGADKSIYFRSAQQGSDGLHFVRTHHVAEKTTLYDMDIDITQKYVAVACQDRNVRVYNTVNGKQKKCYKGSQGDEGSLLKVHVDPSGTFLATSCSDKSISVIDFYSGECIAKMFGHSEIITSMKFTYDCHHLITVSGDSCVFIWHLGPEITNCMKQHLLEIDHRQQQQHTNDKKRSGHPRQDTYVSTPSEIHSLSPGEQTEDDLEEECEPEEMLKTPSKDSLDPDPRCLLTNGKLPLWAKRLLGDDDVADGLAFHAKRSYQPHGRWAERAGQEPLKTILDAQDLDCYFTPMKPESLENSILDSLEPQSLASLLSESESPQEAGRGHPSFLPQQKESSEASELILYSLEAEVTVTGTDSQYCRKEVEAGPGDQQGDSYLRVSSDSPKDQSPPEDSGESEADLECSFAAIHSPAPPPDPAPRFATSLPHFPGCAGPTEDELSLPEGPSVPSSSLPQTPEQEKFLRHHFETLTESPCRELFPAALGDVEASEAEDHFFNPRLSISTQFLSSLQKASRFTHTFPPRATQCLVKSPEVKLMDRGGSQPRAGTGYASPDRTHVLAAGKAEETLEAWRPPPPCLTSLASCVPASSVLPTDRNLPTPTSAPTPGLAQGVHAPSTCSYMEATASSRARISRSISLGDSEGPIVATLAQPLRRPSSVGELASLGQELQAITTATTPSLDSEGQEPALRSWGNHEARANLRLTLSSACDGLLQPPVDTQPGVTVPAVSFPAPSPVEESALRLHGSAFRPSLPAPESPGLPAHPSNPQLPEARPGIPGGTASLLEPTSGALGLFQGSPARWSEPWVPVEALPPSPLELSRVGNILHRLQTTFQEALDLYRVLVSSGQVDTGQQQARTELVSTFLWIHSQLEAECLVGTSVAPAQALPSPGPPSPPTLYPLASPDLQALLEHYSELLVQAVRRKARGH

SEQ ID NO: 841393 - protein, 522 aa, Homo sapiens
QVSPDGQHLASGDRSGNLRIHELHFMDELVKVEAHDAEVLCLEYSKPETGLTLLASASRDRLIHVLNVEKNYNLEQTLDDHSSSITAIKFAGNRDIQMISCGADKSIYFRSAQQGSDGLHFVRTHHVAEKTTLYDMDIDITQKYVAVACQDRNVRVYNTVNGKQKKCYKGSQGDEGSLLKVHVDPSGTFLATSCSDKSISVIDFYSGECIAKMFGHSEIITSMKFTYDCHHLITVSGDSCVFIWHLGPEITNCMKQHLLEIDHRQQQQHTNDKKRSGHPRQDTYVSTPSEIHSLSPGEQTEDDLEEECEPEEMLKTPSKDSLDPDPRCLLTNGKLPLWAKRLLGDDDVADGLAFHAKRSYQPHGRWAERAGQEPLKTILDAQDLDCYFTPMKPESLENSILDSLEPQSLASLLSESESPQEAGRGHPSFLPQQKESSEASELILYSLEAEVTVTGTDSQYCRKEVEAGPGDQQGDSYLRVSSDSPKDQSPPEGECRAGRDPVTVCAFSQAPFWAPMVTLTQY

SEQ ID NO: 841394 - protein, 31 aa, Homo sapiens
MSQGGVGNRKGLLYEEVTFKSKRQRIEHTDI

SEQ ID NO: 841395 - protein, 50 aa, Homo sapiens
RPKEVTPPWQPHGQGGTFLLGQIQELRELAFPGNVDGSRKVPNPGASHLD

SEQ ID NO: 841396 - protein, 109 aa, Homo sapiens
MSHSVFLNIYLSIYLSIYLSIYLTIYLLSIVCLLLVYLPIIYLYHQSTNLSLYLSISIYLPIYVSIYHLSVMHLPITYLPTYHHQSANLSLYLPIIYLSIYLCIICLPI

SEQ ID NO: 841397 - protein, 1382 aa, Homo sapiens
MQGVLEVLSEVECHLRVSFFDVTYRHFFGRTWKTTVKPTKRPPSRIVFNEPLYFHTSLNHPHIVAVVEVVAEGKKRDGSLQTLSCGFGILRIFSNQPDSPISASQDKRLRLYHGTPRALLHPLLQDPAEQNRHMTLIENCSLQYTLKPHPALEPAFHLLPENLLVSGLQQIPGLLPAHGESGDALRKPRLQKPITGHLDDLFFTLYPSLEKFEEELLELHVQDHFQEGCGPLDGGALEILERRLRVGVHNGLGFVQRPQVVVLVPEMDVALTRSASFSRKVVSSSKTSSGSQALVLRSRLRLPEMVGHPAFAVIFQLEYVFSSPAGVDGNAASVTSLSNLACMHMVRWAVWNPLLEADSGRVTLPLQGGIQPNPSHCLVYKVPSASMSSEEVKQVESGTLRFQFSLGSEEHLDAPTEPVSGPKVERRPSRKPPTSPSSPPAPVPRVLAAPQNSPVGPGLSISQLAASPRSPTQHCLARPTSQLPHGSQASPAQAEFPLEAGISHLEADLSQTSLVLETSIAEQLQELPFTPLHAPIVVGTQTRSSAGQPSRASMVLLQSSGFPEILDANKQPAEAVSATEPVTFNPQKEESDCLQSNEMVLQFLAFSRVAQDCRGTSWPKTVYFTFQFYRFPPATTPRLQLVQLDEAGQPSSGALTHILVPVSRDGTFDAGSPGFQLRYMVGPGFLKPGERRCFARYLAVQTLQIDVWDGDSLLLIGSAAVQMKHLLRQGRPAVQASHELEVVATEYEQDNMVVSGDMLGFGRVKPIGVHSVVKGRLHLTLANVGHPCEQKVRGCSTLPPSRSRVISNDGASRFSGGSLLTTGSSRRKHVVQAQKLADVDSELAAMLLTHARQGKGPQDVSRESDATRRRKLERMRSVRLQEAGGDLGRRGTSVLAQQSVRTQHLRDLQVIAAYRERTKAESIASLLSLAITTEHTLHATLGVAEFFEFVLKNPHNTQHTVTVEIDNPELSVIVDSQEWRDFKGAAGLHTPVEEDMFHLRGSLAPQLYLRPHETAHVPFKFQSFSAGQLAMVQASPGLSNEKGMDAVSPWKSSAVPTKHAKVLFRASGGKPIAVLCLTVELQPHVVDQVFRFYHPELSFLKKAIRLPPWHTFPGAPVGMLGEDPPVHVRCSDPNVICETQNVGPGEPRDIFLKVASGPSPEIKDFFVIIYSDRWLATPTQTWQVYLHSLQRVDVSCVAGQLTRLSLVLRGTQTVRKVRAFTSHPQELKTDPKGVFVLPPRGVQDLHVGVRPLRAGSRFVHLNLVDVDCHQLVASWLVCLCCRQPLISKAFEIMLAAGEGKGVNKRITYTNPYPSRRTFHLHSDHPELLRFREDSFQVGGGETYTIGLQFAPSQRVGEEEILIYINDHEDKNEEAFCVKVIYQ

SEQ ID NO: 841398 - protein, 1396 aa, Homo sapiens
MQGVLEVLSEVECHLRVSFFDVTYRHFFGRTWKTTVKPTKRPPSRIVFNEPLYFHTSLNHPHIVAVVEVVAEGKKRDGSLQTLSCGFGILRIFSNQPDSPISASQDKRLRLYHGTPRALLHPLLQDPAEQNRHMTLIENCSLQYTLKPHPALEPAFHLLPENLLVSGLQQIPGLLPAHGESGDALRKPRLQKPITGHLDDLFFTLYPSLEKFEEELLELHVQDHFQEGCGPLDGGALEILERRLRVGVHNGLGFVQRPQVVVLVPEMDVALTRSASFSRKVVSSSKTSSGSQALVLRSRLRLPEMVGHPAFAVIFQLEYVFSSPAGVDGNAASVTSLSNLACMHMVRWAVWNPLLEADSGRVTLPLQGGIQPNPSHCLVYKVPSASMSSEEVKQVESGTLRFQFSLGSEEHLDAPTEPVSGPKVERRPSRKPPTSPSSPPAPVPRVLAAPQNSPVGPGLSISQLAASPRSPTQHCLARPTSQLPHGSQASPAQAEFPLEAGISHLEADLSQTSLVLETSIAEQLQELPFTPLHAPIVVGTQTRSSAGQPSRASMVLLQSSGFPEILDANKQPAEAVSATEPVTFNPQKEESDCLQSNEMVLQFLAFSRVAQDCRGTSWPKTVYFTFQFYRFPPATTPRLQLVQLDEAGQPSSGALTHILVPVSRDGTFDAGSPGFQLRYMVGPGFLKPGERRCFARYLAVQTLQIDVWDGDSLLLIGSAAVQMKETSHIFSVSQLTEVPESSTVYAVIVCSVDECGKATRVCGDRKPPDPQGKGQHLLRQGRPAVQASHELEVVATEYEQDNMVVSGDMLGFGRVKPIGVHSVVKGRLHLTLANVGHPCEQKVRGCSTLPPSRSRVISNDGASRFSGGSLLTTGSSRRKHVVQAQKLADVDSELAAMLLTHARQGKGPQDVSRESDATRRRKLERMRSVRLQEAGGDLGRRGTSVLAQQSVRTQHLRDLQVIAAYRERTKAESIASLLSLAITTEHTLHATLGVAEFFEFVLKNPHNTQHTVTVEIDNPELSVIVDSQEWRDFKGAAGLHTPVEEDMFHLRGSLAPQLYLRPHETAHVPFKFQSFSAGQLAMVQASPGLSNEKGMDAVSPWKSSAVPTKHAKVLFRASGGKPIAVLCLTVELQPHVVDQVFRFYHPELSFLKKAIRLPPWHTFPGAPVGMLGEDPPVHVRCSDPNVICETQNVGPGEPRDIFLKVASGPSPEIKDFFVIIYSDRWLATPTQTWQVYLHSLQRVDVSCVAGQLTRLSLVLRGTQTVRKVRAFTSHPQELKTDPKGVFVLPPRGVQDLHVGVRPLRAGSRFVHLNLVDVDCHQLVASWLVCLCCRQPLISKAFEIMLAAGEGKGVNKRITYTNPYPSRRTFHLHSDHPELLRFREDSFQVWWGCAWDS

SEQ ID NO: 841399 - protein, 666 aa, Homo sapiens
MVGPGFLKPGERRCFARYLAVQTLQIDVWDGDSLLLIGSAAVQMKHLLRQGRPAVQASHELEVVATEYEQDNMVVSGDMLGFGRVKPIGVHSVVKGRLHLTLANVGHPCEQKVRGCSTLPPSRSRVISNDGASRFSGGSLLTTGSSRRKHVVQAQKLADVDSELAAMLLTHARQGKGPQDVSRESDATRRRKLERMRSVRLQEAGGDLGRRGTSVLAQQSVRTQHLRDLQVIAAYRERTKAESIASLLSLAITTEHTLHATLGVAEFFEFVLKNPHNTQHTVTVEIDNPELSVIVDSQEWRDFKGAAGLHTPVEEDMFHLRGSLAPQLYLRPHETAHVPFKFQSFSAGQLAMVQASPGLSNEKGMDAVSPWKSSAVPTKHAKVLFRASGGKPIAVLCLTVELQPHVVDQVFRFYHPELSFLKKAIRLPPWHTFPGAPVGMLGEDPPVHVRCSDPNVICETQNVGPGEPRDIFLKVASGPSPEIKDFFVIIYSDRWLATPTQTWQVYLHSLQRVDVSCVAGQLTRLSLVLRGTQTVRKVRAFTSHPQELKTDPKGVFVLPPRGVQDLHVGVRPLRAGSRFVHLNLVDVDCHQLVASWLVCLCCRQPLISKAFEIMLAAGEGKGVNKRITYTNPYPSRRTFHLHSDHPELLRFREDSFQVWWGCAWDS

SEQ ID NO: 841400 - protein, 734 aa, Homo sapiens
MQGVLEVLSEVECHLRVSFFDVTYRHFFGRTWKTTVKPTKRPPSRIVFNEPLYFHTSLNHPHIVAVVEVVAEGKKRDGSLQTLSCGFGILRIFSNQPDSPISASQDKRLRLYHGTPRALLHPLLQDPAEQNRHMTLIENCSLQYTLKPHPALEPAFHLLPENLLVSGLQQIPGLLPAHGESGDALRKPRLQKPITGHLDDLFFTLYPSLEKFEEELLELHVQDHFQEGCGPLDGGALEILERRLRVGVHNGLGFVQRPQVVVLVPEMDVALTRSASFSRKVVSSSKTSSGSQALVLRSRLRLPEMVGHPAFAVIFQLEYVFSSPAGVDGNAASVTSLSNLACMHMVRWAVWNPLLEADSGRVTLPLQGGIQPNPSHCLVYKVPSASMSSEEVKQVESGTLRFQFSLGSEEHLDAPTEPVSGPKVERRPSRKPPTSPSSPPAPVPRVLAAPQNSPVGPGLSISQLAASPRSPTQHCLARPTSQLPHGSQASPAQAEFPLEAGISHLEADLSQTSLVLETSIAEQLQELPFTPLHAPIVVGTQTRSSAGQPSRASMVLLQSSGFPEILDANKQPAEAVSATEPVTFNPQKEESDCLQSNEMVLQFLAFSRVAQDCRGTSWPKTVYFTFQFYRFPPATTPRLQLVQLDEAGQPSSGALTHILVPVSRDGTFDAGSPGFQLRYMVGPGFLKPGERRCFARYLAVQTLQIDVWDGDSLLLIGSAAVQMKETSHIFSVSQ

SEQ ID NO: 841401 - protein, 31 aa, Homo sapiens
MTLIENCSLQYTLKPHPALEPAFHLLPENLL

SEQ ID NO: 841402 - protein, 64 aa, Homo sapiens
RPGTTHDLGLPWLIGLQAPRSPLLAHPERLCSDPPLSLLKTDPKGVFVLPPRGVQDLHVGVRPL

SEQ ID NO: 841403 - protein, 159 aa, Homo sapiens
MNDWHRIFTQNVLVPPHPQRARQPWKESTAFQCVLKWLDGPVIRQGVLEVLSEVECHLRVSFFDVTYRHFFGRTWKTTVKPTKRPPSRIVFNEPLYFHTSLNHPHIVAVVEVVAEGKKRDGSLQTLSCGFGILRIFSNQPDSPISASQDKRYLPCFYNP

SEQ ID NO: 841404 - protein, 594 aa, Homo sapiens
MVVSGDMLGFGRVKPIGVHSVVKGRLHLTLANVGHPCEQKVRGCSTLPPSRSRVISNDGASRFSGGSLLTTGSSRRKHVVQAQKLADVDSELAAMLLTHARQGKGPQDVSRESDATRRRKLERMRSVRLQEAGGDLGRRGTSVLAQQSVRTQHLRDLQVIAAYRERTKAESIASLLSLAITTEHTLHATLGVAEFFEFVLKNPHNTQHTVTVEIDNPELSVIVDSQEWRDFKGAAGLHTPVEEDMFHLRGSLAPQLYLRPHETAHVPFKFQSFSAGQLAMVQASPGLSNEKGMDAVSPWKSSAVPTKHAKVLFRASGGKPIAVLCLTVELQPHVVDQVFRFYHPELSFLKKAIRLPPWHTFPGAPVGMLGEDPPVHVRCSDPNVICETQNVGPGEPRDIFLKVASGPSPEIKDFFVIIYSDRWLATPTQTWQVYLHSLQRVDVSCVAGQLTRLSLVLRGTQTVRKVRAFTSHPQELKTDPKGVFVLPPRGVQDLHVGVRPLRAGSRFVHLNLVDVDCHQLVASWLVCLCCRQPLISKAFEIMLAAGEGKGVNKRITYTNPYPSRRTFHLHSDHPELLRFREDSFQVWWGCAWDS

SEQ ID NO: 841405 - protein, 255 aa, Homo sapiens
MCGAFSTQAGAVEKTLFDISPAPGAPVGMLGEDPPVHVRCSDPNVICETQNVGPGEPRDIFLKVASGPSPEIKDFFVIIYSDRWLATPTQTWQVYLHSLQRVDVSCVAGQLTRLSLVLRGTQTVRKVRAFTSHPQELKTDPKGVFVLPPRGVQDLHVGVRPLRAGSRFVHLNLVDVDCHQLVASWLVCLCCRQPLISKAFEIMLAAGEGKGVNKRITYTNPYPSRRTFHLHSDHPELLRFREDSFQVWWGCAWDS

SEQ ID NO: 841406 - protein, 529 aa, Homo sapiens
MQGVLEVLSEVECHLRVSFFDVTYRHFFGRTWKTTVKPTKRPPSRIVFNEPLYFHTSLNHPHIVAVVEVVAEGKKRDGSLQTLSCGFGILRIFSNQPDSPISASQDKRLRLYHGTPRALLHPLLQDPAEQNRHMTLIENCSLQYTLKPHPALEPAFHLLPENLLVSGLQQIPGLLPAHGESGDALRKPRLQKPITGHLDDLFFTLYPSLEKFEEELLELHVQDHFQEGCGPLDGGALEILERRLRVGVHNGLGFVQRPQVVVLVPEMDVALTRSASFSRKVVSSSKTSSGSQALVLRSRLRLPEMVGHPAFAVIFQLEYVFSSPAGVDGNAASVTSLSNLACMHMVRWAVWNPLLEADSGRVTLPLQGGIQPNPSHCLVYKVPSASMSSEEVKQVESGTLRFQFSLGSEEHLDAPTEPVSGPKVERRPSRKPPTSPSSPPAPVPRVLAAPQNSPVGPGLSISQLAASPRSPTQHCLARPTSQLPHGSQASPAQAEFPLEAGISHLVLPSTHVGPSLSLLLKMYFMNHPK

SEQ ID NO: 841407 - protein, 33 aa, Homo sapiens
SQKDRKNPLPPSVGVVDKKEETQPPMALKKEGI

SEQ ID NO: 841408 - protein, 58 aa, Homo sapiens
YAKEYRKYLELNNNDIASFLKTYQTQGLLAQEVREVVLTHLREKEILDSSLPSSIIIG

SEQ ID NO: 841409 - protein, 264 aa, Homo sapiens
MDQLEKRSRASGSSAGSMKHKRLSRHSTASHSSSHTSGIEADTKPRDTGPEDSYSSSAIHRKLKTCSSMTSHGSSHTSGVESGGKDRLEEDLQDDEIEMLVDDPRDLEQMNEESLEVSPDMCIYITEDMLMSRKLNGHSGLIVKEIGSSTSSSSETVVKLRGQSTDSLPQTICRKPKTSTDRHSLSLDDIRLYQKDFLRIAGLCQDTAQSYTFGCGHELDEEGLYCNSCLAQQCINIQDAFPVKRTSKYFSLDLTHDEVPEFVV

SEQ ID NO: 841410 - protein, 264 aa, Homo sapiens; identical to SEQ ID NO: 841409

SEQ ID NO: 841411 - protein, 614 aa, Homo sapiens
MNKLNFHNNRVMQDRRSVCIFLPNDESLNIIINVKILCHQLLVQVCDLLRLKDCHLFGLSVIQNNEHVYMELSQKLYKYCPKEWKKEASKGIDQFGPPMIIHFRVQYYVENGRLISDRAARYYYYWHLRKQVLHSQCVLREEAYFLLAAFALQADLGNFKRNKHYGKYFEPEAYFPSWVVSKRGKDYILKHIPNMHKDQFALTASEAHLKYIKEAVRLDDVAVHYYRLYKDKREIEASLTLGLTMRGIQIFQNLDEEKQLLYDFPWTNVGKLVFVGKKFEILPDGLPSARKLIYYTGCPMRSRHLLQLLSNSHRLYMNLQPVLRHIRKLEENEEKKQYRESYISDNLDLDMDQLEKRSRASGSSAGSMKHKRLSRHSTASHSSSHTSGIEADTKPRDTGPEDSYSSSAIHRKLKTCSSMTSHGSSHTSGVESGGKDRLEEDLQDDEIEMLVDDPRDLEQMNEESLEVSPDMCIYITEDMLMSRKLNGHSGLIVKEIGSSTSSSSETVVKLRGQSTDSLPQTICRKPKTSTDRHSLSLDDIRLYQKDFLRIAGLCQDTAQSYTFGCGHELDEEGLYCNSCLAQQCINIQDAFPVKRTSKYFSLDLTHDEVPEFVV

SEQ ID NO: 841412 - protein, 614 aa, Homo sapiens
MNKLNFHNNRVMQDRRSVCIFLPNDESLNIIINVKILCHQLLVQVCDLLRLKDCHLFGLSVIQNNEHVYMELSQKLYKYCPKEWKKEASKGIDQFGPPMIIHFRVQYYVENGRLISDRAARYYYYWHLRKQVLHSQCVLREEAYFLLAAFALQADLGNFKRNKHYGKYFEPKAYFPSWVVSKRGKDYILKHIPNMHKDQFALTASEAHLKYIKEAVRLDDVAVHYYRLYKDKREIEASLTLGLTMRGIQIFQNLDEEKQLLYDFPWTNVGKLVFVGKKFEILPDGLPSARKLIYYTGCPMRSRHLLQLLSNSHRLYMNLQPVLRHIRKLEENEEKKQYRESYISDNLDLDMDQLEKRSRASGSSAGSMKHKRLSRHSTASHSSSHTSGIEADTKPRDTGPEDSYSSSAIHRKLKTCSSMTSHGSSHTSGVESGGKDRLEEDLQDDEIEMLVDDPRDLEQMNEESLEVSPDMCIYITEDMLMSRKLNGHSGLIVKEIGSSTSSSSETVVKLRGQSTDSLPQTICRKPKTSTDRHSLSLDDIRLYQKDFLRIAGLCQDTAQSYTFGCGHELDEEGLYCNSCLAQQCINIQDAFPVKRTSKYFSLDLTHDEVPEFVV

SEQ ID NO: 841413 - protein, 264 aa, Homo sapiens; identical to SEQ ID NO: 841409

SEQ ID NO: 841414 - protein, 264 aa, Homo sapiens; identical to SEQ ID NO: 841409

SEQ ID NO: 841415 - protein, 231 aa, Homo sapiens [sequence omitted]

SEQ ID NO: 841416 - protein, 246 aa, Homo sapiens
MDQLEKRSRASGSSAGSMKHKRLSRHSTASHSSSHTSGIEADTKPRDTGPEDSYSSSAIHRKLKTCSSMTSHGSSHTSGVESGGKDRLEEDLQDDEIEMLVDDPRDLEQMNEESLEVSPDMCIYITEDMLMSRKLNGHSGLIVKEIGSSTSSSSETVVKLRGQSTDSLPQTICRKPKTSTDRHSLSLDDIRLYQKDFLRIAGLCQDTAQSYTFGCGHELDEEGLYCNSCLAQQCINIQDAFPVFVV

SEQ ID NO: 841417 - protein, 614 aa, Homo sapiens; identical to SEQ ID NO: 841412

SEQ ID NO: 841418 - protein, 264 aa, Homo sapiens; identical to SEQ ID NO: 841409

SEQ ID NO: 841419 - protein, 467 aa, Homo sapiens
MNKLNFHNNRVMQDRRSVCIFLPNDESLNIIINVKILCHQLLVQVCDLLRLKDCHLFGLSVIQNNEHVYMELSQKLYKYCPKEWKKEASKGIDQFGPPMIIHFRVQYYVENGRLISDRAARYYYYWHLRKQVLHSQCVLREEAYFLLAAFALQADLGNFKRNKHYGKYFEPEAYFPSWVVSKRGKDYILKHIPNMHKDQFALTASEAHLKYIKEAVRLDDVAVHYYRLYKDKREIEASLTLGLTMRGIQIFQNLDEEKQLLYDFPWTNVGKLVFVGKKFEILPDGLPSARKLIYYTGCPMRSRHLLQLLSNSHRLYMNLQPVLRHIRKLEENEEKKQYRESYISDNLDLDMDQLEKRSRASGSSAGSMKHKRLSRHSTASHSSSHTSGIEADTKPRDTGPEDSYSSSAIHRKLKTCSSMTSHGSSHTSGVESGGKDRLEEDLQDDGNSTVPSLALCLVSQFFQALVL

SEQ ID NO: 841420 - protein, 35 aa, Homo sapiens
LILQTICRKPKTSTDRHSLSLDDIRLYQKDFLRIA

SEQ ID NO: 841421 - protein, 82 aa, Homo sapiens
MVRGTREGRGHEGIRLGKTGTSETLNEAVVELSQRAQYQSVIATKRVRRCPERTAPSQATEEMFPETRASFCAHPYLMPLEQ

SEQ ID NO: 841422 - protein, 39 aa, Homo sapiens
MTKWKATCSRHAGVGYRGLRSLGWGRGQCFLIPGTITAA

SEQ ID NO: 841423 - protein, 1258 aa, Homo sapiens
PPRPLLRDDAGVGAPGLPYPLAPGLGGTEGCPRQTDPRTHRPRAQERSRAARRWQPVTMDPPSLDTAIQHALAGLYPPFEATAPTVLGQVFRLLDSGFQGDGLSFLLDFLIPAKRLCEQVREAACAPYSHCLFLHEGWPLCLRDEVVVHLAPLNPLLLRQGDFYLQVEPQEEQSVCIMIKCLSLDLCTVDKKPVPEPAYPILFTQEWLEAINSDFEGNPLHNCLVASENGIAPVPWTKITSPEFVDDRPQVVNALCQAWGPLPLEALDLSSPQELHQASSPDNQVLPAQSLAKGKGRTYGSKYPGLIKVEQARCGEVAFRMDEVVSQDFEGDYVALLGFSQESRGESPSREAGTSSGCTSGALEEIAGTKETPLFQKILPLSEANEGPSLGNRACTKPESSEERPYNLGFRRKVNLKAPTHNSERPPQGSYMNVLEDALDCASGLRAGVSQEPAASKMQGPLGNPENMVQLRPGPRQASSPRLSPASPAAAASETKIEVKTKERNGRLPKPMPCPSRNTSSPEPPTPGLKFSFLRGQRQPSVTPEKASLQHNGPWKVLCSLYSPKPNRAKSLGKAGTTQTKTSGPATAPSPLTEEKAALPEASAGSPERGPTLEEEPPGPEPRIGALGVKVFRSRIACLPGGRDRAGRPLLLVSTTEGAWEAPWCTVSEVTKLLSYLCTIPRPEDKAKGLAVLIDARRQPPQPGLVSALQATQAQVPASIRAILFLGEKEAALQLQTLPDVQVEVLTSLKALSHHVDPSQLPAVLEGPFPYCHTEWVHFFQKLDPFLADLHQASSLLQASIEEFEKADPPGGMQEATRCLSKSKELMEAVLRDPGLLGLQREGGATLARLQHDASRLDFSPDVRSHLAAATALYSLVDEQLHVLVTASNSLLGKLELRVRLGRLEAAIHQVSDWMEQEGRRCLQSLTPKDGSLETVEKAHAEFENFFLQAAAQYRRGLELSKQAAQLGATARGAGEAERAEFPELAAFASTQRAFQAELTHFYMAAERQRTDLETLLHLHRFCKRMTWFHMDCQDLMAQLRLDKTSRVSPGDQRRLHRYLQRLASEFPAEKLAAVGLQVASLSRAGLGQELWEEARIRHEEIRMLLEKALTHSSCPEAPAAHSARPERRGVAAKGQGVSVEVTSKGRWDQPPLDSLGMDHLPKSYWPPGPPRGEQNRTFQAGSPPQEAGQAAEAEDGKGSHKLPDPAREHLLATTFFRQQPPRQSQVPRLTGGSFSSEGTDSQTSLEDSPQTSPLASL

SEQ ID NO: 841424 - protein, 255 aa, Homo sapiens
MAAERQRTDLETLLHLHRFCKRMTWFHMDCQDLMAQLRLDKTSRVSPGDQRRLHRYLQRLASEFPAEKLAAVGLQVASLSRAGLGQELWEEARIRHEEIRMLLEKALTHSSCPEAPAAHSARPERRGVAAKGQGVSVEVTSKGRWDQPPLDSLGMDHLPKSYWPPGPPRGEQNRTFQAGSPPQEAGQAAEAEDGKGSHKLPDPAREHLLATTFFRQQPPRQSQVPRLTGGSFSSEGTDSQTSLEDSPQTSPLASL

SEQ ID NO: 841425 - protein, 255 aa, Homo sapiens; identical to SEQ ID NO: 841424

SEQ ID NO: 841426 - protein, 1001 aa, Homo sapiens
PPRPLLRDDAGVGAPGLPYPLAPGLGGTEGCPRQTDPRTHRPRAQERSRAARRWQPVTMDPPSLDTAIQHALAGLYPPFEATAPTVLGQVFRLLDSGFQGDGLSFLLDFLIPAKRLCEQVREAACAPYSHCLFLHEGWPLCLRDEVVVHLAPLNPLLLRQGDFYLQVEPQEEQSVCIMIKCLSLDLCTVDKKPVPEPAYPILFTQEWLEAINSDFEGNPLHNCLVASENGIAPVPWTKITSPEFVDDRPQVVNALCQAWGPLPLEALDLSSPQELHQASSPDNQVLPAQSLAKGKGRTYGSKYPGLIKVEQARCGEVAFRMDEVVSQDFEGDYVALLGFSQESRGESPSREAGTSSGCTSGALEEIAGTKETPLFQKILPLSEANEGPSLGNRACTKPESSEERPYNLGFRRKVNLKAPTHNSERPPQGSYMNVLEDALDCASGLRAGVSQEPAASKMQGPLGNPENMVQLRPGPRQASSPRLSPASPAAAASETKIEVKTKERNGRLPKPMPCPSRNTSSPEPPTPGLKFSFLRGQRQPSVTPEKASLQHNGPWKVLCSLYSPKPNRAKSLGKAGTTQTKTSGPATAPSPLTEEKAALPEASAGSPERGPTLEEEPPGPEPRIGALGVKVFRSRIACLPGGRDRAGRPLLLVSTTEGAWEAPWCTVSEVTKLLSYLCTIPRPEDKAKGLAVLIDARRQPPQPGLVSALQATQAQVPASIRAILFLGEKEAALQLQTLPDVQVEVLTSLKALSHHVDPSQLPAVLEGPFPYCHTEWVHFFQKLDPFLADLHQASSLLQASIEEFEKADPPGGMQEATRCLSKSKELMEAVLRDPGLLGLQREGGATLARLQHDASRLDFSPDVRSHLAAATALYSLVDEQLHVLVTASNSLLGKLELRVRLGRLEAAIHQVSDWMEQEGRRCLQSLTPKDGSLETVEKAHAEFENFFLQAAVRSRQQRSRTGADGEGVRGGGTARAKLWRWERARKVPETVREPAWIAEFS

SEQ ID NO: 841427 - protein, 675 aa, Homo sapiens
PPRPLLRDDAGVGAPGLPYPLAPGLGGTEGCPRQTDPRTHRPRAQERSRAARRWQPVTMDPPSLDTAIQHALAGLYPPFEATAPTVLGQVFRLLDSGFQGDGLSFLLDFLIPAKRLCEQVREAACAPYSHCLFLHEGWPLCLRDEVVVHLAPLNPLLLRQGDFYLQVEPQEEQSVCIMIKCLSLDLCTVDKKPVPEPAYPILFTQEWLEAINSDFEGNPLHNCLVASENGIAPVPWTKITSPEFVDDRPQVVNALCQAWGPLPLEALDLSSPQELHQASSPDNQVLPAQSLAKGKGRTYGSKYPGLIKVEQARCGEVAFRMDEVVSQDFEGDYVALLGFSQESRGESPSREAGTSSGCTSGALEEIAGTKETPLFQKILPLSEANEGPSLGNRACTKPESSEERPYNLGFRRKVNLKAPTHNSERPPQGSYMNVLEDALDCASGLRAGVSQEPAASKMQGPLGNPENMVQLRPGPRQASSPRLSPASPAAAASETKIEVKTKERNGRLPKPMPCPSRNTSSPEPPTPGLKFSFLRGQRQPSVTPEKASLQHNGPWKVLCSLYSPKPNRAKSLGKAGTTQTKTSGPATAPSPLTEEKAALPEASAGSPERGPTLEEEPPGPEPRIGALGVKVFRSRIACLPGSRGFKQEVVGRELGAPEHLQLLLGGGEAGNALEA

SEQ ID NO: 841428 - protein, 1001 aa, Homo sapiens; identical to SEQ ID NO: 841426

SEQ ID NO: 841429 - protein, 654 aa, Homo sapiens
PPRPLLRDDAGVGAPGLPYPLAPGLGGTEGCPRQTDPRTHRPRAQERSRAARRWQPVTMDPPSLDTAIQHALAGLYPPFEATAPTVLGQVFRLLDSGFQGDGLSFLLDFLIPAKRLCEQVREAACAPYSHCLFLHEGWPLCLRDEVVVHLAPLNPLLLRQGDFYLQVEPQEEQSVCIMIKCLSLDLCTVDKKPVPEPAYPILFTQEWLEAINSDFEGNPLHNCLVASENGIAPVPWTKITSPEFVDDRPQVVNALCQAWGPLPLEALDLSSPQELHQASSPDNQVLPAQSLAKGKGRTYGSKYPGLIKVEQARCGEVAFRMDEVVSQDFEGDYVALLGFSQESRGESPSREAGTSSGCTSGALEEIAGTKETPLFQKILPLSEANEGPSLGNRACTKPESSEERPYNLGFRRKVNLKAPTHNSERPPQGSYMNVLEDALDCASGLRAGVSQEPAASKMQGPLGNPENMVQLRPGPRQASSPRLSPASPAAAASETKIEVKTKERNGRLPKPMPCPSRNTSSPEPPTPGLKFSFLRGQRQPSVTPEKASLQHNGPWKVLCSLYSPKPNRAKSLGKAGTTQTKTSGPATAPSPLTEEKAALPEASAGSPERGPTLEEEPPGPEPRIGALGVKVFRSRIACLPGSSFLFGSGPFPSG

SEQ ID NO: 841430 - protein, 1168 aa, Homo sapiens
  misc_feature (1)..(1): Xaa can be any naturally occurring amino acid
XFYKKLCLLPVLEFPGSGKAGAEVLSVSSSFVSSMDVLAEEFGNLTPEQLAAPIPTVEEKWRLLPAFLKVKGLVKQHIDSFNYFINVEIKKIMKANEKVTSDADPMWYLKYLNIYVGLPDVEESFNVTRPVSPHECRLRDMTYSAPITVDIEYTRGSQRIIRNALPIGRMPIMLRSSNCVLTGKTPAEFAKLNECPLDPGGYFIVKGVEKVILIQEQLSKNRIIVEADRKGAVGASVTSSTHEKKSRTNMAVKQGRFYLRHNTLSEDIPIVIIFKAMGVESDQEIVQMIGTEEHVMAAFGPSLEECQKAQIFTQMQALKYIGNKVRRQRMWGGGPKKTKIEEARELLASTILTHVPVKEFNFRAKCIYTAVMVRRVILAQGDNKVDDRDYYGNKRLELAGQLLSLLFEDLFKKFNSEMKKIADQVIPKQRAAQFDVVKHMRQDQITNGMVNAISTGNWSLKRFKMDRQGVTQVLSRLSYISALGMMTRISSQFEKTRKVSGPRSLQPSQWGMLCPSDTPEGEACGLVKNLALMTHITTDMEDGPIVKLASNLGVEDVNLLCGEELSYPNVFLVFLNGNILGVIRDHKKLVNTFRLMRRAGYINEFVSISTNLTDRCVYISSDGGRLCRPYIIVKKQKPAVTNKHMEELAQGYRLNFEDFLHESLVEYLDVNEENDCNIALYEHTINKDTTHLEIEPFTLLGVCAGLIPYPHHNQSPRNTYQCAMGKQAMGTIGYNQRNRIDTLMYLLAYPQKPMVKTKTIELIEFEKLPAGQNATVAVMSYSGYDIEDALVLNKASLDRGFGRCLVYKNAKCTLKRYTNQTFDKVMGPMLDAATRKPIWRHEILDADGICSPGEKVENKQVLVNKSMPTVTQIPLEGSNVPQQPQYKDVPITYKGATDSYIEKVMISSNAEDAFLIKMLLRQTRRPEIGDKFSSRHGQKGVCGLIVPQEDMPFCDSGICPDIIMNPHGFPSRMTVGKLIELLAGKAGVLDGRFHYGTAFGGSKVKDVCEDLVRHGYNYLGKDYVTSGITGEPLEAYIYFGPVYYQKLKHMVLDKMHARARGPRAVLTRQPTEGRSRDGGLRLGEMERDCLIGYGASMLLLERLMISSDAFEVDVCGQCGLLGYSGWCHYCKSSCHVSSLRIPYACKLLFQELQSMNIIPRLKLSKYNE

SEQ ID NO: 841431 - protein, 648 aa, Homo sapiens
MDVLAEEFGNLTPEQLAAPIPTVEEKWRLLPAFLKVKGLVKQHIDSFNYFINVEIKKIMKANEKVTSDADPMWYLKYLNIYVGLPDVEESFNVTRPVSPHECRLRDMTYSAPITVDIEYTRGSQRIIRNALPIGRMPIMLRSSNCVLTGKTPAEFAKLNECPLDPGGYFIVKGVEKVILIQEQLSKNRIIVEADRKGAVGASVTSSTHEKKSRTNMAVKQGRFYLRHNTLSEDIPIVIIFKAMGVESDQEIVQMIGTEEHVMAAFGPSLEECQKAQIFTQMQALKYIGNKVRRQRMWGGGPKKTKIEEARELLASTILTHVPVKEFNFRAKCIYTAVMVRRVILAQGDNKVDDRDYYGNKRLELAGQLLSLLFEDLFKKFNSEMKKIADQVIPKQRAAQFDVVKHMRQDQITNGMVNAISTGNWSLKRFKMDRQGVTQVLSRLSYISALGMMTRISSQFEKTRKVSGPRSLQPSQWGMLCPSDTPEGEACGLVKNLALMTHITTDMEDGPIVKLASNLGVEDVNLLCGEELSYPNVFLVFLNGNILGVIRDHKKLVNTFRLMRRAGYINEFVSISTNLTDRCVYISSDGGRLCRPYIIVKKQKPAVTNKHMEELAQGYRCAITASHPATCLPSVFRMPASCSSRNYSL

SEQ ID NO: 841432 - protein, 1133 aa, Homo sapiens
MDVLAEEFGNLTPEQLAAPIPTVEEKWRLLPAFLKVKGLVKQHIDSFNYFINVEIKKIMKANEKVTSDADPMWYLKYLNIYVGLPDVEESFNVTRPVSPHECRLRDMTYSAPITVDIEYTRGSQRIIRNALPIGRMPIMLRSSNCVLTGKTPAEFAKLNECPLDPGGYFIVKGVEKVILIQEQLSKNRIIVEADRKGAVGASVTSSTHEKKSRTNMAVKQGRFYLRHNTLSEDIPIVIIFKAMGVESDQEIVQMIGTEEHVMAAFGPSLEECQKAQIFTQMQALKYIGNKVRRQRMWGGGPKKTKIEEARELLASTILTHVPVKEFNFRAKCIYTAVMVRRVILAQGDNKVDDRDYYGNKRLELAGQLLSLLFEDLFKKFNSEMKKIADQVIPKQRAAQFDVVKHMRQDQITNGMVNAISTGNWSLKRFKMDRQGVTQVLSRLSYISALGMMTRISSQFEKTRKVSGPRSLQPSQWGMLCPSDTPEGEACGLVKNLALMTHITTDMEDGPIVKLASNLGVEDVNLLCGEELSYPNVFLVFLNGNILGVIRDHKKLVNTFRLMRRAGYINEFVSISTNLTDRCVYISSDGGRLCRPYIIVKKQKPAVTNKHMEELAQGYRNFEDFLHESLVEYLDVNEENDCNIALYEHTINKDTTHLEIEPFTLLGVCAGLIPYPHHNQSPRNTYQCAMGKQAMGTIGYNQRNRIDTLMYLLAYPQKPMVKTKTIELIEFEKLPAGQNATVAVMSYSGYDIEDALVLNKASLDRGFGRCLVYKNAKCTLKRYTNQTFDKVMGPMLDAATRKPIWRHEILDADGICSPGEKVENKQVLVNKSMPTVTQIPLEGSNVPQQPQYKDVPITYKGATDSYIEKVMISSNAEDAFLIKMLLRQTRRPEIGDKFSSRHGQKGVCGLIVPQEDMPFCDSGICPDIIMNPHGFPSRMTVGKLIELLAGKAGVLDGRFHYGTAFGGSKVKDVCEDLVRHGYNYLGKDYVTSGITGEPLEAYIYFGPVYYQKLKHMVLDKMHARARGPRAVLTRQPTEGRSRDGGLRLGEMERDCLIGYGASMLLLERLMISSDAFEVDVCGQCGLLGYSGWCHYCKSSCHVSSLRIPYACKLLFQELQSMNIIPRLKLSKYNE

SEQ ID NO: 841433 - protein, 1133 aa, Homo sapiens; identical to SEQ ID NO: 841432

SEQ ID NO: 841434 - protein, 120 aa, Homo sapiens [sequence omitted]

SEQ ID NO: 841435 - protein, 643 aa, Homo sapiens
MCGICCSVNFSAEHFSQDLKEDLLYNLKQRGPNSSKQLLKSDVNYQCLFSAHVLHLRGVLTTQPVEDERGNVFLWNGEIFSGIKVEAEENDTQILFNYLSSCKNESEILSLFSEVQGPWSFIYYQASSHYLWFGRDFFGRRSLLWHFSNLGKSFCLSSVGTQTSGLANQWQEVPASGLFRIDLKSTVISRCIILQLYPWKYISRENIIEENVNSLSQISADLPAFVSVVANEAKLYLEKPVVPLNMMLPQAALETHCSNISNVPPTREILQVFLTDVHMKEVIQQFIDVLSVAVKKRVLCLPRDENLTANEVLKTCDRKANVAILFSGGIDSMVIATLADRHIPLDEPIDLLNVAFIAEEKTMPTTFNREGNKQKNKCEIPSEEFSKDVAAAAADSPNKHVSVPDRITGRAGLKELQAVSPSRIWNFVEINVSMEELQKLRRTRICHLIRPLDTVLDDSIGCAVWFASRGIGWLVAQEGVKSYQSNAKVVLTGIGADEQLAGYSRHRVRFQSHGLEGLNKEIMMELGRISSRNLGRDDRVIGDHGKEARFPFLDENVVSFLNSLPIWEKANLTLPRGIGEKLLLRLAAVELGLTASALLPKRAMQFGSRIAKMEKINEKASDKCGRLQIMSLENLSIEKETKL

SEQ ID NO: 841436 - protein, 85 aa, Homo sapiens
AILRVLRSVEMPSRGTRPEDSSVLIPTDNSTPHKEDLSSKVSVRRDEKAPGLGTGRHWTLKVVRSGQRGACLGLGFALLLCSFYS

SEQ ID NO: 841437 - protein, 643 aa, Homo sapiens; identical to SEQ ID NO: 841435

SEQ ID NO: 841438 - protein, 643 aa, Homo sapiens; identical to SEQ ID NO: 841435

SEQ ID NO: 841439 - protein, 83 aa, Homo sapiens
GLMPIWALGVHLQHGCPLVLYIHQGPNVHLRPGVHLGSDVQLKTGCPPGAEESTQGLVLNWGLMTTRGQGTHQACCPPVTRCP

SEQ ID NO: 841440 - protein, 70 aa, Homo sapiens
SQNAPFLPLNAYLRLSPSKPNSNAISSKKGFFIMAESIPASTPPPRTLPATATYKKSLTINLLSTTYIPT

SEQ ID NO: 841441 - protein, 649 aa, Homo sapiens
RSLPRGRAHGRTERRKGWRCDSRAGALASPPRALAAGPGEMESTAYPLNLSLKEEEEEEEIQSRELEDGPADMQKVRICSEGGWVPALFDEVAIYFSDEEWEVLTEQQKALYREVMRMNYETVLSLEFPFPKPDMITRLEGEEESQNSDEWQLQGGTSAENEESDVKPPDWPNPMNATSQFPQPQHFDSFGLRLPRDITELPEWSEGYPFYMAMGFPGYDLSADDIAGKFQFSRGMRRSYDAGFKLMVVEYAESTNNCQAAKQFGVLEKNVRDWRKVKPQLQNAHAMRRAFRGPKNGRFALVDQRVAEYVRYMQAKGDPITREAMQLKALEIAQEMNIPEKGFKASLGWCRRMMRRYDLSLRHKVPVPQHLPEDLTEKLVTYQRSVLALRRAHDYEVAQMGNADETPICLEVPSRVTVDNQGEKPVLVKTPGREKLKITAMLGVLADGRKLPPYIILRGTYIPPGKFPSGMEIRCHRYGWMTEDLMQDWLEVVWRRRTGAVPKQRGMLILNGFRGHATDSVKNSMESMNTDMVIIPGGLTSQLQVLDVVVYKPLNDSVRAQYSNWLLAGNLALSPTGNAKKPPLGLFLEWVMVAWNSISSESIVQGFKKCHISSNLEEEDDVLWEIESELPGGGEPPKDCDTESMAESN

SEQ ID NO: 841442 - protein, 491 aa, Homo sapiens
MENEESDVKPPDWPNPMNATSQFPQPQHFDSFGLRLPRDITELPEWSEGYPFYMAMGFPGYDLSADDIAGKFQFSRGMRRSYDAGFKLMVVEYAESTNNCQAAKQFGVLEKNVRDWRKVKPQLQNAHAMRRAFRGPKNGRFALVDQRVAEYVRYMQAKGDPITREAMQLKALEIAQEMNIPEKGFKASLGWCRRMMRRYDLSLRHKVPVPQHLPEDLTEKLVTYQRSVLALRRAHDYEVAQMGNADETPICLEVPSRVTVDNQGEKPVLVKTPGREKLKITAMLGVLADGRKLPPYIILRGTYIPPGKFPSGMEIRCHRYGWMTEDLMQDWLEVVWRRRTGAVPKQRGMLILNGFRGHATDSVKNSMESMNTDMVIIPGGLTSQLQVLDVVVYKPLNDSVRAQYSNWLLAGNLALSPTGNAKKPPLGLFLEWVMVAWNSISSESIVQGFKKCHISSNLEEEDDVLWEIESELPGGGEPPKDCDTESMAESN

SEQ ID NO: 841443 - protein, 649 aa, Homo sapiens; identical to SEQ ID NO: 841441

SEQ ID NO: 841444 - protein, 649 aa, Homo sapiens; identical to SEQ ID NO: 841441

SEQ ID NO: 841445 - protein, 649 aa, Homo sapiens; identical to SEQ ID NO: 841441

SEQ ID NO: 841446 - protein, 711 aa, Homo sapiens
RSLPRGRAHGRTERRKGWRCDSRAGALASPPRALAAGPGEMESTAYPLNLSLKEEEEEEEIQSRELEDGPADMQKVRICSEGGWVPALFDEVAIYFSDEEWEVLTEQQKALYREVMRMNYETVLSLEFPFPKPDMITRLEGEEESQNSDEWQLQGGTSAENEESDVKPPDWPNPMNATSQFPQPQHFDSFGLRLPRDITELPEWSEGYPFYMAMGFPGYDLSADDIAGKFQFSRGMRRSYDAGFKLMVVEYAESTNNCQAAKQFGVLEKNVRDWRKVKPQLQNAHAMRRAFRGPKNGRFALVDQRVAEYVRYMQAKGDPITREAMQLKALEIAQEMNIPEKGFKASLGWCRRMMRRYDLSLRHKVPVPQHLPEDLTEKLVTYQRSVLALRRAHDYEVAQMGNADETPICLEVPSRVTVDNQGEKPVLVKTPGREKLKITAMLGVLADGRKLPPYIILRGTYIPPGKFPSGMEIRCHRYGWMTEDLMQDWLEVVWRRRTGAVPKQRGMLILNGFRGHATDSVKNSMESMNTDMVIIPGGLTSQLQVLDVVVYKPLNDSVRAQYSNWLLAGNLALSPTGNAKKPPLGLFLEWVMVAWNSISSESIVQGFKKCHISSNLEEEDDVHQKKPVNMKEQRLFPGEKTIYSTPTRDSSYGHNSGVLLWRKPQVKFYSAFENASKSRPCPHTGQDYREGFVEMCHLCTPATYTFPLLEK

SEQ ID NO: 841447 - protein, 649 aa, Homo sapiens; identical to SEQ ID NO: 841441

SEQ ID NO: 841448 - protein, 187 aa, Homo sapiens
RSLPRGRAHGRTERRKGWRCDSRAGALASPPRALAAGPGEMESTAYPLNLSLKEEEEEEEIQSRELEDGPADMQKVRICSEGGWVPALFDEVAIYFSDEEWEVLTEQQKALYREVMRMNYETVLSLEFPFPKPDMITRLEGEEESQNSDEWQLQGGTSAGTTSKAVQRPSSWEHCGVGFSVYIPRGI

SEQ ID NO: 841449 - protein, 2302 aa, Homo sapiens
ARGALNGVYVLCCLRGLSSDQSGLRVVISMGFVRQIQLLLWKNWTLRKRQKIRFVVELVWPLSLFLVLIWLRNANPLYSHHECHFPNKAMPSAGMLPWLQGIFCNVNNPCFQSPTPGESPGIVSNYNNSILARVYRDFQELLMNAPESQHLGRIWTELHILSQFMDTLRTHPERIAGRGIRIRDILKDEETLTLFLIKNIGLSDSVVYLLINSQVRPEQFAHGVPDLALKDIACSEALLERFIIFSQRRGAKTVRYALCSLSQGTLQWIEDTLYANVDFFKLFRVLPTLLDSRSQGINLRSWGGILSDMSPRIQEFIHRPSMQDLLWVTRPLMQNGGPETFTKLMGILSDLLCGYPEGGGSRVLSFNWYEDNNYKAFLGIDSTRKDPIYSYDRRTTSFCNALIQSLESNPLTKIAWRAAKPLLMGKILYTPDSPAARRILKNANSTFEELEHVRKLVKAWEEVGPQIWYFFDNSTQMNMIRDTLGNPTVKDFLNRQLGEEGITAEAILNFLYKGPRESQADDMANFDWRDIFNITDRTLRLVNQYLECLVLDKFESYNDETQLTQRALSLLEENMFWAGVVFPDMYPWTSSLPPHVKYKIRMDIDVVEKTNKIKDRYWDSGPRADPVEDFRYIWGGFAYLQDMVEQGITRSQVQAEAPVGIYLQQMPYPCFVDDSFMIILNRCFPIFMVLAWIYSVSMTVKSIVLEKELRLKETLKNQGVSNAVIWCTWFLDSFSIMSMSIFLLTIFIMHGRILHYSDPFILFLFLLAFSTATIMLCFLLSTFFSKASLAAACSGVIYFTLYLPHILCFAWQDRMTAELKKAVSLLSPVAFGFGTEYLVRFEEQGLGLQWSNIGNSPTEGDEFSFLLSMQMMLLDAAVYGLLAWYLDQVFPGDYGTPLPWYFLLQESYWLGGEGCSTREERALEKTEPLTEETEDPEHPEGIHDSFFEREHPGWVPGVCVKNLVKIFEPCGRPAVDRLNITFYENQITAFLGHNGAGKTTTLSILTGLLPPTSGTVLVGGRDIETSLDAVRQSLGMCPQHNILFHHLTVAEHMLFYAQLKGKSQEEAQLEMEAMLEDTGLHHKRNEEAQDLSGGMQRKLSVAIAFVGDAKVVILDEPTSGVDPYSRRSIWDLLLKYRSGRTIIMSTHHMDEADLLGDRIAIIAQGRLYCSGTPLFLKNCFGTGLYLTLVRKMKNIQSQRKGSEGTCSCSSKGFSTTCPAHVDDLTPEQVLDGDVNELMDVVLHHVPEAKLVECIGQELIFLLPNKNFKHRAYASLFRELEETLADLGLSSFGISDTPLEEIFLKVTEDSDSGPLFAGGAQQKRENVNPRHPCLGPREKAGQTPQDSNVCSPGAPAAHPEGQPPPEPECPGPQLNTGTQLVLQHVQALLVKRFQHTIRSHKDFLAQIVLPATFVFLALMLSIVIPPFGEYPALTLHPWIYGQQYTFFSMDEPGSEQFTVLADVLLNKPGFGNRCLKEGWLPEYPCGNSTPWKTPSVSPNITQLFQKQKWTQVNPSPSCRCSTREKLTMLPECPEGAGGLPPPQRTQRSTEILQDLTDRNISDFLVKTYPALIRSSLKSKFWVNEQRYGGISIGGKLPVVPITGEALVGFLSDLGRIMNVSGGPITREASKEIPDFLKHLETEDNIKVWFNNKGWHALVSFLNVAHNAILRASLPKDRSPEEYGITVISQPLNLTKEQLSEITVLTTSVDAVVAICVIFSMSFVPASFVLYLIQERVNKSKHLQFISGVSPTTYWVTNFLWDIMNYSVSAGLVVGIFIGFQKKAYTSPENLPALVALLLLYGWAVIPMMYPASFLFDVPSTAYVALSCANLFIGINSSAITFILELFENNRTLLRFNAVLRKLLIVFPHFCLGRGLIDLALSQAVTDVYARFGEEHSANPFHWDLIGKNLFAMVVEGVVYFLLTLLVQRHFFLSQWIAEPTKEPIVDEDDDVAEERQRIITGGNKTDILRLHELTKIYPGTSSPAVDRLCVGVRPGECFGLLGVNGAGKTTTFKMLTGDTTVTSGDATVAGKSILTNISEVHQNMGYCPQFDAIDELLTGREHLYLYARLRGVPAEEIEKVANWSIKSLGLTVYADCLAGTYSGGNKRKLSTAIALIGCPPLVLLDEPTTGMDPQARRMLWNVIVSIIREGRAVVLTSHSMEECEALCTRLAIMVKGAFRCMGTIQHLKSKFGDGYIVTMKIKSPKDDLLPDLNPVEQFFQGNFPGSVQRERHYNMLQFQVSSSSLARIFQLLLSHKDSLLIEEYSVTQTTLDQVFVNFAKQQTESHDLPLHPRAAGASRQAQD

SEQ ID NO: 841450 - protein, 1752 aa, Homo sapiens
ARGALNGVYVLCCLRGLSSDQSGLRVVISMGFVRQIQLLLWKNWTLRKRQKIRFVVELVWPLSLFLVLIWLRNANPLYSHHECHFPNKAMPSAGMLPWLQGIFCNVNNPCFQSPTPGESPGIVSNYNNSILARVYRDFQELLMNAPESQHLGRIWTELHILSQFMDTLRTHPERIAGRGIRIRDILKDEETLTLFLIKNIGLSDSVVYLLINSQVRPEQFAHGVPDLALKDIACSEALLERFIIFSQRRGAKTVRYALCSLSQGTLQWIEDTLYANVDFFKLFRVLPTLLDSRSQGINLRSWGGILSDMSPRIQEFIHRPSMQDLLWVTRPLMQNGGPETFTKLMGILSDLLCGYPEGGGSRVLSFNWYEDNNYKAFLGIDSTRKDPIYSYDRRTTSFCNALIQSLESNPLTKIAWRAAKPLLMGKILYTPDSPAARRILKNANSTFEELEHVRKLVKAWEEVGPQIWYFFDNSTQMNMIRDTLGNPTVKDFLNRQLGEEGITAEAILNFLYKGPRESQADDMANFDWRDIFNITDRTLRLVNQYLECLVLDKFESYNDETQLTQRALSLLEENMFWAGVVFPDMYPWTSSLPPHVKYKIRMDIDVVEKTNKIKDRYWDSGPRADPVEDFRYIWGGFAYLQDMVEQGITRSQVQAEAPVGIYLQQMPYPCFVDDSFMIILNRCFPIFMVLAWIYSVSMTVKSIVLEKELRLKETLKNQGVSNAVIWCTWFLDSFSIMSMSIFLLTIFIMHGRILHYSDPFILFLFLLAFSTATIMLCFLLSTFFSKASLAAACSGVIYFTLYLPHILCFAWQDRMTAELKKAVSLLSPVAFGFGTEYLVRFEEQGLGLQWSNIGNSPTEGDEFSFLLSMQMMLLDAAVYGLLAWYLDQVFPGDYGTPLPWYFLLQESYWLGGEGCSTREERALEKTEPLTEETEDPEHPEGIHDSFFEREHPGWVPGVCVKNLVKIFEPCGRPAVDRLNITFYENQITAFLGHNGAGKTTTLSILTGLLPPTSGTTYPALIRSSLKSKFWVNEQRYGGISIGGKLPVVPITGEALVGFLSDLGRIMNVSGGPITREASKEIPDFLKHLETEDNIKVWFNNKGWHALVSFLNVAHNAILRASLPKDRSPEEYGITVISQPLNLTKEQLSEITVLTTSVDAVVAICVIFSMSFVPASFVLYLIQERVNKSKHLQFISGVSPTTYWVTNFLWDIMNYSVSAGLVVGIFIGFQKKAYTSPENLPALVALLLLYGWAVIPMMYPASFLFDVPSTAYVALSCANLFIGINSSAITFILELFENNRTLLRFNAVLRKLLIVFPHFCLGRGLIDLALSQAVTDVYARFGEEHSANPFHWDLIGKNLFAMVVEGVVYFLLTLLVQRHFFLSQWIAEPTKEPIVDEDDDVAEERQRIITGGNKTDILRLHELTKIYPGTSSPAVDRLCVGVRPGECFGLLGVNGAGKTTTFKMLTGDTTVTSGDATVAGKSILTNISEVHQNMGYCPQFDAIDELLTGREHLYLYARLRGVPAEEIEKVANWSIKSLGLTVYADCLAGTYSGGNKRKLSTAIALIGCPPLVLLDEPTTGMDPQARRMLWNVIVSIIREGRAVVLTSHSMEECEALCTRLAIMVKGAFRCMGTIQHLKSKFGDGYIVTMKIKSPKDDLLPDLNPVEQFFQGNFPGSVQRERHYNMLQFQVSSSSLARIFQLLLSHKDSLLIEEYSVTQTTLDQVFVNFAKQQTESHDLPLHPRAAGASRQAQD

SEQ ID NO: 841451 - protein, 771 aa, Homo sapiens
ARRETGRGVWQRTQRSTEILQDLTDRNISDFLVKTYPALIRSSLKSKFWVNEQRYGGISIGGKLPVVPITGEALVGFLSDLGRIMNVSGGPITREASKEIPDFLKHLETEDNIKVWFNNKGWHALVSFLNVAHNAILRASLPKDRSPEEYGITVISQPLNLTKEQLSEITVLTTSVDAVVAICVIFSMSFVPASFVLYLIQERVNKSKHLQFISGVSPTTYWVTNFLWDIMNYSVSAGLVVGIFIGFQKKAYTSPENLPALVALLLLYGWAVIPMMYPASFLFDVPSTAYVALSCANLFIGINSSAITFILELFENNRTLLRFNAVLRKLLIVFPHFCLGRGLIDLALSQAVTDVYARFGEEHSANPFHWDLIGKNLFAMVVEGVVYFLLTLLVQRHFFLSQWIAEPTKEPIVDEDDDVAEERQRIITGGNKTDILRLHELTKIYPGTSSPAVDRLCVGVRPGECFGLLGVNGAGKTTTFKMLTGDTTVTSGDATVAGKSILTNISEVHQNMGYCPQFDAIDELLTGREHLYLYARLRGVPAEEIEKVANWSIKSLGLTVYADCLAGTYSGGNKRKLSTAIALIGCPPLVLLDEPTTGMDPQARRMLWNVIVSIIREGRAVVLTSHSMEECEALCTRLAIMVKGAFRCMGTIQHLKSKFGDGYIVTMKIKSPKDDLLPDLNPVEQFFQGNFPGSVQRERHYNMLQFQVSSSSLARIFQLLLSHKDSLLIEEYSVTQTTLDQVFVNFAKQQTESHDLPLHPRAAGASRQAQD

SEQ ID NO: 841452 - protein, 1689 aa, Homo sapiens
ARGALNGVYVLCCLRGLSSDQSGLRVVISMGFVRQIQLLLWKNWTLRKRQKIRFVVELVWPLSLFLVLIWLRNANPLYSHHECHFPNKAMPSAGMLPWLQGIFCNVNNPCFQSPTPGESPGIVSNYNNSILARVYRDFQELLMNAPESQHLGRIWTELHILSQFMDTLRTHPERIAGRGIRIRDILKDEETLTLFLIKNIGLSDSVVYLLINSQVRPEQFAHGVPDLALKDIACSEALLERFIIFSQRRGAKTVRYALCSLSQGTLQWIEDTLYANVDFFKLFRVLPTLLDSRSQGINLRSWGGILSDMSPRIQEFIHRPSMQDLLWVTRPLMQNGGPETFTKLMGILSDLLCGYPEGGGSRVLSFNWYEDNNYKAFLGIDSTRKDPIYSYDRRTTSFCNALIQSLESNPLTKIAWRAAKPLLMGKILYTPDSPAARRILKNANSTFEELEHVRKLVKAWEEVGPQIWYFFDNSTQMNMIRDTLGNPTVKDFLNRQLGEEGITAEAILNFLYKGPRESQADDMANFDWRDIFNITDRTLRLVNQYLECLVLDKFESYNDETQLTQRALSLLEENMFWAGVVFPDMYPWTSSLPPHVKYKIRMDIDVVEKTNKIKDRYWDSGPRADPVEDFRYIWGGFAYLQDMVEQGITRSQVQAEAPVGIYLQQMPYPCFVDDSFMIILNRCFPIFMVLAWIYSVSMTVKSIVLEKELRLKETLKNQGVSNAVIWCTWFLDSFSIMSMSIFLLTIFIMHGRILHYSDPFILFLFLLAFSTATIMLCFLLSTFFSKASLAAACSGVIYFTLYLPHILCFAWQDRMTAELKKAVSLLSPVAFGFGTEYLVRFEEQGLGLQWSNIGNSPTEGDEFSFLLSMQMMLLDAAVYGLLAWYLDQVFPGDYGTPLPWYFLLQESYWLGGEGCSTREERALEKTEPLTEETEDPEHPEGIHDSFFEREHPGWVPGVCVKNLVKIFEPCGRPAVDRLNITFYENQITAFLGHNGAGKTTTLSILTGLLPPTSGTTYPALIRSSLKSKFWVNEQRYGGISIGGKLPVVPITGEALVGFLSDLGRIMNVSGGPITREASKEIPDFLKHLETEDNIKVWFNNKGWHALVSFLNVAHNAILRASLPKDRSPEEYGITVISQPLNLTKEQLSEITVLTTSVDAVVAICVIFSMSFVPASFVLYLIQERVNKSKHLQFISGVSPTTYWVTNFLWDIMNYSVSAGLVVGIFIGFQKKAYTSPENLPALVALLLLYGWAVIPMMYPASFLFDVPSTAYVALSCANLFIGINSSAITFILELFENNRTLLRFNAVLRKLLIVFPHFCLGRGLIDLALSQAVTDVYARFGEEHSANPFHWDLIGKNLFAMVVEGVVYFLLTLLVQRHFFLSQWIAEPTKEPIVDEDDDVAEERQRIITGGNKTDILRLHELTKIYPGTSSPAVDRLCVGVRPGECFGLLGVNGAGKTTTFKMLTGDTTVTSGDATVAGKSILTNISEVHQNMGYCPQFDAIDELLTGREHLYLYARLRGVPAEEIEKVANWSIKSLGLTVYADCLAGTYSGGNKRKLSTAIALIGCPPLVLLVTAGLGRTKGLNQVLGLLGWGNRFWVGRFRNCSSLALVWTVSCVAHFERSAQCLVHTAPEKNKSRHSLDLGLRTSCVPRMSPVGPSAHSREVQPTLRPVGVWSPYRSTELGQRLLS

SEQ ID NO: 841453 - protein, 1605 aa, Homo sapiens
  misc_feature (1587)..(1587): Xaa can be any naturally occurring amino acid
  misc_feature (1595)..(1595): Xaa can be any naturally occurring amino acid
  misc_feature (1598)..(1598): Xaa can be any naturally occurring amino acid
  misc_feature (1605)..(1605): Xaa can be any naturally occurring amino acid
ARGALNGVYVLCCLRGLSSDQSGLRVVISMGFVRQIQLLLWKNWTLRKRQKIRFVVELVWPLSLFLVLIWLRNANPLYSHHECHFPNKAMPSAGMLPWLQGIFCNVNNPCFQSPTPGESPGIVSNYNNSILARVYRDFQELLMNAPESQHLGRIWTELHILSQFMDTLRTHPERIAGRGIRIRDILKDEETLTLFLIKNIGLSDSVVYLLINSQVRPEQFAHGVPDLALKDIACSEALLERFIIFSQRRGAKTVRYALCSLSQGTLQWIEDTLYANVDFFKLFRVLPTLLDSRSQGINLRSWGGILSDMSPRIQEFIHRPSMQDLLWVTRPLMQNGGPETFTKLMGILSDLLCGYPEGGGSRVLSFNWYEDNNYKAFLGIDSTRKDPIYSYDRRTTSFCNALIQSLESNPLTKIAWRAAKPLLMGKILYTPDSPAARRILKNANSTFEELEHVRKLVKAWEEVGPQIWYFFDNSTQMNMIRDTLGNPTVKDFLNRQLGEEGITAEAILNFLYKGPRESQADDMANFDWRDIFNITDRTLRLVNQYLECLVLDKFESYNDETQLTQRALSLLEENMFWAGVVFPDMYPWTSSLPPHVKYKIRMDIDVVEKTNKIKDRYWDSGPRADPVEDFRYIWGGFAYLQDMVEQGITRSQVQAEAPVGIYLQQMPYPCFVDDSFMIILNRCFPIFMVLAWIYSVSMTVKSIVLEKELRLKETLKNQGVSNAVIWCTWFLDSFSIMSMSIFLLTIFIMHGRILHYSDPFILFLFLLAFSTATIMLCFLLSTFFSKASLAAACSGVIYFTLYLPHILCFAWQDRMTAELKKAVSLLSPVAFGFGTEYLVRFEEQGLGLQWSNIGNSPTEGDEFSFLLSMQMMLLDAAVYGLLAWYLDQVFPGDYGTPLPWYFLLQESYWLGGEGCSTREERALEKTEPLTEETEDPEHPEGIHDSFFEREHPGWVPGVCVKNLVKIFEPCGRPAVDRLNITFYENQITAFLGHNGAGKTTTLSILTGLLPPTSGTTYPALIRSSLKSKFWVNEQRYGGISIGGKLPVVPITGEALVGFLSDLGRIMNVSGGPITREASKEIPDFLKHLETEDNIKVWFNNKGWHALVSFLNVAHNAILRASLPKDRSPEEYGITVISQPLNLTKEQLSEITVLTTSVDAVVAICVIFSMSFVPASFVLYLIQERVNKSKHLQFISGVSPTTYWVTNFLWDIMNYSVSAGLVVGIFIGFQKKAYTSPENLPALVALLLLYGWAVIPMMYPASFLFDVPSTAYVALSCANLFIGINSSAITFILELFENNRTLLRFNAVLRKLLIVFPHFCLGRGLIDLALSQAVTDVYARFGEEHSANPFHWDLIGKNLFAMVVEGVVYFLLTLLVQRHFFLSQWIAEPTKEPIVDEDDDVAEERQRIITGGNKTDILRLHELTKIYPGTSSPAVDRLCVGVRPGECFGLLGVNGAGKTTTFKMLTGDTTVTSGDATVAGKSILTNISEVHQNMGYCPQFDAIDELLTGREHLYLYARLRGVPAEEIEKVANWSIKSLGLTVYADCLAGTYSGGNKRKLSTAIALIGCPPLVLLVSHQRVGPRNAILXTHRKITGXGVXPNPRMEX

SEQ ID NO: 841454 - protein, 1216 aa, Homo sapiens
ARGALNGVYVLCCLRGLSSDQSGLRVVISMGFVRQIQLLLWKNWTLRKRQKIRFVVELVWPLSLFLVLIWLRNANPLYSHHECHFPNKAMPSAGMLPWLQGIFCNVNNPCFQSPTPGESPGIVSNYNNSILARVYRDFQELLMNAPESQHLGRIWTELHILSQFMDTLRTHPERIAGRGIRIRDILKDEETLTLFLIKNIGLSDSVVYLLINSQVRPEQFAHGVPDLALKDIACSEALLERFIIFSQRRGAKTVRYALCSLSQGTLQWIEDTLYANVDFFKLFRVLPTLLDSRSQGINLRSWGGILSDMSPRIQEFIHRPSMQDLLWVTRPLMQNGGPETFTKLMGILSDLLCGYPEGGGSRVLSFNWYEDNNYKAFLGIDSTRKDPIYSYDRRTTSFCNALIQSLESNPLTKIAWRAAKPLLMGKILYTPDSPAARRILKNANSTFEELEHVRKLVKAWEEVGPQIWYFFDNSTQMNMIRDTLGNPTVKDFLNRQLGEEGITAEAILNFLYKGPRESQADDMANFDWRDIFNITDRTLRLVNQYLECLVLDKFESYNDETQLTQRALSLLEENMFWAGVVFPDMYPWTSSLPPHVKYKIRMDIDVVEKTNKIKDRYWDSGPRADPVEDFRYIWGGFAYLQDMVEQGITRSQVQAEAPVGIYLQQMPYPCFVDDSFMIILNRCFPIFMVLAWIYSVSMTVKSIVLEKELRLKETLKNQGVSNAVIWCTWFLDSFSIMSMSIFLLTIFIMHGRILHYSDPFILFLFLLAFSTATIMLCFLLSTFFSKASLAAACSGVIYFTLYLPHILCFAWQDRMTAELKKAVSLLSPVAFGFGTEYLVRFEEQGLGLQWSNIGNSPTEGDEFSFLLSMQMMLLDAAVYGLLAWYLDQVFPGDYGTPLPWYFLLQESYWLGGEGCSTREERALEKTEPLTEETEDPEHPEGIHDSFFEREHPGWVPGVCVKNLVKIFEPCGRPAVDRLNITFYENQITAFLGHNGAGKTTTLSILTGLLPPTSGTTYPALIRSSLKSKFWVNEQRYGGISIGGKLPVVPITGEALVGFLSDLGRIMNVSGGPITREASKEIPDFLKHLETEDNIKVWFNNKGWHALVSFLNVAHNAILRASLPKDRSPEEYGITVISQPLNLTKEQLSEITVLTTSVDAVVAICVIFSMSFVPASFVLYLIQERVNKSKHLQFISGVSPTTYWVTNFLWDIVSVSL

SEQ ID NO: 841455 - protein, 84 aa, Homo sapiens
YIQTYCRWNGMWNSITLSCLISHRWAVIPMMYPASFLFDVPSTAYVALSCANLFIGINSSAITFILELFENNRVSITFLAFLFD

SEQ ID NO: 841456 - protein, 103 aa, Homo sapiens
RVKFTRKSFQCIKSILFASFMIILNRCFPIFMVLAWIYSVSMTVKSIVLEKELRLKETLKNQGVSNAVIWCTWFLDSFSIMSMSIFLLTIFIMEVLYHTRQCV

SEQ ID NO: 841457 - protein, 1639 aa, Homo sapiens
ARGALNGVYVLCCLRGLSSDQSGLRVVISMGFVRQIQLLLWKNWTLRKRQKIRFVVELVWPLSLFLVLIWLRNANPLYSHHECHFPNKAMPSAGMLPWLQGIFCNVNNPCFQSPTPGESPGIVSNYNNSILARVYRDFQELLMNAPESQHLGRIWTELHILSQFMDTLRTHPERIAGRGIRIRDILKDEETLTLFLIKNIGLSDSVVYLLINSQVRPEQFAHGVPDLALKDIACSEALLERFIIFSQRRGAKTVRYALCSLSQGTLQWIEDTLYANVDFFKLFRVLPTLLDSRSQGINLRSWGGILSDMSPRIQEFIHRPSMQDLLWVTRPLMQNGGPETFTKLMGILSDLLCGYPEGGGSRVLSFNWYEDNNYKAFLGIDSTRKDPIYSYDRRTTSFCNALIQSLESNPLTKIAWRAAKPLLMGKILYTPDSPAARRILKNANSTFEELEHVRKLVKAWEEVGPQIWYFFDNSTQMNMIRDTLGNPTVKDFLNRQLGEEGITAEAILNFLYKGPRESQADDMANFDWRDIFNITDRTLRLVNQYLECLVLDKFESYNDETQLTQRALSLLEENMFWAGVVFPDMYPWTSSLPPHVKYKIRMDIDVVEKTNKIKDRYWDSGPRADPVEDFRYIWGGFAYLQDMVEQGITRSQVQAEAPVGIYLQQMPYPCFVDDSFMIILNRCFPIFMVLAWIYSVSMTVKSIVLEKELRLKETLKNQGVSNAVIWCTWFLDSFSIMSMSIFLLTIFIMHGRILHYSDPFILFLFLLAFSTATIMLCFLLSTFFSKASLAAACSGVIYFTLYLPHILCFAWQDRMTAELKKAVSLLSPVAFGFGTEYLVRFEEQGLGLQWSNIGNSPTEGDEFSFLLSMQMMLLDAAVYGLLAWYLDQVFPGDYGTPLPWYFLLQESYWLGGEGCSTREERALEKTEPLTEETEDPEHPEGIHDSFFEREHPGWVPGVCVKNLVKIFEPCGRPAVDRLNITFYENQITAFLGHNGAGKTTTLSILTGLLPPTSGTTYPALIRSSLKSKFWVNEQRYGGISIGGKLPVVPITGEALVGFLSDLGRIMNVSGGPITREASKEIPDFLKHLETEDNIKVWFNNKGWHALVSFLNVAHNAILRASLPKDRSPEEYGITVISQPLNLTKEQLSEITVLTTSVDAVVAICVIFSMSFVPASFVLYLIQERVNKSKHLQFISGVSPTTYWVTNFLWDIMNYSVSAGLVVGIFIGFQKKAYTSPENLPALVALLLLYGWAVIPMMYPASFLFDVPSTAYVALSCANLFIGINSSAITFILELFENNRTLLRFNAVLRKLLIVFPHFCLGRGLIDLALSQAVTDVYARFGEEHSANPFHWDLIGKNLFAMVVEGVVYFLLTLLVQRHFFLSQWIAEPTKEPIVDEDDDVAEERQRIITGGNKTDILRLHELTKIYPGTSSPAVDRLCVGVRPGECFGLLGVNGAGKTTTFKMLTGDTTVTSGDATVAGKSILTNISEVHQNMGYCPQFDAIDELLTGREHLYLYARLRGVPAEEIEKVANWSIKSLGLTVYADCLAGTYSGGNKRKLSTAIALIGCPPLVLLDEPTTGMDPQARRMLWNVIVSIIREGRAVVLTSHSMEECEALCTRLAIMVKGAFRCMGTIQMDWPA

SEQ ID NO: 841458 - protein, 584 aa, Homo sapiens
MSFVPASFVLYLIQERVNKSKHLQFISGVSPTTYWVTNFLWDIMNYSVSAGLVVGIFIGFQKKAYTSPENLPALVALLLLYGWAVIPMMYPASFLFDVPSTAYVALSCANLFIGINSSAITFILELFENNRTLLRFNAVLRKLLIVFPHFCLGRGLIDLALSQAVTDVYARFGEEHSANPFHWDLIGKNLFAMVVEGVVYFLLTLLVQRHFFLSQWIAEPTKEPIVDEDDDVAEERQRIITGGNKTDILRLHELTKIYPGTSSPAVDRLCVGVRPGECFGLLGVNGAGKTTTFKMLTGDTTVTSGDATVAGKSILTNISEVHQNMGYCPQFDAIDELLTGREHLYLYARLRGVPAEEIEKVANWSIKSLGLTVYADCLAGTYSGGNKRKLSTAIALIGCPPLVLLDEPTTGMDPQARRMLWNVIVSIIREGRAVVLTSHSMEECEALCTRLAIMVKGAFRCMGTIQHLKSKFGDGYIVTMKIKSPKDDLLPDLNPVEQFFQGNFPGSVQRERHYNMLQFQVSSSSLARIFQLLLSHKDSLLIEEYSVTQTTLDQVFVNFAKQQTESHDLPLHPRAAGASRQAQD

SEQ ID NO: 841459 - protein, 1547 aa, Homo sapiens
ARGALNGVYVLCCLRGLSSDQSGLRVVISMGFVRQIQLLLWKNWTLRKRQKIRFVVELVWPLSLFLVLIWLRNANPLYSHHECHFPNKAMPSAGMLPWLQGIFCNVNNPCFQSPTPGESPGIVSNYNNSILARVYRDFQELLMNAPESQHLGRIWTELHILSQFMDTLRTHPERIAGRGIRIRDILKDEETLTLFLIKNIGLSDSVVYLLINSQVRPEQFAHGVPDLALKDIACSEALLERFIIFSQRRGAKTVRYALCSLSQGTLQWIEDTLYANVDFFKLFRVLPTLLDSRSQGINLRSWGGILSDMSPRIQEFIHRPSMQDLLWVTRPLMQNGGPETFTKLMGILSDLLCGYPEGGGSRVLSFNWYEDNNYKAFLGIDSTRKDPIYSYDRRTTSFCNALIQSLESNPLTKIAWRAAKPLLMGKILYTPDSPAARRILKNANSTFEELEHVRKLVKAWEEVGPQIWYFFDNSTQMNMIRDTLGNPTVKDFLNRQLGEEGITAEAILNFLYKGPRESQADDMANFDWRDIFNITDRTLRLVNQYLECLVLDKFESYNDETQLTQRALSLLEENMFWAGVVFPDMYPWTSSLPPHVKYKIRMDIDVVEKTNKIKDRYWDSGPRADPVEDFRYIWGGFAYLQDMVEQGITRSQVQAEAPVGIYLQQMPYPCFVDDSFMIILNRCFPIFMVLAWIYSVSMTVKSIVLEKELRLKETLKNQGVSNAVIWCTWFLDSFSIMSMSIFLLTIFIMHGRILHYSDPFILFLFLLAFSTATIMLCFLLSTFFSKASLAAACSGVIYFTLYLPHILCFAWQDRMTAELKKAVSLLSPVAFGFGTEYLVRFEEQGLGLQWSNIGNSPTEGDEFSFLLSMQMMLLDAAVYGLLAWYLDQVFPGDYGTPLPWYFLLQESYWLGGEGCSTREERALEKTEPLTEETEDPEHPEGIHDSFFEREHPGWVPGVCVKNLVKIFEPCGRPAVDRLNITFYENQITAFLGHNGAGKTTTLSILTGLLPPTSGTTYPALIRSSLKSKFWVNEQRYGGISIGGKLPVVPITGEALVGFLSDLGRIMNVSGGPITREASKEIPDFLKHLETEDNIKVWFNNKGWHALVSFLNVAHNAILRASLPKDRSPEEYGITVISQPLNLTKEQLSEITVLTTSVDAVVAICVIFSMSFVPASFVLYLIQERVNKSKHLQFISGVSPTTYWVTNFLWDIMNYSVSAGLVVGIFIGFQKKAYTSPENLPALVALLLLYGWAVIPMMYPASFLFDVPSTAYVALSCANLFIGINSSAITFILELFENNRTLLRFNAVLRKLLIVFPHFCLGRGLIDLALSQAVTDVYARFGEEHSANPFHWDLIGKNLFAMVVEGVVYFLLTLLVQRHFFLSQWIAEPTKEPIVDEDDDVAEERQRIITGGNKTDILRLHELTKIYPGTSSPAVDRLCVGVRPGECFGLLGVNGAGKTTTFKMLTGDTTVTSGDATVAGKSILTNISEVHQNMGYCPQFDAIDELLTGREHLYLYARLRGVPAEEIEKVKNVLLWPHRSLVNYKPVS

SEQ ID NO: 841460 - protein, 56 aa, Homo sapiens
MPLALGLSLPHPPQPLNSPVLLVPPGGMQRKLSVAIAFVGDAKVVILDEPTSGVDP

SEQ ID NO: 841461 - protein, 140 aa, Homo sapiens
MSGENKLSWTVKDLIPNGEYFFRVKAVNKVGGGEYIELKNPVIAQDPKQPPDPPVDVEVHNPTAEAMTITWKPPLYDGGSKIMGYIIEKIAKGEERWKRCNEHLVPILTYTAKGLEEGKEYQFRVRAENAAGISEPSRAT

SEQ ID NO: 841462 - protein, 30 aa, Homo sapiens
MQSKILIMERKQLGGGKTWRREVGKTETMK

SEQ ID NO: 841463 - protein, 52 aa, Homo sapiens
VVHGVAWLGGPKNSMAKLLQILLHACSFLFALFLLSSPSFLSFFLSFFLSFF

SEQ ID NO: 841464 - protein, 119 aa, Homo sapiens
MDRKSHKGAGKLGLPHRNLAKERHSWPAAAGGASARSHVANPMATNKGHCPSKAAPPAQKMESGSWLGGLHLGRTCPAKSCESLMSIRTSSPNFLQQPLILPSPCGPAHPALLDSPPGI

SEQ ID NO: 841465 - protein, 219 aa, Homo sapiens
MSEQEAQAPGGRGLPPDMLAEQVELWWSQQPRRSALCFVVAVGLVAGCGAGGVALLSTTSSRSGEWRLATGTVLCLLALLVLVKQLMSSAVQDMNCIRQAHHVALLRSGGGADALVVLLSGLVLLVTGLTLAGLAAAPAPARPLAAMLSVGIALAALGSLLLLGLLLYQVGVSGHCPSICMATPSTHSGHGGHGSIFSISGQLSAGRRHETTSSIASLI

SEQ ID NO: 841466 - protein, 219 aa, Homo sapiens; identical to SEQ ID NO: 841465

SEQ ID NO: 841467 - protein, 219 aa, Homo sapiens; identical to SEQ ID NO: 841465

SEQ ID NO: 841468 - protein, 219 aa, Homo sapiens; identical to SEQ ID NO: 841465

SEQ ID NO: 841469 - protein, 219 aa, Homo sapiens; identical to SEQ ID NO: 841465

SEQ ID NO: 841470 - protein, 219 aa, Homo sapiens; identical to SEQ ID NO: 841465

SEQ ID NO: 841471 - protein, 174 aa, Homo sapiens
MSEQEAQAPGGRGLPPDMLAEQVELWWSQQPRRSALCFVVAVGLVAGCGAGGVALLSTTSSRSGEWRLATGTVLCLLALLVLVKQLMSSAVQDMNCIRQAHHVALLRSGGGADALVVLLSGLVRVTGLTGGGAPCLSACACVGLSAAGRGVARVGVRSLLCDLPGGAASSNCGG

SEQ ID NO: 841472 - protein, 111 aa, Homo sapiens [sequence omitted]

SEQ ID NO: 841473 - protein, 830 aa, Homo sapiens
SGRELRVIQESEAGDAGLPRVEVILDCSDRQKTEGCRLQAGKECVDSPVEGGQSEAPPSLVSFAVSSEGTEQGEDPRSEKDHSRPHKHRARHARLRRSESLSEKQVKEAKSKCKSIALLLTDAPNPNSKGVLMFKKRRRRARKYTLVSYGTGELEREADEEEEGDKEDTCEVAFLGASESEVDEELLSDVDDNTQVVNFDWDSGLVDIEKKLNRGDKMEMLPDTTGKGALMFAKRRERMDQITAQKEEDKVGGTPSREQDAAQTDGLRTTTSYQRKEEESVRTQSSVSKSYIEVSHGLGHVPQQNGFSGASETANIQRMVPMNRTAKPFPGSVNQPATPFSPTRNMTSPIADFPAPPPYSAVTPPPDAFSRGVSSPIAGPAQPPPWPQPAPWSQPAFYDSSERIASRDERISVPAKRTGILQEAKRRSTTKPMFTFKEPKVSPNPELLSLLQNSEGKRGTGAGGDSGPEEDYLSLGAEACNFMQSSSAKQKTPPPAAPKPAVKSSSSQPVTPVSPVWSPGVAPTQPPAFPTSNPSKGTVVSSIKIAQPSYPPARPASTLNVAGPFKGPQAAVASQNYTPKPTVSTPTVNAVQPGAVGPSNELPGMSGRGAQLFAKRQSRMEKYVVDSDTVQAHAARAQSPTPSLPASWKYSSNVRAPPPVAYNPIHSPSYPLAALKSQPSAAQPSKMGKKKGKKPLNALDVMKHQPYQLNASLFTFQPPDAKDGLPQKSSVKVNSALAMKQALPPRPVNAASPTNVQASSVYSVPAYTSPPSFFAEASSPVSASPVPVGIPTSPKQESASSSYFVAPRPKFSAKKSGVTIQVWKPSVVEE

SEQ ID NO: 841474 - protein, 86 aa, Homo sapiens
SGRELRVIQESEAGDAGLPRVEVILDCSDRQKTEGCRLQAGHRYYVTFEDRTQPAGPLVFIGSKRRHLLFNCTLSAASFWPLNVSL

SEQ ID NO: 841475 - protein, 830 aa, Homo sapiens; identical to SEQ ID NO: 841473

SEQ ID NO: 841476 - protein, 998 aa, Homo sapiens
SGRELRVIQESEAGDAGLPRVEVILDCSDRQKTEGCRLQAGKECVDSPVEGGQSEAPPSLVSFAVSSEGTEQGEDPRSEKDHSRPHKHRARHARLRRSESLSEKQVKEAKSKCKSIALLLTDAPNPNSKGVLMFKKRRRRARKYTLVSYGTGELEREADEEEEGDKEDTCEVAFLGASESEVDEELLSDVDDNTQVVNFDWDSGLVDIEKKLNRGDKMEMLPDTTGKGALMFAKRRERMDQITAQKEEDKVGGTPSREQDAAQTDGLRTTTSYQRKEEESVRTQSSVSKSYIEVSHGLGHVPQQNGFSGASETANIQRMVPMNRTAKPFPGSVNQPATPFSPTRNMTSPIADFPAPPPYSAVTPPPDAFSRGVSSPIAGPAQPPPWPQPAPWSQPAFYDSSERIASRDERISVPAKRTGILQEAKRRSTTKPMFTFKEPKVSPNPELLSLLQNSEGKRGTGAGGDSGPEEDYLSLGAEACNFMQSSSAKQKTPPPAAPKPAVKSSSSQPVTPVSPVWSPGVAPTQPPAFPTSNPSKGTVVSSIKIAQPSYPPARPASTLNVAGPFKGPQAAVASQNYTPKPTVSTPTVNAVQPGAVGPSNELPGMSGRGAQLFAKRQSRMEKYVVDSDTVQAHAARAQSPTPSLPASWKYSSNVRAPPPVAYNPIHSPSYPLAALKSQPSAAQPSKMGKKKGKKPLNALDVMKHQPYQLNASLFTFQPPDAKDGLPQKSSVKVNSALAMKQALPPRPVNAASPTNVQASSVYSVPAYTSPPSFFAEASSPVSASPVPVGIPTSPKQESASSSYFVAPRPKFSAKKSGVTIQESGRSLSLPGRSVPPPISTSPWVYQPTYSYSSKPTDGLEKANKRPTPWEAAAKSPLGLVDDAFQPRNIQESIVANVVSAARRKVLPGPPEDWNERLSYIPQTQKAYMGSCGRQEYNVTANNNMSTTSQYGSQLPYAYYRQASRNDSAIMSMETRSDYCLPVADYNYNPHPRGWRRQT

SEQ ID NO: 841477 - protein, 539 aa, Homo sapiens
  misc_feature (537)..(537): Xaa can be any naturally occurring amino acid
SGRELRVIQESEAGDAGLPRVEVILDCSDRQKTEGCRLQAGKECVDSPVEGGQSEAPPSLVSFAVSSEGTEQGEDPRSEKDHSRPHKHRARHARLRRSESLSEKQVKEAKSKCKSIALLLTDAPNPNSKGVLMFKKRRRRARKYTLVSYGTGELEREADEEEEGDKEDTCEVAFLGASESEVDEELLSDVDDNTQVVNFDWDSGLVDIEKKLNRGDKMEMLPDTTGKGALMFAKRRERMDQITAQKEEDKVGGTPSREQDAAQTDGLRTTTSYQRKEEESVRTQSSVSKSYIEVSHGLGHVPQQNGFSGASETANIQRMVPMNRTAKPFPGSVNQPATPFSPTRNMTSPIADFPAPPPYSAVTPPPDAFSRGVSSPIAGPAQPPPWPQPAPWSQPAFYDSSERIASRDERISVPAKRTGILQEAKRRSTTKPMFTFKEPKVSPNPELLSLLQNSEGKRGTGAGGDSGPEEDYLSLGAEACNFMQSSSAKQKTPPPAAPKPAVKSSSSQPVTPVSPVWSPGVAPTQPPAFPLFVCISXLG

SEQ ID NO: 841478 - protein, 313 aa, Homo sapiens
SGRELRVIQESEAGDAGLPRVEVILDCSDRQKTEGCRLQAGKECVDSPVEGGQSEAPPSLVSFAVSSEGTEQGEDPRSEKDHSRPHKHRARHARLRRSESLSEKQVKEAKSKCKSIALLLTDAPNPNSKGVLMFKKRRRRARKYTLVSYGTGELEREADEEEEGDKEDTCEVAFLGASESEVDEELLSDVDDNTQVVNFDWDSGLVDIEKKLNRGDKMEMLPDTTGKGALMFAKRRERMDQITAQKEEDKVGGTPSREQDAAQTDGLRTTTSYQRKEEESVRTQSSVSKSYIEVKHAHVSPPTYVVVKQCGYR

SEQ ID NO: 841479 - protein, 830 aa, Homo sapiens; identical to SEQ ID NO: 841473

SEQ ID NO: 841480 - protein, 846 aa, Homo sapiens
SGRELRVIQESEAGDAGLPRVEVILDCSDRQKTEGCRLQAGKECVDSPVEGGQSEAPPSLVSFAVSSEGTEQGEDPRSEKDHSRPHKHRARHARLRRSESLSEKQVKEAKSKCKSIALLLTDAPNPNSKGVLMFKKRRRRARKYTLVSYGTGELEREADEEEEGDKEDTCEVAFLGASESEVDEELLSDVDDNTQVVNFDWDSGLVDIEKKLNRGDKMEMLPDTTGKGALMFAKRRERMDQITAQKEEDKVGGTPSREQDAAQTDGLRTTTSYQRKEEESVRTQSSVSKSYIEVSHGLGHVPQQNGFSGASETANIQRMVPMNRTAKPFPGSVNQPATPFSPTRNMTSPIADFPAPPPYSAVTPPPDAFSRGVSSPIAGPAQPPPWPQPAPWSQPAFYDSSERIASRDERISVPAKRTGILQEAKRRSTTKPMFTFKEPKVSPNPELLSLLQNSEGKRGTGAGGDSGPEEDYLSLGAEACNFMQSSSAKQKTPPPAAPKPAVKSSSSQPVTPVSPVWSPGVAPTQPPAFPTSNPSKGTVVSSIKIAQPSYPPARPASTLNVAGPFKGPQAAVASQNYTPKPTVSTPTVNAVQPGAVGPSNELPGMSGRGAQLFAKRQSRMEKYVVDSDTVQAHAARAQSPTPSLPASWKYSSNVRAPPPVAYNPIHSPSYPLAALKSQPSAAQPSKMGKKKGKKPLNALDVMKHQPYQLNASLFTFQPPDAKDGLPQKSSVKVNSALAMKQALPPRPVNAASPTNVQASSVYSVPAYTSPPSFFAEASSPVSASPVPVGIPTSPKQESASSSYFVAPRPKFSAKKSGVTIQVKCKSGIHSQDIIRTYFPAYLSSST

SEQ ID NO: 841481 - protein, 579 aa, Homo sapiens
SGRELRVIQESEAGDAGLPRVEVILDCSDRQKTEGCRLQAGKECVDSPVEGGQSEAPPSLVSFAVSSEGTEQGEDPRSEKDHSRPHKHRARHARLRRSESLSEKQVKEAKSKCKSIALLLTDAPNPNSKGVLMFKKRRRRARKYTLVSYGTGELEREADEEEEGDKEDTCEVAFLGASESEVDEELLSDVDDNTQVVNFDWDSGLVDIEKKLNRGDKMEMLPDTTGKGALMFAKRRERMDQITAQKEEDKVGGTPSREQDAAQTDGLRTTTSYQRKEEESVRTQSSVSKSYIEVSHGLGHVPQQNGFSGASETANIQRMVPMNRTAKPFPGSVNQPATPFSPTRNMTSPIADFPAPPPYSAVTPPPDAFSRGVSSPIAGPAQPPPWPQPAPWSQPAFYDSSERIASRDERISVPAKRTGILQEAKRRSTTKPMFTFKEPKVSPNPELLSLLQNSEGKRGTGAGGDSGPEEDYLSLGAEACNFMQSSSAKQKTPPPAAPKPAVKSSSSQPVTPVSPVWSPGVAPTQPPAFPTSNPSKGTVVSSIKIAQPSYPPARPASTLNVAGPFKGPQAAGGGRYELV

SEQ ID NO: 841482 - protein, 253 aa, Homo sapiens
SGRELRVIQESEAGDAGLPRVEVILDCSDRQKTEGCRLQAGKECVDSPVEGGQSEAPPSLVSFAVSSEGTEQGEDPRSEKDHSRPHKHRARHARLRRSESLSEKQVKEAKSKCKSIALLLTDAPNPNSKGVLMFKKRRRRARKYTLVSYGTGELEREADEEEEGDKEDTCEVAFLGASESEVDEELLSDVDDNTQVVNFDWDSGLVDIEKKLNRGDKMEMLPDTTRRHAKSPPMSHATGPPNVPHKEPVTELI

SEQ ID NO: 841483 - protein, 234 aa, Homo sapiens
MSVKEGAQRKWAALKEKLGPQDSDPTEANLESADPELCIRLLQMPSVVNYSGLRKRLEGSDGGWMVQFLEQSGLDLLLEALARLSGRGVARISDALLQLTCVSCVRAVMNSRQGIEYILSNQGYVRQLSQALDTSNVMVKKQVFELLAALCIYSPEGHVLTLDALDHYKTVCSQQYRFSIVMNELSGSDNVPYVVTLLSVINAVILGPEDLRARTQLRNEFIGLQLLDVLARLR

SEQ ID NO: 841484 - protein, 139 aa, Homo sapiens
MSVKEGAQRKWAALKEKLGPQDSDPTEANLESADPELCIRLLQMPSVVNYSGLRKRLEGSDGGWMVQFLEQSGLDLLLEALARLSGRGVARISDALLQLTCVSCVRAVMNSRQGIEYILSNQAQGPRGRPRDTAPRVVP

SEQ ID NO: 841485 - protein, 118 aa, Homo sapiens
ALESLVNRAVLLASDAQECTLEEVVERLLSVKGRPRPSPLVKAHKSVQANLDQSQRGSSPQNTTTPKPSVEGQQPAAAAACEPVDHAQSESILKVSQLAPELQLAPELQLAPELAARP

SEQ ID NO: 841486 - protein, 177 aa, Homo sapiens
MAAPSGGWNGVGASLWAALLLGAVALRPAEAVSEPTTVAFDVRPGGVVHSFSHNVGPGDKYTCMFTYASQGGTNEQWQMSLGTSEDHQHFTCTIWRPQGKSYLYFTQFKAEVRGAEIEYAMAYSKAAFERESDVPLKTEEFEVTKTAEVRKDGDGVEVTPPPSKGGQSGQFGEGGQP

SEQ ID NO: 841487 - protein, 189 aa, Homo sapiens
MGCAVPVLTWPYCPFHMAAPSGGWNGVGASLWAALLLGAVALRPAEAVSEPTTVAFDVRPGGVVHSFSHNVGPGDKYTCMFTYASQGGTNEQWQMSLGTSEDHQHFTCTIWRPQGKSYLYFTQFKAEVRGAEIEYAMAYSKAAFERESDVPLKTEEFEVTKTAVAHRPGAFKAELSKLVIVAKASRTEL

SEQ ID NO: 841488 - protein, 173 aa, Homo sapiens
MAAPSGGWNGVGASLWAALLLGAVALRPAEAVSEPTTVAFDVRPGGVVHSFSHNVGPGDKYTCMFTYASQGGTNEQWQMSLGTSEDHQHFTCTIWRPQGKSYLYFTQFKAEVRGAEIEYAMAYSKAAFERESDVPLKTEEFEVTKTAVAHRPGAFKAELSKLVIVAKASRTEL

SEQ ID NO: 841489 - protein, 173 aa, Homo sapiens; identical to SEQ ID NO: 841488

SEQ ID NO: 841490 - protein, 173 aa, Homo sapiens; identical to SEQ ID NO: 841488

SEQ ID NO: 841491 - protein, 173 aa, Homo sapiens; identical to SEQ ID NO: 841488

SEQ ID NO: 841492 - protein, 173 aa, Homo sapiens; identical to SEQ ID NO: 841488

SEQ ID NO: 841493 - protein, 173 aa, Homo sapiens; identical to SEQ ID NO: 841488

SEQ ID NO: 841494 - protein, 173 aa, Homo sapiens; identical to SEQ ID NO: 841488

SEQ ID NO: 841495 - protein, 156 aa, Homo sapiens
MAAPSGGWNGVGASLWAALLLGAVALRPAEAVSEPTTVAFDVRPGGVVHSFSHNVGPGDKYTCMFTYASQGGTNEQWQMSLGTSEDHQHFTCTIWRPQGKSYLYFTQFKAEVRGAEIEYAMAYSKAAFERESDVPLKTEEFEVTKTAGDCGQGIAH

SEQ ID NO: 841496 - protein, 169 aa, Homo sapiens
MAAPSGGWNGVGASLWAALLLGAVALRPAEAVSEPTTVAFDVRPGGVVHSFSHNVGPGDKYTCMFTYASQGGTNEQWQMSLGTSEDHQHFTCTIWRPQGKSYLYFTQFKAEVRGAEIEYAMAYSKAAFERESDVPLKTEEFEVTKTAVISAPQEKGDDQPHWTDGETEA

SEQ ID NO: 841497 - protein, 1982 aa, Homo sapiens
MYAAVEHGPVLCSDSNILCLSWKGRVPKSEKEKPVCRRRYYEEGWLATGNGRGVVGVTFTSSHCRRDRSTPQRINFNLRGHNSEVVLVRWNEPYQKLATCDADGGIFVWIQYEGRWSVELVNDRGAQVSDFTWSHDGTQALISYRDGFVLVGSVSGQRHWSSEINLESQITCGIWTPDDQQVLFGTADGQVIVMDCHGRMLAHVLLHESDGVLGMSWNYPIFLVEDSSESDTDSDDYAPPQDGPAAYPIPVQNIKPLLTVSFTSGDISLMNNYDDLSPTVIRSGLKEVVAQWCTQGDLLAVAGMERQTQLGELPNGPLLKSAMVKFYNVRGEHIFTLDTLVQRPIISICWGHRDSRLLMASGPALYVVRVEHRVSSLQLLCQQAIASTLREDKDVSKLTLPPRLCSYLSTAFIPTIKPPIPDPNNMRDFVSYPSAGNERLHCTMKRTEDDPEVGGPCYTLYLEYLGGLVPILKGRRISKLRPEFVIMDPRTDSKPDEIYGNSLISTVIDSCNCSDSSDIELSDDWAAKKSPKISRASKSPKLPRISIEARKSPKLPRAAQELSRSPRLPLRKPSVGSPSLTRREFPFEDITQHNYLAQVTSNIWGTKFKIVGLAAFLPTNLGAVIYKTSLLHLQPRQMTIYLPEVRKISMDYINLPVFNPNVFSEDEDDLPGDAVGRIDGSAYILDFQYPFSAVQAFAVALANVTQRLNEETGVGRREMQRAFGRGLRRCQRSPLGVRCLGGPEANSKTGKARQAQERALTCGRHLFGWVLLPFIVCSSFLLSFQWHLEAKSAEAPAVLSGNSLAVVMLYWALQNEDSLPSEPAILLDIGRMHYPVFSSNITTSVKAKSFYKTQPKILKMQVLGEWDGEQHLIYTDYVTPPKGDLINKGHLGRHTVLDQQSRLFTGVFSPGRNAICSLRMLGKGRRVKKKLHRIHRFTSLCRQQCDSACDLEQQYEGYTPLLRMSTLKASTSFIVCQSSVGSVMVIQHDWFWEKVRDKNGKILACGSGSSFPNNVVTVTRSSHAEKQPLLSLPLLLFNLECITVNMIFPMRYHVLCLPILKVWTTLDLKPLFSPLGYIKIQLTTNAFYQIRNVTKKMLSVHQGIKIQREYGQIFDKIFMIFSEQKKLFINCTDCLLRSYNHWRKQLLKLYIPRYLVDQQFVNCIKKNYLEYLFPLPRPRENLWAVFKALMTKPSVFCCCFLLLFFVFVFVFLSLTCDVVEDQAPLLGLLCRSTGTICWRWVPNLHFIWKQTSRRCYRKVFSNLNVFESPVLVKKLEKKPPIFFPDQDDMTSLPILSKPQRNTDEVFCCGKGYFPSNTSFSFIFNVLDLIFLVGAFFQKEFSNVIRINSFDMSLCSLIWCFSAYWLCNNGYSLLDNLNAIPLFCRLGDNYFILLFIVFLGIILLLRFGELYPFYLFRKIVSLLTTYMVTVYFAARNKEDMIEGFFFFFFFFLRRSPTLVAQLECSGTISAPHNLCLQGSGDYFDLSLPSSWDYRHPPTRQANVFVFLIEMGFCHVGQAGLELLTSGDPPASASQSAGITDVSHHSRPIEGFLLDNFNFSNWEKIPINHFKNFFLYFVLLIIYKGDFFFEINTQIVFSSFENFDFYLKITVDLNKKGRPIRMRVAKERVTEVISFTFCVLIVFEYKDPEKAHFRTCLIRANIGEIFEMKATNTCEKKKMDFFSKELTKLLNAYLPPPKALSPDGGTGFCLGCLAHVSLYEFVPELTPAATAHLPSTQGPEEEGLPSCAKADTSCGLCGPSSVTFQLIVVVLFSTMLSFSQSLLTKYDENSYFMQEISKNLMFINSLGISRYLIESPKFKSSPVKGYLYKESMTFGGKCDILTNITNSKFVLALTSSNQRHRFVYNIPIECIILRKIGAKEAGKSQSSNGSINQRISQASVFIHSHCSLVKCLTRTWKNVLCSSCNHSKKSANPRVKPALPQGWMVTLGKSLGLARPPLVHLCNERISLDSPLNSLTALSLRAQH

SEQ ID NO: 841498 - protein, 209 aa, Homo sapiens
MYAAVEHGPVLCSDSNILCLSWKGRVPKSEKEKPVCRRRYYEEGWLATGNGRGVVGVTFTSSHCRRDRSTPQRINFNLRGHNSEVVLVRWNEPYQKLATCDADGGIFVWIQYEGRWSVELVNDRGAQVSDFTWSHDGTQALISYRDGFVLVGSVSGQRHWSSEINLESQITCGIWTPDDQQVLFGTADGQVIVMVLLSKQDLLRLPNAF

SEQ ID NO: 841499 - protein, 60 aa, Homo sapiens
PVENTEIDCDSSFFFSSYRSTTILLRSRLISGEPNLRLWAWLLSCQPTSVQVKIMSSSLI

SEQ ID NO: 841500 - protein, 1543 aa, Homo sapiens
MYAAVEHGPVLCSDSNILCLSWKGRVPKSEKEKPVCRRRYYEEGWLATGNGRGVVGVTFTSSHCRRDRSTPQRINFNLRGHNSEVVLVRWNEPYQKLATCDADGGIFVWIQYEGRWSVELVNDRGAQVSDFTWSHDGTQALISYRDGFVLVGSVSGQRHWSSEINLESQITCGIWTPDDQQVLFGTADGQVIVMDCHGRMLAHVLLHESDGVLGMSWNYPIFLVEDSSESDTDSDDYAPPQDGPAAYPIPVQNIKPLLTVSFTSGDISLMNNYDDLSPTVIRSGLKEVVAQWCTQGDLLAVAGMERQTQLGELPNGPLLKSAMVKFYNVRGEHIFTLDTLVQRPIISICWGHRDSRLLMASGPALYVVRVEHRVSSLQLLCQQAIASTLREDKDVSKLTLPPRLCSYLSTAFIPTIKPPIPDPNNMRDFVSYPSAGNERLHCTMKRTEDDPEVGGPCYTLYLEYLGGLVPILKGRRISKLRPEFVIMDPRTDSKPDEIYGNSLISTVIDSCNCSDSSDIELSDDWAAKKSPKISRASKSPKLPRISIEARKSPKLPRAAQELSRSPRLPLRKPSVGSPSLTRREFPFEDITQHNYLAQVTSNIWGTKFKIVGLAAFLPTNLGAVIYKTSLLHLQPRQMTIYLPEVRKISMDYINLPVFNPNVFSEDEDDLPVTGASGVPENSPPCTVNIPIAPIHSSAQAMSPTQSIGLVQSLLANQNVQLDVLTNQTTAVGTAEHAGDSATQYPVSNRYSNPGQVIFGSVEMGRIIQNPPPLSLPPPPQGPMQLSTVGHGDRDHEHLQKSAKALRPTPQLAAEGDAVVFSAPQEVQVTKINPPPPYPGTIPAAPTTAAPPPPLPPPQPPVDVCLKKGDFSLYPTSVHYQTPLGYERITTFDSSGNVEEVCRPRTRMLCSQNTYTLPGPGSSATLRLTATEKKVPQPCSSATLNRLTVPRYSIPTGDPPPYPEIASQLAQGRGAAQRSDNSLIHATLRRNNREATLKMAQLADSPRAPLQPLAKSKGGPGGVVTQLPARPPPALYTCSQCSGTGPSSQPGASLAHTASASPLASQSSYSLLSPPDSARDRTDYVNSAFTEDEALSQHCQLEKPLRHPPLPEAAVTLKRPPPYQWDPMLGEDVWVPQERTAQTSGPNPLKLSSLMLSQGQHLDVSRLPFISPKSPASPTATFQTGYGMGVPYPGSYNNPPLPGVQAPCSPKDALSPTQFAQQEPAVVLQPLYPPSLSYCTLPPMYPGSSTCSSLQLPPVALHPWSSYSACPPMQNPQGTLPPKPHLVVEKPLVSPPPADLQSHLGTEVMVETADNFQEVLSLTESPVPQRTEKFGKKNRKRLDSRAEEGSVQAITEGKVKKEARTLSDFNSLISSPHLGREKKKVKSQKDQLKSKKLNKTNEFQDSSESEPELFISGDELMNQSQGSRKGWKSKRSPRAAGELEEAKCRRASEKEDGRLGSQGFVYVMANKQPLWNEATQVYQLDFGGRVTQESAKNFQIELEGRQVMQFGRIDGSAYILDFQYPFSAVQAFAVALANVTQRLK

SEQ ID NO: 841501 - protein, 423 aa, Homo sapiens
MYAAVEHGPVLCSDSNILCLSWKGRVPKSEKEKPVCRRRYYEEGWLATGNGRGVVGVTFTSSHCRRDRSTPQRINFNLRGHNSEVVLVRWNEPYQKLATCDADGGIFVWIQYEGRWSVELVNDRGAQVSDFTWSHDGTQALISYRDGFVLVGSVSGQRHWSSEINLESQITCGIWTPDDQQVLFGTADGQVIVMDCHGRMLAHVLLHESDGVLGMSWNYPIFLVEDSSESDTDSDDYAPPQDGPAAYPIPVQNIKPLLTVSFTSGDISLMNNYDDLSPTVIRSGLKEVVAQWCTQGDLLAVAGMERQTQLGELPNGPLLKSAMVKFYNVRGEHIFTLDTLVQRPIISICWGHRDSRLLMASGPALYVVRVEHRVSSLQLLCQQAIASTLREDKDVSKLTLPPRLCSYLSTAFIPTIKPHNCLS

SEQ ID NO: 841502 - protein, 35 aa, Homo sapiens
LAGHTKGSRISSKSNNMSLKYWGYMSMTLLELHFQ

SEQ ID NO: 841503 - protein, 36 aa, Homo sapiens
LCGGEELGAFHGVNPCLPGIPHSTEEEKLGAQPLTH

SEQ ID NO: 841504 - protein, 303 aa, Homo sapiens
SQTSGRGGEGLPVGVAGWWICRSRFPVARGGHCWLLNGLQGGYPRQGLWIGRGYIRLSRSFPSQSGGLRRRSPVMDYRRLLMSRVVPGQFDDADSSDSENRDLKTVKEKDDILFEDLQDNVNENGEGEIEDEEEEGYDDDDDDWDWDEGVGKLAKGYVWNGGSNPQANRQTSDSSSAKMSTPADKVLRKFENKINLDKLNVTDSVINKVTEKSRQKEADMYRIKDKADRATVEQVLDPRTRMILFKMLTRGIITEINGCISTGKEANVYHASTANGESRAIKIYKTSILVFKDRDKYVSGEFR

SEQ ID NO: 841505 - protein, 327 aa, Homo sapiens
MVKTWAEKEMRNLIRLNTAEIPCPEPIMLRSHVLVMSFIGKDDMPAPLLKNVQLSESKARELYLQVIQYMRRMYQDARLVHADLSEFNMLYHGGGVYIIDVSQSVEHDHPHALEFLRKDCANVNDFFMRHSVAVMTVRELFEFVTDPSITHENMDAYLSKAMEIASQRTKEERSSQDHVDEEVFKRAYIPRTLNEVKNYERDMDIIMKLKEEDMAMNAQQDNILYQTVTGLKKDLSGVQKVPALLENQVEERTCSDSEDIGSSECSDTDSEEQGDHARPKKHTTDPDIDKKERKKMVKEAQREKRKNKIPKHVKKRKEKTAKTKKGK

SEQ ID NO: 841506 - protein, 544 aa, Homo sapiens
SQTSGRGGEGLPVGVAGWWICRSRFPVARGGHCWLLNGLQGGYPRQGLWIGRGYIRLSRSFPSQSGGLRRRSPVMDYRRLLMSRVVPGQFDDADSSDSENRDLKTVKEKDDILFEDLQDNVNENGEGEIEDEEEEGYDDDDDDWDWDEGVGKLAKGYVWNGGSNPQANRQTSDSSSAKMSTPADKVLRKFENKINLDKLNVTDSVINKVTEKSRQKEADMYRIKDKADRATVEQVLDPRTRMILFKMLTRGIITEINGCISTGKEANVYHASTANGESRAIKIYKTSILVFKDRDKYVSGEFRFRHGYCKGNPRKMVKTWAEKEMRNLIRLNTAEIPCPEPIMLRSHVLVMSFIGKDDMPAPLLKNVQLSESKARELYLQVIQYMRRMYQDARLVHADLSEFNMLYHGGGVYIIDVSQSVEHDHPHALEFLRKDCANVNDFFMRHSVAVMTVRELFEFVTDPSITHENMDAYLSKAMEIASQRTKEERSSQDHVDEEVFKRAYIPRTLNEVKNYERDMDIIMKLKEEDMAMNAQQDNVSSLVCI

SEQ ID NO: 841507 - protein, 441 aa, Homo sapiens
SQTSGRGGEGLPVGVAGWWICRSRFPVARGGHCWLLNGLQGGYPRQGLWIGRGYIRLSRSFPSQSGGLRRRSPVMDYRRLLMSRVVPGQFDDADSSDSENRDLKTVKEKDDILFEDLQDNVNENGEGEIEDEEEEGYDDDDDDWDWDEGVGKLAKGYVWNGGSNPQANRQTSDSSSAKMSTPADKVLRKFENKINLDKLNVTDSVINKVTEKSRQKEADMYRIKDKADRATVEQVLDPRTRMILFKMLTRGIITEINGCISTGKEANVYHASTANGESRAIKIYKTSILVFKDRDKYVSGEFRFRHGYCKGNPRKMVKTWAEKEMRNLIRLNTAEIPCPEPIMLRSHVLVMSFIGKDDMPAPLLKNVQLSESKARELYLQVIQYMRRMYQDARLVHADLSEFNMLYHGGGVYIIDVSQSVEHDHPHALEFLRKDCANVNGE

SEQ ID NO: 841508 - protein, 347 aa, Homo sapiens
SQTSGRGGEGLPVGVAGWWICRSRFPVARGGHCWLLNGLQGGYPRQGLWIGRGYIRLSRSFPSQSGGLRRRSPVMDYRRLLMSRVVPGQFDDADSSDSENRDLKTVKEKDDILFEDLQDNVNENGEGEIEDEEEEGYDDDDDDWDWDEGVGKLAKGYVWNGGSNPQANRQTSDSSSAKMSTPADKVLRKFENKINLDKLNVTDSVINKVTEKSRQKEADMYRIKDKADRATVEQVLDPRTRMILFKMLTRGIITEINGCISTGKEANVYHASTANGESRAIKIYKTSILVFKDRDKYVSGEFRFRHGYCKGNPRKMVKTWAEKEMRNLIRLNTAEIPCPAWATKLES

SEQ ID NO: 841509 - protein, 151 aa, Homo sapiens
SQTSGRGGEGLPVGVAGWWICRSRFPVARGGHCWLLNGLQGGYPRQGLWIGRGYIRLSRSFPSQSGGLRRRSPVMDYRRLLMSRVVPGQFDDADSSDSENRDLKTVKEKDDILFEDLQDNVNENGEGEIEDEEEEGYDDDDDDWDWHQRLG

SEQ ID NO: 841510 - protein, 642 aa, Homo sapiens
SQTSGRGGEGLPVGVAGWWICRSRFPVARGGHCWLLNGLQGGYPRQGLWIGRGYIRLSRSFPSQSGGLRRRSPVMDYRRLLMSRVVPGQFDDADSSDSENRDLKTVKEKDDILFEDLQDNVNENGEGEIEDEEEEGYDDDDDDWDWDEGVGKLAKGYVWNGGSNPQANRQTSDSSSAKMSTPADKVLRKFENKINLDKLNVTDSVINKVTEKSRQKEADMYRIKDKADRATVEQVLDPRTRMILFKMLTRGIITEINGCISTGKEANVYHASTANGESRAIKIYKTSILVFKDRDKYVSGEFRFRHGYCKGNPRKMVKTWAEKEMRNLIRLNTAEIPCPEPIMLRSHVLVMSFIGKDDMPAPLLKNVQLSESKARELYLQVIQYMRRMYQDARLVHADLSEFNMLYHGGGVYIIDVSQSVEHDHPHALEFLRKDCANVNDFFMRHSVAVMTVRELFEFVTDPSITHENMDAYLSKAMEIASQRTKEERSSQDHVDEEVFKRAYIPRTLNEVKNYERDMDIIMKLKEEDMAMNAQQDNILYQTVTGLKKDLSGVQKVPALLENQVEERTCSDSEDIGSSECSDTDSEEQGDHARPKKHTTDPDIDKKERKKMVKEAQREKRKNKIPKHVKKRKEKTAKTKKGK

SEQ ID NO: 841511 - protein, 642 aa, Homo sapiens; identical to SEQ ID NO: 841510

SEQ ID NO: 841512 - protein, 642 aa, Homo sapiens; identical to SEQ ID NO: 841510

SEQ ID NO: 841513 - protein, 125 aa, Homo sapiens
MDIIMKLKEEDMAMNAQQDNILYQTVTGLKKDLSGVQKVPALLENQVEERTCSDSEDIGSSECSDTDSEEQGDHARPKKHTTDPDIDKKERKKMVKEAQREKRKNKIPKHVKKRKEKTAKTKKGK

SEQ ID NO: 841514 - protein, 169 aa, Homo sapiens
SQTSGRGGEGLPVGVAGWWICRSRFPVARGGHCWLLNGLQGGYPRQGLWIGRGYIRLSRSFPSQSGGLRRRSPVMDYRRLLMSRVVPGQFDDADSSDSENRDLKTVKEKDDILFEDLQDNVNENGEGEIEDEEEEGYDDDDDDWDWDEGVGKLAKGYVWNGGSNPQLVP

SEQ ID NO: 841515 - protein, 496 aa, Homo sapiens
GGQPEGGLPVSPEPSLLTPTEEAHPASSLASFPAAQIPIAVEEPGSSSRESVSKAGMPVSADAAKEVVDAGLVGLERQVSDLGSKGEHPEGDPGEVPAPSPQERGEHLNTEQSHEVQPGVPPPPLPKEQSHEVQPGAPPPPLPKAPSESARGPPGPTDGAKVHEDSTSPAVAKEGSRSPGDSPGGKEEAPEPPDGGDPGNLQGEDSQAFSSKRDPEVGKDELSKPSSDAESRDHPSSHSAQPPRKGGAGHTDGPHSQTAEADASGLPHKLGEEDPVLPPVPDGAGEPTVPEGAIWEGSGLQPKCPDTLQSREGLGRMESFLTLESEKSDFPPTPVAEVAPKAQEGESTLEIRKMGSCDGEGLLTSPDQPRGPACDASRQEFHAGVPHPPQGENLAADLGLTALILDQDQQGIPSCPGEGWIRGAASEWPLLSSEKHFQPSQAQPETSIFDVLKEQAQPPENGKETSPSHPGFKDQGADSSQIHVPVEPQEDNNHTW

SEQ ID NO: 841516 - protein, 131 aa, Homo sapiens
MAVVLRVSVDWDKQHVRAGVPHPPQGENLAADLGLTALILDQDQQGIPSCPGEGWIRGAASEWPLLSSEKHFQPSQAQPETSIFDVLKEQAQPPENGKETSPSHPGFKDQGADSSQIHVPVEPQEDNNHTW

SEQ ID NO: 841517 - protein, 644 aa, Homo sapiens
GGQPEGGLPVSPEPSLLTPTEEAHPASSLASFPAAQIPIAVEEPGSSSRESVSKAGMPVSADAAKEVVDAGLVGLERQVSDLGSKGEHPEGDPGEVPAPSPQERGEHLNTEQSHEVQPGVPPPPLPKEQSHEVQPGAPPPPLPKAPSESARGPPGPTDGAKVHEDSTSPAVAKEGSRSPGDSPGGKEEAPEPPDGGDPGNLQGEDSQAFSSKRDPEVGKDELSKPSSDAESRDHPSSHSAQPPRKGGAGHTDGPHSQTAEADASGLPHKLGEEDPVLPPVPDGAGEPTVPEGAIWEGSGLQPKCPDTLQSREGLGRMESFLTLESEKSDFPPTPVAEVAPKAQEGESTLEIRKMGSCDGEGLLTSPDQPRGPACDASRQEFHAGVPHPPQGENLAADLGLTALILDQDQQGIPSCPGEGWIRGAASEWPLLSSEKHFQPSQAQPETSIFDVLKEQAQPPENGKETSPSHPGFKDQGADSSQIHVPVEPQEDNNLPTHGGQEQALGSELQSQLPKGTLSDTPTSSPTDMVWESSLTEESELSAPTRQKLPALGEKRPEGACGDGQSSRVSPPAADVLKDFSLAGNFSRKETCCTGQGPNKSQQALADALEEGSQHEEACQRHPGASEAADGCSPLWGLSKREMAS

SEQ ID NO: 841518 - protein, 1593 aa, Homo sapiens
MPCAQRSWLANLSVVAQLLNFGALCYGRQPQPGPVRFPDRRQEHFIKGLPEYHVVGPVRVDASGHFLSYGLHYPITSSRRKRDLDGSEDWVYYRISHEEKDLFFNLTVNQGFLSNSYIMEKRYGNLSHVKMMASSAPLCHLSGTVLQQGTRVGTAALSACHGLTGFFQLPHGDFFIEPVKKHPLVEGGYHPHIVYRRQKVPETKEPTCGLKDSVNISQKQELWREKWERHNLPSRSLSRRSISKERWVETLVVADTKMIEYHGSENVESYILTIMNMVTGLFHNPSIGNAIHIVVVRLILLEEEEQGLKIVHHAEKTLSSFCKWQKSINPKSDLNPVHHDVAVLLTRKDICAGFNRPCETLGLSHLSGMCQPHRSCNINEDSGLPLAFTIAHELGHSFGIQHDGKENDCEPVGRHPYIMSRQLQYDPTPLTWSKCSEEYITRFLDRGWGFCLDDIPKKKGLKSKVIAPGVIYDVHHQCQLQYGPNATFCQEVENVCQTLWCSVKGFCRSKLDAAADGTQCGEKKWCMAGKCITVGKKPESIPGGWGRWSPWSHCSRTCGAGVQSAERLCNNPEPKFGGKYCTGERKRYRLCNVHPCRSEAPTFRQMQCSEFDTVPYKNELYHWFPIFNPAHPCELYCRPIDGQFSEKMLDAVIDGTPCFEGGNSRNVCINGICKMVGCDYEIDSNATEDRCGVCLGDGSSCQTVRKMFKQKEGSGYVDIGLIPKGARDIRVMEIEGAGNFLAIRSEDPEKYYLNGGFIIQWNGNYKLAGTVFQYDRKGDLEKLMATGPTNESVWIQLLFQVTNPGIKYEYTIQKDGLDNDVEQMYFWQYGHWTECSVTCGTGIRRQTAHCIKKGRGMVKATFCDPETQPNGRQKKCHEKACPPRWWAGEWEACSATCGPHGEKKRTVLCIQTMVSDEQALPPTDCQHLLKPKTLLSCNRDILCPSDWTVGNWSECSVSCGGGVRIRSVTCAKNHDEPCDVTRKPNSRALCGLQQCPSSRRVLKPNKGTISNGKNPPTLKPVPPPTSRPRMLTTPTGPESMSTSTPAISSPSPTTASKEGDLGGKQWQDSSTQPELSSRYLISTGSTSQPILTSQSLSIQPSEENVSSSDTGPTSEGGLVATTTSGSGLSSSRNPITWPVTPFYNTLTKGPEMEIHSGSGEEREQPEDKDESNPVIWTKIRVPGNDAPVESTEMPLAPPLTPDLSRESWWPPFSTVMEGLLPSQRPTTSETGTPRVEGMVTEKPANTLLPLGGDHQPEPSGKTANRNHLKLPNNMNQTKSSEPVLTEEDATSLITEGFLLNASNYKQLTNGHGSAHWIVGNWSECSTTCGLGAYWKRVECTTQMDSDCAAIQRPDPAKRCHLRPCAGWKVGNWSKCSRNCSGGFKIREIQCVDSRDHRNLRPFHCQFLAGIPPPLSMSCNPEPCEAWQVEPWSQCSRSCGGGVQERGVFCPGGLCDWTKRPTSTMSCNEHLCCHWATGNWDLCSTSCGGGFQKRIVQCVPSEGNKTEDQDQCLCDHKPRPPEFKKCNQQACKKSADLLCTKDKLSASFCQTLKAMKKCSVPTVRAECCFSCPQTHITHTQRQRRQRLLQKSKEL

SEQ ID NO: 841519 - protein, 564 aa, Homo sapiens
MLTTPTGPESMSTSTPAISSPSPTTASKEGDLGGKQWQDSSTQPELSSRYLISTGSTSQPILTSQSLSIQPSEENVSSSDTGPTSEGGLVATTTSGSGLSSSRNPITWPVTPFYNTLTKGPEMEIHSGSGEEREQPEDKDESNPVIWTKIRVPGNDAPVESTEMPLAPPLTPDLSRESWWPPFSTVMEGLLPSQRPTTSETGTPRVEGMVTEKPANTLLPLGGDHQPEPSGKTANRNHLKLPNNMNQTKSSEPVLTEEDATSLITEGFLLNASNYKQLTNGHGSAHWIVGNWSECSTTCGLGAYWKRVECTTQMDSDCAAIQRPDPAKRCHLRPCAGWKVGNWSKCSRNCSGGFKIREIQCVDSRDHRNLRPFHCQFLAGIPPPLSMSCNPEPCEAWQVEPWSQCSRSCGGGVQERGVFCPGGLCDWTKRPTSTMSCNEHLCCHWATGNWDLCSTSCGGGFQKRIVQCVPSEGNKTEDQDQCLCDHKPRPPEFKKCNQQACKKSADLLCTKDKLSASFCQTLKAMKKCSVPTVRAECCFSCPQTHITHTQRQRRQRLLQKSKEL

SEQ ID NO: 841520 - protein, 730 aa, Homo sapiens
MRLEEWDIMRIWRQWVHRARRWWAGEWEACSATCGPHGEKKRTVLCIQTMVSDEQALPPTDCQHLLKPKTLLSCNRDILCPSDWTVGNWSECSVSCGGGVRIRSVTCAKNHDEPCDVTRKPNSRALCGLQQCPSSRRVLKPNKGTISNGKNPPTLKPVPPPTSRPRMLTTPTGPESMSTSTPAISSPSPTTASKEGDLGGKQWQDSSTQPELSSRYLISTGSTSQPILTSQSLSIQPSEENVSSSDTGPTSEGGLVATTTSGSGLSSSRNPITWPVTPFYNTLTKGPEMEIHSGSGEEREQPEDKDESNPVIWTKIRVPGNDAPVESTEMPLAPPLTPDLSRESWWPPFSTVMEGLLPSQRPTTSETGTPRVEGMVTEKPANTLLPLGGDHQPEPSGKTANRNHLKLPNNMNQTKSSEPVLTEEDATSLITEGFLLNASNYKQLTNGHGSAHWIVGNWSECSTTCGLGAYWKRVECTTQMDSDCAAIQRPDPAKRCHLRPCAGWKVGNWSKCSRNCSGGFKIREIQCVDSRDHRNLRPFHCQFLAGIPPPLSMSCNPEPCEAWQVEPWSQCSRSCGGGVQERGVFCPGGLCDWTKRPTSTMSCNEHLCCHWATGNWDLCSTSCGGGFQKRIVQCVPSEGNKTEDQDQCLCDHKPRPPEFKKCNQQACKKSADLLCTKDKLSASFCQTLKAMKKCSVPTVRAECCFSCPQTHITHTQRQRRQRLLQKSKEL

SEQ ID NO: 841521 - protein, 110 aa, Homo sapiens
TQAGLKLLGSSNLSTLASESAGTAGMSHHAQPETCCSVWIVDSVFLFRLILFHPLNFLFHSSPCNRLRPSSSMVTGRNCSPIANAVTIRNLLLSNYLQINAQMICCEVSR

SEQ ID NO: 841522 - protein, 139 aa, Homo sapiens
MPPKQELGSGVGELAKNSKRQHWNHRWNKIFKIDQMGRWFVAGGAAVGLGALCYYGLGLSNEIGAIEKAVIWPQYVKDRIHSTYMYLAGSIGLTACVCHSNQQNACSHELHDERLLGDNWCDLLQPWVGAGNAGTINTI

SEQ ID NO: 841523 - protein, 139 aa, Homo sapiens; identical to SEQ ID NO: 841522

SEQ ID NO: 841524 - protein, 139 aa, Homo sapiens; identical to SEQ ID NO: 841522

SEQ ID NO: 841525 - protein, 139 aa, Homo sapiens; identical to SEQ ID NO: 841522

SEQ ID NO: 841526 - protein, 139 aa, Homo sapiens; identical to SEQ ID NO: 841522

SEQ ID NO: 841527 - protein, 139 aa, Homo sapiens; identical to SEQ ID NO: 841522

SEQ ID NO: 841528 - protein, 144 aa, Homo sapiens
METMRRRKAKELGSGVGELAKNSKRQHWNHRWNKIFKIDQMGRWFVAGGAAVGLGALCYYGLGLSNEIGAIEKAVIWPQYVKDRIHSTYMYLAGSIGLTACVCHSNQQNACSHELHDERLLGDNWCDLLQPWVGAGNAGTINTI

SEQ ID NO: 841529 - protein, 77 aa, Homo sapiens
CGRFSDRGLPVIGCSYYLRPFDVATCSAPEELCSLRPTLGARKGNCEAKVTGDRAFQICSVDLVHHHHVGCKAGVSP

SEQ ID NO: 841530 - protein, 148 aa, Homo sapiens
MGAQWWLPLTILGGSSSHQSCMVHQLALWGGLSTVAMCAPSEKFLNMGAPLGVGLGLVFVSSLGSMFLPPTTVAGATLYSVAMYGGLVLFSMFLLYDTQKVIKRAEVSPMYGVQKYDPINSMLSIYMDTLNIFMRVATMLATGGNRKK

SEQ ID NO: 841531 - protein, 171 aa, Homo sapiens
LASHLVAWPPTWLRPPTWLQEGVMGAQWWLPLTILGGSSSHQSCMVHQLALWGGLSTVAMCAPSEKFLNMGAPLGVGLGLVFVSSLGSMFLPPTTVAGATLYSVAMYGGLVLFSMFLLYDTQKVIKRAEVSPMYGVQKYDPINSMLSIYMDTLNIFMRVATMLATGGNRKK

SEQ ID NO: 841532 - protein, 174 aa, Homo sapiens
SHLIRDTTLEIPAAEVYQYGDQGQGVMGAQWWLPLTILGGSSSHQSCMVHQLALWGGLSTVAMCAPSEKFLNMGAPLGVGLGLVFVSSLGSMFLPPTTVAGATLYSVAMYGGLVLFSMFLLYDTQKVIKRAEVSPMYGVQKYDPINSMLSIYMDTLNIFMRVATMLATGGNRKK

SEQ ID NO: 841533 - protein, 139 aa, Homo sapiens; identical to SEQ ID NO: 841522

SEQ ID NO: 841534 - protein, 139 aa, Homo sapiens; identical to SEQ ID NO: 841522

SEQ ID NO: 841535 - protein, 77 aa, Homo sapiens; identical to SEQ ID NO: 841529

SEQ ID NO: 841536 - protein, 139 aa, Homo sapiens; identical to SEQ ID NO: 841522

SEQ ID NO: 841537 - protein, 139 aa, Homo sapiens; identical to SEQ ID NO: 841522

SEQ ID NO: 841538 - protein, 139 aa, Homo sapiens; identical to SEQ ID NO: 841522

SEQ ID NO: 841539 - protein, 139 aa, Homo sapiens; identical to SEQ ID NO: 841522

SEQ ID NO: 841540 - protein, 139 aa, Homo sapiens; identical to SEQ ID NO: 841522

SEQ ID NO: 841541 - protein, 139 aa, Homo sapiens; identical to SEQ ID NO: 841522

SEQ ID NO: 841542 - protein, 139 aa, Homo sapiens; identical to SEQ ID NO: 841522

SEQ ID NO: 841543 - protein, 139 aa, Homo sapiens; identical to SEQ ID NO: 841522

SEQ ID NO: 841544 - protein, 176 aa, Homo sapiens
MPPKQELGSGVGELAKNSKRQHWNHRWNKIFKIDQMGRWFVAGGAAVGLGALCYYGLGLSNEIGAIEKAVIWPQYVKDRIHSTYMYLAGSIGLTACVCHSNQQNACSHELHDERLLGDNWCDLLQPWVGAGNAGCDGCPVVAPSDNIRGVLFSSELHGTPAGIVGRPLHCGHVCAQ

SEQ ID NO: 841545 - protein, 77 aa, Homo sapiens
  misc_feature (3)..(3): Xaa can be any naturally occurring amino acid
AAXRTLRGRQKGKLRGEGDRGPSISDLLGRPGAPPPCWLQGWCVSVTLPSRVFHPAFTNGLPCCEEFHHEESMAVNT

SEQ ID NO: 841546 - protein, 148 aa, Homo sapiens; identical to SEQ ID NO: 841530

SEQ ID NO: 841547 - protein, 144 aa, Homo sapiens
HASVDPRVRTLGARKGNCEAKVTGDRGLSTVAMCAPSEKFLNMGAPLGVGLGLVFVSSLGSMFLPPTTVAGATLYSVAMYGGLVLFSMFLLYDTQKVIKRAEVSPMYGVQKYDPINSMLSIYMDTLNIFMRVATMLATGGNRKK

SEQ ID NO: 841548 - protein, 96 aa, Homo sapiens
LTKGPDIGVSVGSMFLPPTTVAGATLYSVAMYGGLVLFSMFLLYDTQKVIKRAEVSPMYGVQKYDPINSMLSIYMDTLNIFMRVATMLATGGNRKK

SEQ ID NO: 841549 - protein, 77 aa, Homo sapiens; identical to SEQ ID NO: 841529

SEQ ID NO: 841550 - protein, 128 aa, Homo sapiens
MVLNFFENFFRTLEPRCQGGVFVLPLSSWLSFSKLLNFWAHFIEMGTEISATMIVDGRRSPICISRACLVNVGGINTTLLGASAFQPLDAGAICKIFSVVAISEAATGGTEETIIVLSPTILTDSCPG

SEQ ID NO: 841551 - protein, 129 aa, Homo sapiens [sequence omitted]

SEQ ID NO: 841552 - protein, 137 aa, Homo sapiens
NTISWRILKHIMTQLKWDRGTDFVRSSPGNSSVQPGWELLTVQNAKEVGGRRATGNKDTWERCIKEEENTNGQPQRCTHLLTEKGNLERHQLCRERNRSIFNVSVLVTAGTVVAAKRLSDQRPYRHSCRNTRQRGIG

SEQ ID NO: 841553 - protein, 471 aa, Homo sapiens
MTSFYSTSSCPLGCTMAPGARNVFVSPIDVGCQPVAEANAASMCLLANVAHANRVRVGSTPLGRPSLCLPPTSHTACPLPGTCHIPGNIGICGAYGKNTLNGHEKETMKFLNDRLANYLEKVRQLEQENAELETTLLERSKCHESTVCPDYQSYFRTIEELQQKILCSKAENARLIVQIDNAKLAADDFRIKLESERSLHQLVEADKCGTQKLLDDATLAKADLEAQQESLKEEQLSLKSNHEQEVKILRSQLGEKFRIELDIEPTIDLNRVLGEMRAQYEAMVETNHQDVEQWFQAQSEGISLQAMSCSEELQCCQSEILELRCTVNALEVERQAQHTLKDCLQNSLCEAEDRYGTELAQMQSLISNLEEQLSEIRADLERQNQEYQVLLDVKARLENEIATYRNLTPLQSLFHACLLYFLSKLWPCHRWVSLWPWSQHGEMILKARVRRLRLVALGSGVPSPCPVFLQD

SEQ ID NO: 841554 - protein, 442 aa, Homo sapiens
MTSFYSTSSCPLGCTMAPGARNVFVSPIDVGCQPVAEANAASMCLLANVAHANRVRVGSTPLGRPSLCLPPTSHTACPLPGTCHIPGNIGICGAYGKNTLNGHEKETMKFLNDRLANYLEKVRQLEQENAELETTLLERSKCHESTVCPDYQSYFRTIEELQQKILCSKAENARLIVQIDNAKLAADDFRIKLESERSLHQLVEADKCGTQKLLDDATLAKADLEAQQESLKEEQLSLKSNHEQEVKILRSQLGEKFRIELDIEPTIDLNRVLGEMRAQYEAMVETNHQDVEQWFQAQVSGGYRAREYLASSEQGGDCVFSVLQSEGISLQAMSCSEELQCCQSEILELRCTVNALEVERQAQHTLKDCLQNSLCEAEDRYGTELAQMQSLISNLEEQLSEIRADLERQNQEYQVLLDVKARLENEIATYRNLLESEDCKYV

SEQ ID NO: 841555 - protein, 61 aa, Homo sapiens
MSCSEELQCCQSEILELRCTVNALEVERQAQHTLVRVLHPHCTANAPCHVLVVASLKVSQI

SEQ ID NO: 841556 - protein, 497 aa, Homo sapiens
MTSFYSTSSCPLGCTMAPGARNVFVSPIDVGCQPVAEANAASMCLLANVAHANRVRVGSTPLGRPSLCLPPTSHTACPLPGTCHIPGNIGICGAYGKNTLNGHEKETMKFLNDRLANYLEKVRQLEQENAELETTLLERSKCHESTVCPDYQSYFRTIEELQQKILCSKAENARLIVQIDNAKLAADDFRIKLESERSLHQLVEADKCGTQKLLDDATLAKADLEAQQESLKEEQLSLKSNHEQEVKILRSQLGEKFRIELDIEPTIDLNRVLGEMRAQYEAMVETNHQDVEQWFQAQVSGGYRAREYLASSEQGGDCVFSVLQSEGISLQAMSCSEELQCCQSEILELRCTVNALEVERQAQHTLKDCLQNSLCEAEDRYGTELAQMQSLISNLEEQLSEIRADLERQNQEYQVLLDVKARLENEIATYRNLTPLQSLFHACLLYFLSKLWPCHRWVSLWPWSQHGEMILKARVRRLRLVALGSGVPSPCPVFLQD

SEQ ID NO: 841557 - protein, 88 aa, Homo sapiens
SSKESTSTKAKTTEQGCSAESKEKVLEGSKLPDQEKAVSEHIPYLSPYHSSSYRYANIPAHARHYQSYMQLIQQKSAVEYAQSQLSLV

SEQ ID NO: 841558 - protein, 117 aa, Homo sapiens
TSPSSSPSTPPLTGNTAATWVVGNQQPPHLSHLKAFGLAVSSAWISLPPISALLACLLPQVSTEMPPPLRSLPCSSRPITSILIPCFFLGIYHRLICDTQRFICLFACRMSVSTTRM

SEQ ID NO: 841559 - protein, 271 aa, Homo sapiens
MSKSESPKEPEQLRKLFIGGLSFETTDESLRSHFEQWGTLTDCVVMRDPNTKRSRGFGFVTYATVEEVDAAMNARPHKVDGRVVEPKRAVSREDSQRPGAHLTVKKIFVGGIKEDTEEHHLRDYFEQYGKIEVIEIMTDRGSGKKRGFAFVTFDDHDSVDKIVIQKYHTVNGHNCEVRKALSKQEMASASSSQRGRSGSGNFGGGRGGGFGGNDNFGRGGNFSGRGGFGGSRGGGGYGGRGMAIMDLVMMEVVEATMILSITTISLHILDP

SEQ ID NO: 841560 - protein, 116 aa, Homo sapiens
TLPGSYLLGGPEKQSSSMCKYTALWLLPLVSKLPCPEGPLTMVHFKEEKRHPGCQLGSRRHSHLSHELQSEPDIGQVEATPQTSNSSCKTKANIGKSCKRHCFQKSSDHPQRSWLT

SEQ ID NO: 841561 - protein, 131 aa, Homo sapiens
MNSGQRQAVADLENDYTIDGSTPLPTIRSPAWVCKSELLVRRWQLMSNQSKLNGKLMSSLSEQTSFLHKQGQSIYNPVYFIKAKTHLHLHNFTMELMIYLHKAYAKSHLYTVFNKDPCHSDVIINKVTLDK

SEQ ID NO: 841562 - protein, 109 aa, Homo sapiens
QSFLPGRLGTVPTPEANLVLNLLFLALGSFGGGLAKAQNRKALGCAGSKEKGCSGTGPPPRTKKLGRVRDYFSLSRTLKRQEPSSLILPPHPPPPPLKNSQSRSFSETC

SEQ ID NO: 841563 - protein, 67 aa, Homo sapiens
TGFHYVGQAGLQLLTSSDLPASASQSSGITGVSHCSGPISGTFYLPTEMRHPFISGPFLLCCPAGGQ

SEQ ID NO: 841564 - protein, 76 aa, Homo sapiens
NSDRGPLGFGGFLTRGFPKAAAPVRHSGDHGKRLFVIRPSRFYDRRFLKLLRFYIALTGIPVAIFITLVNVFMWSS

SEQ ID NO: 841565 - protein, 189 aa, Homo sapiens
MAAMSLLRRVSVTAVAALSGRPLGTRLGFGGFLTRGFPKAAAPVRHSGDHGKRLFVIRPSRFYDRRFLKLLRFYIALTGIPVAIFITLVNVFIGQAELAEIPEGYVPEHWEYYKHPISRWIARNFYDSPEKIYERTMAVLQIEAEKAELRVKELEVRKLMHVRGDGPWYYYETIDKELIDHSPKATPDN

SEQ ID NO: 841566 - protein, 115 aa, Homo sapiens
SSGINAECPLRPGVVPVVAMAAMSLLRRVSVTAVAALSGRPLGTRLGFGGFLTRGFPKAAAPVRHSGDHGKRLFVIRPSRFYDRRFLKLLRFYIALTGIPVAIFITLVNVFMWSS

SEQ ID NO: 841567 - protein, 189 aa, Homo sapiens; identical to SEQ ID NO: 841565

SEQ ID NO: 841568 - protein, 90 aa, Homo sapiens
SSGINAECPLRPGVVPVVAMAAMSLLRRVSVTAVAALSGRPLGTRLGFGGFLTRGFPKAAGQAELAEIPEGYVPEHWEYYKHPISRWMCP

SEQ ID NO: 841569 - protein, 84 aa, Homo sapiens
SSGINAECPLRPGVVPVVAMAAMSLLRRVSVTAVAALSGRPLGTRLGFGGFLTRGFPKAAAPGNHHSAVFMILTTLFLIDSTLH

SEQ ID NO: 841570 - protein, 116 aa, Homo sapiens
MAAMSLLRRVSVTAVAALSGRPLGTRLGFGGFLTRGFPKAAAPVRHSGDHGKRLFVIRPSRFYDRRFLKLLALYEQSRGLENGRLSGPSATRFYIALTGIPVAIFITLVNVFMWSS

SEQ ID NO: 841571 - protein, 89 aa, Homo sapiens
ILAIAFMSLSRAGMVIVHVGIVCLVRSILDIDYVIWSGSPTYTDRAFPERASVALCDRQYVNDRFVEESTYLVSPSTLRSTTYELGCSN

SEQ ID NO: 841572 - protein, 115 aa, Homo sapiens; identical to SEQ ID NO: 841566

SEQ ID NO: 841573 - protein, 115 aa, Homo sapiens; identical to SEQ ID NO: 841566

SEQ ID NO: 841574 - protein, 134 aa, Homo sapiens
SSGINAECPLRPGVVPVVAMAAMSLLRRVSVTAVAALSGRPLGTRLGFGGFLTRGFPKAAAPVRHSGDHGKRLFVIRPSRFYDRRFLKLLRFYIALTGIPVAIFITLVNVFMWVKELEVRKLMHVRGDGPWVLL

SEQ ID NO: 841575 - protein, 170 aa, Homo sapiens
SSGINAECPLRPGVVPVVAMAAMSLLRRVSVTAVAALSGRPLGTRLGFGGFLTRGFPKAAAPVRHSGDHGKRLFVIRPSRFYDRRFLKLLRFYIALTGIPVAIFITLVNVFMCIPYQDGCARNFYDSPEKIYERTMAVLQIEAEKAELRVKELEVRKLMHVRGDGPWVLL

SEQ ID NO: 841576 - protein, 115 aa, Homo sapiens; identical to SEQ ID NO: 841566

SEQ ID NO: 841577 - protein, 93 aa, Homo sapiens
KQWYQRRVPITAGGSARSSHGGHEFVAAGFGYCGGSSVWPAPWHSPRIWGLPHSWLSEGCWVIQYSQLLFDTVETMGKDYLSSDLLDSMTGVF

SEQ ID NO: 841578 - protein, 87 aa, Homo sapiens
SSGINAECPLRPGVVPVVAMAAMSLLRRVSVTAVAALSGRPLGTRLGFGGFLTRGFPKAAEILHCIDWDSSSNFHNSGECIHVVKLN

SEQ ID NO: 841579 - protein, 81 aa, Homo sapiens
SSGINAECPLRPGVVPVVAMAAMSLLRRVSVTAVAALSGRPLGTRLGFGGFLTRGFPKAAAPGNHHSAVFMILTTLFLMSS

SEQ ID NO: 841580 - protein, 93 aa, Homo sapiens; identical to SEQ ID NO: 841577

SEQ ID NO: 841581 - protein, 90 aa, Homo sapiens; identical to SEQ ID NO: 841568

SEQ ID NO: 841582 - protein, 189 aa, Homo sapiens; identical to SEQ ID NO: 841565

SEQ ID NO: 841583 - protein, 189 aa, Homo sapiens; identical to SEQ ID NO: 841565

SEQ ID NO: 841584 - protein, 77 aa, Homo sapiens
QLPWQRHSSPQRGPTQSSTIYNRGPKLGRVVAVLGLAVGPATLTVHTEPEPGLTSVSLKTPSAYMGPNPWLLHTSNE

SEQ ID NO: 841585 - protein, 66 aa, Homo sapiens
CSRSELLPACLSGSRHQAHLARNTSRGGTGPEDWTPRVLWNVYGNKGGPNGQQRNTMPSSGLVGGP

SEQ ID NO: 841586 - protein, 407 aa, Homo sapiens
PVPAVLSWLLALLRCAATMLSLRVPLAPITDPQQLQLSPLKGLSLVDKENTPPALSGTRVLASKTARRIFQEPTEPKTKAAAPGVEDEPLLRENPRRFVIFPIEYHDIWQMYKKAEASFWTAEEVDLSKDIQHWESLKPEERYFISHVLAFFAASDGIVNENLVERFSQEVQITEARCFYGFQIAMENIHSEMYSLLIDTYIKDPKEREFLFNAIETMPCVKKKADWALRWIGDKEATYGERVVAFAAVEGIFFSGSFASIFWLKKRGLMPGLTFSNELISRDEGLHCDFACLMFKHLVHKPSEERVREIIINAVRIEQEFLTEALPVKLIGMNCTLMKQYIEFVADRLMLELGFSKVFRVENPFDFMENISLEGKTNFFEKRVGEYQRMGVMSSPTENSFTLDADF

SEQ ID NO: 841587 - protein, 339 aa, Homo sapiens
MFYFLPQPKTKAAAPGVEDEPLLRENPRRFVIFPIEYHDIWQMYKKAEASFWTAEEVDLSKDIQHWESLKPEERYFISHVLAFFAASDGIVNENLVERFSQEVQITEARCFYGFQIAMENIHSEMYSLLIDTYIKDPKEREFLFNAIETMPCVKKKADWALRWIGDKEATYGERVVAFAAVEGIFFSGSFASIFWLKKRGLMPGLTFSNELISRDEGLHCDFACLMFKHLVHKPSEERVREIIINAVRIEQEFLTEALPVKLIGMNCTLMKQYIEFVADRLMLELGFSKVFRVENPFDFMENISLEGKTNFFEKRVGEYQRMGVMSSPTENSFTLDADF

SEQ ID NO: 841588 - protein, 407 aa, Homo sapiens; identical to SEQ ID NO: 841586

SEQ ID NO: 841589 - protein, 433 aa, Homo sapiens
RGTLAVRAGGSAECLPSASVWLLALLRCAATMLSLRVPLAPITDPQQLQLSPLKGLSLVDKENTPPALSGTRVLASKTARRIFQEPTEPKTKAAAPGVEDEPLLRENPRRFVIFPIEYHDIWQMYKKAEASFFLETRPRKGDRGWGNPLPFPKGNISSTWESLKPEERYFISHVLAFFAASDGIVNENLVERFSQEVQITEARCFYGFQIAMENIHSEMYSLLIDTYIKDPKEREFLFNAIETMPCVKKKADWALRWIGDKEATYGERVVAFAAVEGIFFSGSFASIFWLKKRGLMPGLTFSNELISRDEGLHCDFACLMFKHLVHKPSEERVREIIINAVRIEQEFLTEALPVKLIGMNCTLMKQYIEFVADRLMLELGFSKVFRVENPFDFMENISLEGKTNFFEKRVGEYQRMGVMSSPTENSFTLDADF

SEQ ID NO: 841590 - protein, 211 aa, Homo sapiens
MLQLLIPYVPTREFLFNAIETMPCVKKKADWALRWIGDKEATYGERVVAFAAVEGIFFSGSFASIFWLKKRGLMPGLTFSNELISRDEGLHCDFACLMFKHLVHKPSEERVREIIINAVRIEQEFLTEALPVKLIGMNCTLMKQYIEFVADRLMLELGFSKVFRVENPFDFMENISLEGKTNFFEKRVGEYQRMGVMSSPTENSFTLDADF

SEQ ID NO: 841591 - protein, 407 aa, Homo sapiens; identical to SEQ ID NO: 841586

SEQ ID NO: 841592 - protein, 407 aa, Homo sapiens; identical to SEQ ID NO: 841586

SEQ ID NO: 841593 - protein, 300 aa, Homo sapiens
MCRVLPFGIGDEWTAEEVDLSKDIQHWESLKPEERYFISHVLAFFAASDGIVNENLVERFSQEVQITEARCFYGFQIAMENIHSEMYSLLIDTYIKDPKEREFLFNAIETMPCVKKKADWALRWIGDKEATYGERVVAFAAVEGIFFSGSFASIFWLKKRGLMPGLTFSNELISRDEGLHCDFACLMFKHLVHKPSEERVREIIINAVRIEQEFLTEALPVKLIGMNCTLMKQYIEFVADRLMLELGFSKVFRVENPFDFMENISLEGKTNFFEKRVGEYQRMGVMSSPTENSFTLDADF

SEQ ID NO: 841594 - protein, 215 aa, Homo sapiens
MYSLLIDTYIKDPKEREFLFNAIETMPCVKKKADWALRWIGDKEATYGERVVAFAAVEGIFFSGSFASIFWLKKRGLMPGLTFSNELISRDEGLHCDFACLMFKHLVHKPSEERVREIIINAVRIEQEFLTEALPVKLIGMNCTLMKQYIEFVADRLMLELGFSKVFRVENPFDFMENISLEGKTNFFEKRVGEYQRMGVMSSPTENSFTLDADF

SEQ ID NO: 841595 - protein, 302 aa, Homo sapiens
PVPAVLSWLLALLRCAATMLSLRVPLAPITDPQQLQLSPLKGLSLVDKENTPPALSGTRVLASKTARRIFQEPTEPKTKAAAPGVEDEPLLRENPRRFVIFPIEYHDIWQMYKKAEASFWTAEEVDLSKDIQHWESLKPEERYFISHVLAFFAASDGIVNENLVERFSQEVQITEARCFYGFQIAMENIHSEMYSLLIDTYIKDPKEREFLFNAIETMPCVKKKADWALRWIGDKEATYGERVVAFAAVEGIFFSGSFASIFWLKKRGLMPGLTFSNELISRDEGLHCDFACLMFKHLDLFF

SEQ ID NO: 841596 - protein, 75 aa, Homo sapiens
MDSRRVQLGLECPDAFNKNNPHCSLTLQVGMETRRVQQQLRPPGLLMLRWSMELRRNTTPVYQGSRYGRSCCRSG

SEQ ID NO: 841597 - protein, 138 aa, Homo sapiens
MDEVCATTSSMVIAQYGHSACAARTSSTRTCNNFVQHDFSASGDSACACTRRGTIHTHTHHDLVIKKLFLSFISWLIKINQFFPRKSLVILHIAKIHHSKILDGEKLMVQSTATLIVQPIFNTFYNNHTKWSLVNINP

SEQ ID NO: 841598 - protein, 69 aa, Homo sapiens
HLISYPSPKTNSKPPYVLTLFSDDPLTFRLGLKLVSRTRALPCESCTTWTGSELGVCPPHCHFLPLPPP

SEQ ID NO: 841599 - protein, 82 aa, Homo sapiens
SSRGYCIRGGARNFTLVTQAECNGSIDILITCDTSGALMFVSRFIPYPCCRMGGNCGQMEAETQGGRRASLRSHLAAPGLLP

SEQ ID NO: 841600 - protein, 112 aa, Homo sapiens
FVLLLWLAIGTHHVRPEVRGGIHRRGPGWLPCVLREQSRALSGVARGPGRSSRGLGPADVASLKMRSQGEAPPPTSGRFSCVALSFQAHLAVPFSACLSPPSCPLLLWTAFG

SEQ ID NO: 841601 - protein, 62 aa, Homo sapiens
NTSFAPNACAVHVGCGASPQHAPQDTEVTLWGSAQPCPLKATCTQVHSTGIWRKEVYVVAVS

SEQ ID NO: 841602 - protein, 136 aa, Homo sapiens
GRKALFESTHRDRQLRKERHGSHRWDDSAEAGMHPAGRPPALPAVSTQRHRCLLGRSGAGPVCLNVPVEAAWALQDGACSVSAPAGLSVLAELSTYCVCAGHSAESVQTAGWGLPGGGDCFVLRDRQISFKMRARD

SEQ ID NO: 841603 - protein, 887 aa, Homo sapiens
MDWQPDEQGLQQVLQLLKDSQSPNTATQRIVQDKLKQLNQFPDFNNYLIFVLTRLKSEDEPTRSLSGLILKNNVKAHYQSFPPPVADFIKQECLNNIGDASSLIRATIGILITTIASKGELQMWPELLPQLCNLLNSEDYNTCEGAFGALQKICEDSSELLDSDALNRPLNIMIPKFLQFFKHCSPKIRSHAIACVNQFIMDRAQALMDNIDTFIEHLFALAVDDDPEVRKNVCRALVMLLEVRIDRLIPHMHSIIQYMLQRTQDHDENVALEACEFWLTLAEQPICKEVLASHLVQLIPILVNGMKYSEIDIILLKGDVEEDEAVPDSEQDIKPRFHKSRTVTLPHEAERPDGSEDAEDDDDDDALSDWNLRKCSAAALDVLANVFREELLPHLLPLLKGLLFHPEWVVKESGILVLGAIAEGCMQGMVPYLPELIPHLIQCLSDKKALVRSIACWTLSRYAHWVVSQPPDMHLKPLMTELLKRILDGNKRVQEAACSAFATLEEEACTELVPYLSYILDTLVFAFGKYQHKNLLILYDAIGTLADSVGHHLNQPEYIQKLMPPLIQKWNELKDEDKDLFPLLECLSSVATALQSGFLPYCEPVYQRCVTLVQKTLAQAMMYTQHPEQYEAPDKDFMIVALDLLSGLAEGLGGHVEQLVARSNIMTLLFQCMQDSMPEVRQSSFALLGDLTKACFIHVKPCIAEFMPILGTNLNPEFISVCNNATWAIGEICMQMGAEMQPYVQMVLNNLVEIINRPNTPKTLLENTAITIGRLGYVCPQEVAPMLQQFIRPWCTSLRNIRDNEEKDSAFRGICMMIGVNPGGVVQDFIFFCDAVASWVSPKDDLRDMFYKILHGFKDQVGEDNWQQFSEQFPPLLKERLAAFYGV

SEQ ID NO: 841604 - protein, 164 aa, Homo sapiens [sequence omitted]

SEQ ID NO: 841605 - protein, 887 aa, Homo sapiens; identical to SEQ ID NO: 841603

SEQ ID NO: 841606 - protein, 916 aa, Homo sapiens
MRNTSMDLCPRPKISCAVPGSYNFSLPCAMDWQPDEQGLQQVLQLLKDSQSPNTATQRIVQDKLKQLNQFPDFNNYLIFVLTRLKSEDEPTRSLSGLILKNNVKAHYQSFPPPVADFIKQECLNNIGDASSLIRATIGILITTIASKGELQMWPELLPQLCNLLNSEDYNTCEGAFGALQKICEDSSELLDSDALNRPLNIMIPKFLQFFKHCSPKIRSHAIACVNQFIMDRAQALMDNIDTFIEHLFALAVDDDPEVRKNVCRALVMLLEVRIDRLIPHMHSIIQYMLQRTQDHDENVALEACEFWLTLAEQPICKEVLASHLVQLIPILVNGMKYSEIDIILLKGDVEEDEAVPDSEQDIKPRFHKSRTVTLPHEAERPDGSEDAEDDDDDDALSDWNLRKCSAAALDVLANVFREELLPHLLPLLKGLLFHPEWVVKESGILVLGAIAEGCMQGMVPYLPELIPHLIQCLSDKKALVRSIACWTLSRYAHWVVSQPPDMHLKPLMTELLKRILDGNKRVQEAACSAFATLEEEACTELVPYLSYILDTLVFAFGKYQHKNLLILYDAIGTLADSVGHHLNQPEYIQKLMPPLIQKWNELKDEDKDLFPLLECLSSVATALQSGFLPYCEPVYQRCVTLVQKTLAQAMMYTQHPEQYEAPDKDFMIVALDLLSGLAEGLGGHVEQLVARSNIMTLLFQCMQDSMPEVRQSSFALLGDLTKACFIHVKPCIAEFMPILGTNLNPEFISVCNNATWAIGEICMQMGAEMQPYVQMVLNNLVEIINRPNTPKTLLENTAITIGRLGYVCPQEVAPMLQQFIRPWCTSLRNIRDNEEKDSAFRGICMMIGVNPGGVVQDFIFFCDAVASWVSPKDDLRDMFYKILHGFKDQVGEDNWQQFSEQFPPLLKERLAAFYGV

SEQ ID NO: 841607 - protein, 925 aa, Homo sapiens
MIDLSPNPLFGSLLPRESLEKPQRELPPLLPGAGLPCAMDWQPDEQGLQQVLQLLKDSQSPNTATQRIVQDKLKQLNQFPDFNNYLIFVLTRLKSEDEPTRSLSGLILKNNVKAHYQSFPPPVADFIKQECLNNIGDASSLIRATIGILITTIASKGELQMWPELLPQLCNLLNSEDYNTCEGAFGALQKICEDSSELLDSDALNRPLNIMIPKFLQFFKHCSPKIRSHAIACVNQFIMDRAQALMDNIDTFIEHLFALAVDDDPEVRKNVCRALVMLLEVRIDRLIPHMHSIIQYMLQRTQDHDENVALEACEFWLTLAEQPICKEVLASHLVQLIPILVNGMKYSEIDIILLKGDVEEDEAVPDSEQDIKPRFHKSRTVTLPHEAERPDGSEDAEDDDDDDALSDWNLRKCSAAALDVLANVFREELLPHLLPLLKGLLFHPEWVVKESGILVLGAIAEGCMQGMVPYLPELIPHLIQCLSDKKALVRSIACWTLSRYAHWVVSQPPDMHLKPLMTELLKRILDGNKRVQEAACSAFATLEEEACTELVPYLSYILDTLVFAFGKYQHKNLLILYDAIGTLADSVGHHLNQPEYIQKLMPPLIQKWNELKDEDKDLFPLLECLSSVATALQSGFLPYCEPVYQRCVTLVQKTLAQAMMYTQHPEQYEAPDKDFMIVALDLLSGLAEGLGGHVEQLVARSNIMTLLFQCMQDSMPEVRQSSFALLGDLTKACFIHVKPCIAEFMPILGTNLNPEFISVCNNATWAIGEICMQMGAEMQPYVQMVLNNLVEIINRPNTPKTLLENTAITIGRLGYVCPQEVAPMLQQFIRPWCTSLRNIRDNEEKDSAFRGICMMIGVNPGGVVQDFIFFCDAVASWVSPKDDLRDMFYKILHGFKDQVGEDNWQQFSEQFPPLLKERLAAFYGV

SEQ ID NO: 841608 - protein, 545 aa, Homo sapiens
MIRPSRCQHSSHSSNPIQPYRRYRFHPRLSMIYPTLQLMRPTTNSPSKPNPSLLPLLKGLLFHPEWVVKESGILVLGAIAEGCMQGMVPYLPELIPHLIQCLSDKKALVRSIACWTLSRYAHWVVSQPPDMHLKPLMTELLKRILDGNKRVQEAACSAFATLEEEACTELVPYLSYILDTLVFAFGKYQHKNLLILYDAIGTLADSVGHHLNQPEYIQKLMPPLIQKWNELKDEDKDLFPLLECLSSVATALQSGFLPYCEPVYQRCVTLVQKTLAQAMMYTQHPEQYEAPDKDFMIVALDLLSGLAEGLGGHVEQLVARSNIMTLLFQCMQDSMPEVRQSSFALLGDLTKACFIHVKPCIAEFMPILGTNLNPEFISVCNNATWAIGEICMQMGAEMQPYVQMVLNNLVEIINRPNTPKTLLENTAITIGRLGYVCPQEVAPMLQQFIRPWCTSLRNIRDNEEKDSAFRGICMMIGVNPGGVVQDFIFFCDAVASWVSPKDDLRDMFYKILHGFKDQVGEDNWQQFSEQFPPLLKERLAAFYGV

SEQ ID NO: 841609 - protein, 211 aa, Homo sapiens
MPEVRQSSFALLGDLTKACFIHVKPCIAEFMPILGTNLNPEFISVCNNATWAIGEICMQMGAEMQPYVQMVLNNLVEIINRPNTPKTLLENTAITIGRLGYVCPQEVAPMLQQFIRPWCTSLRNIRDNEEKDSAFRGICMMIGVNPGGVVQDFIFFCDAVASWVSPKDDLRDMFYKILHGFKDQVGEDNWQQFSEQFPPLLKERLAAFYGV

SEQ ID NO: 841610 - protein, 328 aa, Homo sapiens
MYTQHPEQYEAPDKDFMIVALDLLSGLAEGLGGHVEQLVARSNIMTLLFQCMQDSMPEVRQSSFALLGDLTKACFIHVKPCIGTTLALSLTHDPSPGLKGWRAIPGDDCDHIGMYSYCLMGPAGQVLQLTLAGPPSQHPCFSPPAEFMPILGTNLNPEFISVCNNATWAIGEICMQMGAEMQPYVQMVLNNLVEIINRPNTPKTLLENTAITIGRLGYVCPQEVAPMLQQFIRPWCTSLRNIRDNEEKDSAFRGICMMIGVNPGGVVQDFIFFCDAVASWVSPKDDLRDMFYKILHGFKDQVGEDNWQQFSEQFPPLLKERLAAFYGV

SEQ ID NO: 841611 - protein, 925 aa, Homo sapiens; identical to SEQ ID NO: 841607

SEQ ID NO: 841612 - protein, 925 aa, Homo sapiens; identical to SEQ ID NO: 841607

SEQ ID NO: 841613 - protein, 925 aa, Homo sapiens; identical to SEQ ID NO: 841607

SEQ ID NO: 841614 - protein, 925 aa, Homo sapiens; identical to SEQ ID NO: 841607

SEQ ID NO: 841615 - protein, 935 aa, Homo sapiens
MIDLSPNPLFGSLLPRESLEKPQRELPPLLPGAGLPCAMDWQPDEQGLQQVLQLLKDSQSPNTATQRIVQDKLKQLNQFPDFNNYLIFVLTRLKSEDEPTRSLSGLILKNNVKAHYQSFPPPVADFIKQECLNNIGDASSLIRATIGILITTIASKGELQMWPELLPQLCNLLNSEDYNTCEGAFGALQKICEDSSELLDSDALNRPLNIMIPKFLQFFKHCSPKIRSHAIACVNQFIMDRAQALMDNIDTFIEHLFALAVDDDPEVRKNVCRALVMLLEVRIDRLIPHMHSIIQYMLQRTQDHDENVALEACEFWLTLAEQPICKEVLASHLVQLIPILVNGMKYSEIDIILLKGDVEEDEAVPDSEQDIKPRFHKSRTVTLPHEAERPDGSEDAEDDDDDDALSDWNLRKCSAAALDVLANVFREELLPHLLPLLKGLLFHPEWVVKESGILVLGAIAEGCMQGMVPYLPELIPHLIQCLSDKKALVRSIACWTLSRYAHWVVSQPPDMHLKPLMTELLKRILDGNKRVQEAACSAFATLEEEACTELVPYLSYILDTLVFAFGKYQHKNLLILYDAIGTLADSVGHHLNQPEYIQKLMPPLIQKWNELKDEDKDLFPLLECLSSVATALQSGFLPYCEPVYQRCVTLVQKTLAQAMMYTQHPEQYEAPDKDFMIVALDLLSGLAEGLGGHVEQLVARSNIMTLLFQCMQDSMPEVRQSSFALLGDLTKACFIHVKPCIAEFMPILGTNLNPEFISVCNNATWAIGEICMQMGAEMQPYVQMVLNNLVEIINRPNTPKTLLENTGRLTSPSAIPAITIGRLGYVCPQEVAPMLQQFIRPWCTSLRNIRDNEEKDSAFRGICMMIGVNPGGVVQDFIFFCDAVASWVSPKDDLRDMFYKILHGFKDQVGEDNWQQFSEQFPPLLKERLAAFYGV

SEQ ID NO: 841616 - protein, 758 aa, Homo sapiens
MIDLSPNPLFGSLLPRESLEKPQRELPPLLPGAGLPCAMDWQPDEQGLQQVLQLLKDSQSPNTATQRIVQDKLKQLNQFPDFNNYLIFVLTRLKSEDEPTRSLSGLILKNNVKAHYQSFPPPVADFIKQECLNNIGDASSLIRATIGILITTIASKGELQMWPELLPQLCNLLNSEDYNTCEGAFGALQKICEDSSELLDSDALNRPLNIMIPKFLQFFKHCSPKIRSHAIACVNQFIMDRAQALMDNIDTFIEHLFALAVDDDPEVRKNVCRALVMLLEVRIDRLIPHMHSIIQYMLQRTQDHDENVALEACEFWLTLAEQPICKEVLASHLVQLIPILVNGMKYSEIDIILLKGDVEEDEAVPDSEQDIKPRFHKSRTVTLPHEAERPDGSEDAEDDDDDDALSDWNLRKCSAAALDVLANVFREELLPHLLPLLKGLLFHPEWVVKESGILVLGAIAEGCMQGMVPYLPELIPHLIQCLSDKKALVRSIACWTLSRYAHWVVSQPPDMHLKPLMTELLKRILDGNKRVQEAACSAFATLEEEACTELVPYLSYILDTLVFAFGKYQHKNLLILYDAIGTLADSVGHHLNQPEYIQKLMPPLIQKWNELKDEDKDLFPLLECLSSVATALQSGFLPYCEPVYQRCVTLVQKTLAQAMMYTQHPEQYEAPDKDFMIVALDLLSGLAEGLGGHVEQLVARSNIMTLLFQCMQDSMPEVRQSSFALLGDLTKACFIHVKPCIGTTLALSLTHDPSPGLK

SEQ ID NO: 841617 - protein, 432 aa, Homo sapiens
MIDLSPNPLFGSLLPRESLEKPQRELPPLLPGAGLPCAMDWQPDEQGLQQVLQLLKDSQSPNTATQRIVQDKLKQLNQFPDFNNYLIFVLTRLKSEDEPTRSLSGLILKNNVKAHYQSFPPPVADFIKQECLNNIGDASSLIRATIGILITTIASKGELQMWPELLPQLCNLLNSEDYNTCEGAFGALQKICEDSSELLDSDALNRPLNIMIPKFLQFFKHCSPKIRSHAIACVNQFIMDRAQALMDNIDTFIEHLFALAVDDDPEVRKNVCRALVMLLEVRIDRLIPHMHSIIQYMLQRTQDHDENVALEACEFWLTLAEQPICKEVLASHLVQLIPILVNGMKYSEIDIILLKGDVEEDEAVPDSEQDIKPRFHKSRTVTLPHEAERPDGSEDAEDDDDDDALSDWNLSVCPCLGVVVGWQALDSLLGGD

SEQ ID NO: 841618 - protein, 925 aa, Homo sapiens; identical to SEQ ID NO: 841607

SEQ ID NO: 841619 - protein, 935 aa, Homo sapiens; identical to SEQ ID NO: 841615

SEQ ID NO: 841620 - protein, 925 aa, Homo sapiens; identical to SEQ ID NO: 841607

SEQ ID NO: 841621 - protein, 358 aa, Homo sapiens
MSVNDFHQVVEDHLHIRLHLCPHLECLSSVATALQSGFLPYCEPVYQRCVTLVQKTLAQAMVSNPRPVTCASALACLGPAPLTRAPVGICVQMYTQHPEQYEAPDKDFMIVALDLLSGLAEGLGGHVEQLVARSNIMTLLFQCMQDSMPEVRQSSFALLGDLTKACFIHVKPCIAEFMPILGTNLNPEFISVCNNATWAIGEICMQMGAEMQPYVQMVLNNLVEIINRPNTPKTLLENTAITIGRLGYVCPQEVAPMLQQFIRPWCTSLRNIRDNEEKDSAFRGICMMIGVNPGGVVQDFIFFCDAVASWVSPKDDLRDMFYKILHGFKDQVGEDNWQQFSEQFPPLLKERLAAFYGV

SEQ ID NO: 841622 - protein, 211 aa, Homo sapiens; identical to SEQ ID NO: 841609

SEQ ID NO: 841623 - protein, 925 aa, Homo sapiens; identical to SEQ ID NO: 841607

SEQ ID NO: 841624 - protein, 925 aa, Homo sapiens; identical to SEQ ID NO: 841607

SEQ ID NO: 841625 - protein, 148 aa, Homo sapiens
MDWQPDEQGLQQVLQLLKDSQSPNTATQRIVQDKLKQLNQFPDFNNYLIFVLTRLKSEGTPSAPFHAIGTLLSPPGPLNLSLPPPDEPTRSLSGLILKNNVKAHYQSFPPPVADFIKQECLNNIGDASSLIRATIGERGSGGWPLRTH

SEQ ID NO: 841626 - protein, 58 aa, Homo sapiens
SHGWPERVLGGWDHHPPPTFVSLPLCTQGAFGALQKICEDSSELLDSDALNRPLNIMI

SEQ ID NO: 841627 - protein, 168 aa, Homo sapiens
LNFILFTQGANRMRGRLGSVDSFERSNSLASEKDYSPGDSPPGTPPASPPSSAWQTFPEEDSDSPQFRRRAHTFSHPPSSTKRKLNLQDGRAQGVRSPLLRQSSSEQCSDGEGRKRTSSTCSNESLSVGGTSVTPRRISWRQRIFLRVASPMNKSPSAMQQQGLCCTP

SEQ ID NO: 841628 - protein, 1218 aa, Homo sapiens
MEPPSCIQDEPFPHPLEPEPGVSAQPGPGKPSDKRFRLWYVGGSCLDHRTTLPMLPWLMAEIRRRSQKPEAGGCGAPAAREVILVLSAPFLRCVPAPGAGASGGTSPSATQPNPAVFIFEHKAQHISRFIHNSHDLTYFAYLIKAQPDDPESQMACHVFRATDPSQDAKPSKDNEDAFYNSQKFEVLYCGKVTVTHKKAPSSLIDDCMEKFSLHEQQRLKIQGEQRGPDPGEDLADLEVVVPGSPGDCLPEEADGTDTHLGLPAGASQPALTSSRVCFPERILEDSGFDEQQEFRSRCSSVTGVQRRVHEGSQKSQPRRRHASAPSHVQPSDSEKNRTMLFQVGRFEINLISPDTKSVVLEKNFKDISSCSQGIKHVDHFGFICRESPEPGLSQYICYVFQCASESLVDEVMLTLKQAFSTAAALQSAKTQIKLCEACPMHSLHKLCERIEGLYPPRAKLVIQRHLSSLTDNEQADIFERVQKMKPVSDQEENELVILHLRQLCEAKQKTHVHIGEGPSTISNSTIPENATSSGRFKLDILKNKAKRSLTSSLENIFSRGANRMRGRLGSVDSFERSNSLASEKDYSPGDSPPGTPPASPPSSAWQTFPEEDSDSPQFRRRAHTFSHPPSSTKRKLNLQDGRAQGVRSPLLRQSSSEQCSDGEGRKRTSSTCSNESLSVGGTSVTPRRISWRQRIFLRVASPMNKSPSAMQQQDGLDRNELLPLSPLSPTMEEEPLVIFLSGEDDPEKIEERKKSKELRSLWRKAIHQQILLLRMEKENQKLEVASRDELQSRKVKLDYEEVGACQKEVLITWDKKLLNCRAKIRCDMEDIHTLLKEGVPKSRRGEIWQFLALQYRLRHRLPNKQQPPDISYKELLKQLTAQQHAILVDLGRTFPTHPYFSVQLGPGQLSLFNLLKAYSLLDKEVGYCQGISFVAGVLLLHMSEEQAFEMLKFLMYDLGFRKQYRPDMMSLQIQMYQLSRLLHDYHRDLYNHLEENEISPSLYAAPWFLTLFASQFSLGFVARVFDIIFLQGTEVIFKVALSLLSSQETLIMECESFENIVEFLKNTLPDMNTSEMEKIITQVFEMDISKQLHAYEVEYHVLQDELQESSYSCEDSETLEKLERANSQLKRQNMDLLEKLQVAHTKIQALESNLENLLTRETKMKSLIRTLEQEKMAYQKTVEQLRKLLPADALVNCDLLLRDLNCNPNNKAKIGNKP

SEQ ID NO: 841629 - protein, 1273 aa, Homo sapiens
MEPPSCIQDEPFPHPLEPEPGVSAQPGPGKPSDKRFRLWYVGGSCLDHRTTLPMLPWLMAEIRRRSQKPEAGGCGAPAAREVILVLSAPFLRCVPAPGAGASGGTSPSATQPNPAVFIFEHKAQHISRFIHNSHDLTYFAYLIKAQPDDPESQMACHVFRATDPSQDAKPSKDNEDAFYNSQKFEVLYCGKVTVTHKKAPSSLIDDCMEKFSLHEQQRLKIQGEQRGPDPGEDLADLEVVVPGSPGDCLPEEADGTDTHLGLPAGASQPALTSSRVCFPERILEDSGFDEQQEFRSRCSSVTGVQRRVHEGSQKSQPRRRHASAPSHVQPSDSEKNRTMLFQVGRFEINLISPDTKSVVLEKNFKDISSCSQGIKHVDHFGFICRESPEPGLSQYICYVFQCASESLVDEVMLTLKQAFSTAAALQSAKTQIKLCEACPMHSLHKLCERIEGLYPPRAKLVIQRHLSSLTDNEQADIFERVQKMKPVSDQEENELVILHLRQLCEAKQKTHVHIGEGPSTISNSTIPENATSSGRFKLDILKNKAKRSLTSSLENIFSRGANRMRGRLGSVDSFERSNSLASEKDYSPGDSPPGTPPASPPSSAWQTFPEEDSDSPQFRRRAHTFSHPPSSTKRKLNLQDGRAQGVRSPLLRQSSSEQCSNLSSVRRMYKESNSSSSLPSLHTSFSAPSFTAPSFLKSFYQNSGRLSPQYENEISDGEGRKRTSSTCSNESLSVGGTSVTPRRISWRQRIFLRVASPMNKSPSAMQQQDGLDRNELLPLSPLSPTMEEEPLVIFLSGEDDPEKIEERKKSKELRSLWRKAIHQQILLLRMEKENQKLEVASRDELQSRKVKLDYEEVGACQKEVLITWDKKLLNCRAKIRCDMEDIHTLLKEGVPKSRRGEIWQFLALQYRLRHRLPNKQQPPDISYKELLKQLTAQQHAILVDLGRTFPTHPYFSVQLGPGQLSLFNLLKAYSLLDKEVGYCQGISFVAGVLLLHMSEEQAFEMLKFLMYDLGFRKQYRPDMMSLQIQMYQLSRLLHDYHRDLYNHLEENEISPSLYAAPWFLTLFASQFSLGFVARVFDIIFLQGTEVIFKVALSLLSSQETLIMECESFENIVEFLKNTLPDMNTSEMEKIITQVFEMDISKQLHAYEVEYHVLQDELQESSYSCEDSETLEKLERANSQLKRQNMDLLEKLQVAHTKIQALESNLENLLTRETKMKSLIRTLEQEKMAYQKTVEQLRKLLPADALVNCDLLLRDLNCNPNNKAKIGNKP

SEQ ID NO: 841630 - protein, 509 aa, Homo sapiens
MQQQDGLDRNELLPLSPLSPTMEEEPLVIFLSGEDDPEKIEERKKSKELRSLWRKAIHQQILLLRMEKENQKLEVASRDELQSRKVKLDYEEVGACQKEVLITWDKKLLNCRAKIRCDMEDIHTLLKEGVPKSRRGEIWQFLALQYRLRHRLPNKQQPPDISYKELLKQLTAQQHAILVDLGRTFPTHPYFSVQLGPGQLSLFNLLKAYSLLDKEVGYCQGISFVAGVLLLHMSEEQAFEMLKFLMYDLGFRKQYRPDMMSLQIQMYQLSRLLHDYHRDLYNHLEENEISPSLYAAPWFLTLFASQFSLGFVARVFDIIFLQGTEVIFKVALSLLSSQETLIMECESFENIVEFLKNTLPDMNTSEMEKIITQVFEMDISKQLHAYEVEYHVLQDELQESSYSCEDSETLEKLERANSQLKRQNMDLLEKLQVAHTKIQALESNLENLLTRETKMKSLIRTLEQEKMAYQKTVEQLRKLLPADALVNCDLLLRDLNCNPNNKAKIGNKP

SEQ ID NO: 841631 - protein, 277 aa, Homo sapiens
MSEEQAFEMLKFLMYDLGFRKQYRPDMMSLQIQMYQLSRLLHDYHRDLYNHLEENEISPSLYAAPWFLTLFASQFSLGFVARVFDIIFLQGTEVIFKVALSLLSSQETLIMECESFENIVEFLKNTLPDMNTSEMEKIITQVFEMDISKQLHAYEVEYHVLQDELQESSYSCEDSETLEKLERANSQLKRQNMDLLEKLQVAHTKIQALESNLENLLTRETKMKSLIRTLEQEKMAYQKTVEQLRKLLPADALVNCDLLLRDLNCNPNNKAKIGNKP

SEQ ID NO: 841632 - protein, 1218 aa, Homo sapiens; identical to SEQ ID NO: 841628

SEQ ID NO: 841633 - protein, 1299 aa, Homo sapiens
MEPPSCIQDEPFPHPLEPEPGVSAQPGPGKPSDKRFRLWYVGGSCLDHRTTLPMLPWLMAEIRRRSQKPEAGGCGAPAAREVILVLSAPFLRCVPAPGAGASGGTSPSATQPNPAVFIFEHKAQHISRFIHNSHDLTYFAYLIKAQPDDPESQMACHVFRATDPSQVPDVISSIRQLSKAAMKEDAKPSKDNEDAFYNSQKFEVLYCGKVTVTHKKAPSSLIDDCMEKFSLHEQQRLKIQGEQRGPDPGEDLADLEVVVPGSPGDCLPEEADGTDTHLGLPAGASQPALTSSRVCFPERILEDSGFDEQQEFRSRCSSVTGVQRRVHEGSQKSQPRRRHASAPSHVQPSDSEKNRTMLFQVGRFEINLISPDTKSVVLEKNFKDISSCSQGIKHVDHFGFICRESPEPGLSQYICYVFQCASESLVDEVMLTLKQAFSTAAALQSAKTQIKLCEACPMHSLHKLCERIEGLYPPRAKLVIQRHLSSLTDNEQADIFERVQKMKPVSDQEENELVILHLRQLCEAKQKTHVHIGEGPSTISNSTIPENATSSGRFKLDILKNKAKRSLTSSLENIFSRGANRMRGRLGSVDSFERSNSLASEKDYSPGDSPPGTPPASPPSSAWQTFPEEDSDSPQFRRRAHTFSHPPSSTKRKLNLQDGRAQGVRSPLLRQSSSEQCSNLSSVRRMYKESNSSSSLPSLHTSFSAPSFTAPSFLKSFYQNSGRLSPQYENEIRQDTASESSDGEGRKRTSSTCSNESLSVGGTSVTPRRISWRQRIFLRVASPMNKSPSAMQQQDGLDRNELLPLSPLSPTMEEEPLVIFLSGEDDPEKIEERKKSKELRSLWRKAIHQQILLLRMEKENQKLEVASRDELQSRKVKLDYEEVGACQKEVLITWDKKLLNCRAKIRCDMEDIHTLLKEGVPKSRRGEIWQFLALQYRLRHRLPNKQQPPDISYKELLKQLTAQQHAILVDLGRTFPTHPYFSVQLGPGQLSLFNLLKAYSLLDKEVGYCQGISFVAGVLLLHMSEEQAFEMLKFLMYDLGFRKQYRPDMMSLQIQMYQLSRLLHDYHRDLYNHLEENEISPSLYAAPWFLTLFASQFSLGFVARVFDIIFLQGTEVIFKVALSLLSSQETLIMECESFENIVEFLKNTLPDMNTSEMEKIITQVFEMDISKQLHAYEVEYHVLQDELQESSYSCEDSETLEKLERANSQLKRQNMDLLEKLQVAHTKIQALESNLENLLTRETKMKSLIRTLEQEKMAYQKTVEQLRKLLPADALVNCDLLLRDLNCNPNNKAKIGNKP

SEQ ID NO: 841634 - protein, 1299 aa, Homo sapiens; identical to SEQ ID NO: 841633

SEQ ID NO: 841635 - protein, 1055 aa, Homo sapiens
MKEDAKPSKDNEDAFYNSQKFEVLYCGKVTVTHKKAPSSLIDDCMEKFSLHEQQRLKIQGEQRGPDPGEDLADLEVVVPGSPGDCLPEEADGTDTHLGLPAGASQPALTSSRVCFPERILEDSGFDEQQEFRSRCSSVTGVQRRVHEGSQKSQPRRRHASAPSHVQPSDSEKNRTMLFQVGRFEINLISPDTKSVVLEKNFKDISSCSQGIKHVDHFGFICRESPEPGLSQYICYVFQCASESLVDEVMLTLKQAFSTAAALQSAKTQIKLCEACPMHSLHKLCERIEGLYPPRAKLVIQRHLSSLTDNEQADIFERVQKMKPVSDQEENELVILHLRQLCEAKQKTHVHIGEGPSTISNSTIPENATSSGRFKLDILKNKAKRSLTSSLENIFSRGANRMRGRLGSVDSFERSNSLASEKDYSPGDSPPGTPPASPPSSAWQTFPEEDSDSPQFRRRAHTFSHPPSSTKRKLNLQDGRAQGVRSPLLRQSSSEQCSDGEGRKRTSSTCSNESLSVGGTSVTPRRISWRQRIFLRVASPMNKSPSAMQQQDGLDRNELLPLSPLSPTMEEEPLVIFLSGEDDPEKIEERKKSKELRSLWRKAIHQQILLLRMEKENQKLEVASRDELQSRKVKLDYEEVGACQKEVLITWDKKLLNCRAKIRCDMEDIHTLLKEGVPKSRRGEIWQFLALQYRLRHRLPNKQQPPDISYKELLKQLTAQQHAILVDLGRTFPTHPYFSVQLGPGQLSLFNLLKAYSLLDKEVGYCQGISFVAGVLLLHMSEEQAFEMLKFLMYDLGFRKQYRPDMMSLQIQMYQLSRLLHDYHRDLYNHLEENEISPSLYAAPWFLTLFASQFSLGFVARVFDIIFLQGTEVIFKVALSLLSSQETLIMECESFENIVEFLKNTLPDMNTSEMEKIITQVFEMDISKQLHAYEVEYHVLQDELQESSYSCEDSETLEKLERANSQLKRQNMDLLEKLQVAHTKIQALESNLENLLTRETKMKSLIRTLEQEKMAYQKTVEQLRKLLPADALVNCDLLLRDLNCNPNNKAKIGNKP

SEQ ID NO: 841636 - protein, 509 aa, Homo sapiens; identical to SEQ ID NO: 841630

SEQ ID NO: 841637 - protein, 57 aa, Homo sapiens
GDGLQLEYEMVLTNGKSFWTRHFSADEFGILETDVTFLLIFILIFFLSCYFGCESGT

SEQ ID NO: 841638 - protein, 57 aa, Homo sapiens
RLRIFWHQKALSKHREEERKKMKSGVQIKVLSLEDRQDILWDRREGEKAGEHADNTR

SEQ ID NO: 841639 - protein, 120 aa, Homo sapiens
MLLLLLAEHPSVMSTPSSPFLKSPSHFDLNAQCSFLRGSLFLASLLTLALTEQRHPYVSPESNSNHSLLELYQRLQARVPWAISSIFLSAPVLGPLGLGSSVLASCPPTLGIPIFTPYSV

SEQ ID NO: 841640 - protein, 1212 aa, Homo sapiens
AAMAAAAGAAAAAAAEGEAPAEMGALLLEKETRGATERVHGSLGDTPRSEETLPKATPDSLEPAGPSSPASVTVTVGDEGADTPVGATPLIGDESENLEGDGDLRGGRILLGHATKSFPSSPSKGGSCPSRAKMSMTGAGKSPPSVQSLAMRLLSMPGAQGAAAAGSEPPPATTSPEGQPKVHRARKTMSKPGNGQPPVPEKRPPEIQHFRMSDDVHSLGKVTSDLAKRRKLNSGGGLSEELGSARRSGEVTLTKGDPGSLEEWETVVGDDFSLYYDSYSVDERVDSDSKSEVEALTEQLSEEEEEEEEEEEEEEEEEEEEEEEEDEESGNQSDRSGSSGRRKAKKKWRKDSPWVKPSRKRRKREPPRAKEPRGVNGVGSSGPSEYMEVPLGSLELPSEGTLSPNHAGVSNDTSSLETERGFEELPLCSCRMEAPKIDRISERAGHKCMATESVDGELSGCNAAILKRETMRPSSRVALMVLCETHRARMVKHHCCPGCGYFCTAGTFLECHPDFRVAHRFHKACVSQLNGMVFCPHCGEDASEAQEVTIPRGDGVTPPAGTAAPAPPPLSQDVPGRADTSQPSARMRGHGEPRRPPCDPLADTIDSSGPSLTLPNGGCLSAVGLPLGPGREALEKALVIQESERRKKLRFHPRQLYLSVKQGELQKVILMLLDNLDPNFQSDQQSKRTPLHAAAQKGSVEICHVLLQAGANINAVDKQQRTPLMEAVVNNHLEVARYMVQRGGCVYSKEEDGSTCLHHAAKIGNLEMVSLLLSTGQVDVNAQDSGGWTPIIWAAEHKHIEVIRMLLTRGADVTLTDNEENICLHWASFTGSAAIAEVLLNARCDLHAVNYHGDTPLHIAARESYHDCVLLFLSRGANPELRNKEGDTAWDLTPERSDVWFALQLNRKLRLGVGNRAIRTEKIICRDVARGYENVPIPCVNGVDGEPCPEDYKYISENCETSTMNIDRNITHLQHCTCVDDCSSSNCLCGQLSIRCWYDKDGRLLQEFNKIEPPLIFECNQACSCWRNCKNRVVQSGIKVRLQLYRTAKMGWGVRALQTIPQGTFICEYVGELISDAEADVREDDSYLFDLDNKDGEVYCIDARYYGNISRFINHLCDPNIIPVRVFMLHQDLRFPRIAFFSSRDIRTGEELGFDYGDRFWDIKSKYFTCQCGSEKCKHSAEAIALEQSRLARLDPHPELLPELGSLPPVNT

SEQ ID NO: 841641 - protein, 1178 aa, Homo sapiens
AAMAAAAGAAAAAAAEGEAPAEMGALLLEKETRGATERVHGSLGDTPRSEETLPKATPDSLEPAGPSSPASVTVTVGDEGADTPVGATPLIGDESENLEGDGDLRGGRILLGHATKSFPSSPSKGGSCPSRAKMSMTGAGKSPPSVQSLAMRLLSMPGAQGAAAAGSEPPPATTSPEGQPKVHRARKTMSKPGNGQPPVPEKRPPEIQHFRMSDDVHSLGKVTSDLAKRRKLNSGGGLSEELGSARRSGEVTLTKGDPGSLEEWETVVGDDFSLYYDSYSVDERVDSDSKSEVEALTEQLSEEEEEEEEEEEEEEEEEEEEEEEEDEESGNQSDRSGSSGRRKAKKKWRKDSPWVKPSRKRRKREPPRAKEPRGVSNDTSSLETERGFEELPLCSCRMEAPKIDRISERAGHKCMATESVDGELSGCNAAILKRETMRPSSRVALMVLCETHRARMVKHHCCPGCGYFCTAGTFLECHPDFRVAHRFHKACVSQLNGMVFCPHCGEDASEAQEVTIPRGDGVTPPAGTAAPAPPPLSQDVPGRADTSQPSARMRGHGEPRRPPCDPLADTIDSSGPSLTLPNGGCLSAVGLPLGPGREALEKALVIQESERRKKLRFHPRQLYLSVKQGELQKVILMLLDNLDPNFQSDQQSKRTPLHAAAQKGSVEICHVLLQAGANINAVDKQQRTPLMEAVVNNHLEVARYMVQRGGCVYSKEEDGSTCLHHAAKIGNLEMVSLLLSTGQVDVNAQDSGGWTPIIWAAEHKHIEVIRMLLTRGADVTLTDNEENICLHWASFTGSAAIAEVLLNARCDLHAVNYHGDTPLHIAARESYHDCVLLFLSRGANPELRNKEGDTAWDLTPERSDVWFALQLNRKLRLGVGNRAIRTEKIICRDVARGYENVPIPCVNGVDGEPCPEDYKYISENCETSTMNIDRNITHLQHCTCVDDCSSSNCLCGQLSIRCWYDKDGRLLQEFNKIEPPLIFECNQACSCWRNCKNRVVQSGIKVRLQLYRTAKMGWGVRALQTIPQGTFICEYVGELISDAEADVREDDSYLFDLDNKDGEVYCIDARYYGNISRFINHLCDPNIIPVRVFMLHQDLRFPRIAFFSSRDIRTGEELGFDYGDRFWDIKSKYFTCQCGSEKCKHSAEAIALEQSRLARLDPHPELLPELGSLPPVNT

SEQ ID NO: 841642 - protein, 1212 aa, Homo sapiens; identical to SEQ ID NO: 841640

SEQ ID NO: 841643 - protein, 1212 aa, Homo sapiens; identical to SEQ ID NO: 841640

SEQ ID NO: 841644 - protein, 1241 aa, Homo sapiens
AAMAAAAGAAAAAAAEGEAPAEMGALLLEKETRGATERVHGSLGDTPRSEETLPKATPDSLEPAGPSSPASVTVTVGDEGADTPVGATPLIGDESENLEGDGDLRGGRILLGHATKSFPSSPSKGGSCPSRAKMSMTGAGKSPPSVQSLAMRLLSMPGAQGAAAAGSEPPPATTSPEGQPKVHRARKTMSKPGNGQPPVPEKRPPEIQHFRMSDDVHSLGKVTSDLAKRRKLNSGGGLSEELGSARRSGEVTLTKGDPGSLEEWETVVGDDFSLYYDSYSVDERVDSDSKSEVEALTEQLSEEEEEEEEEEEEEEEEEEEEEEEEDEESGNQSDRSGSSGRRKAKKKWRKDSPWVKPSRKRRKREPPRAKEPRGVNGVGSSGPSEYMEVPLGSLELPSEGTLSPNHAGVSNDTSSLETERGFEELPLCSCRMEAPKIDRISERAGHKCMATESVDGELSGCNAAILKRETMRPSSRVALMVLCETHRARMVKHHCCPGCGYFCTAGTFLECHPDFRVAHRFHKACVSQLNGMVFCPHCGEDASEAQEVTIPRGDGVTPPAGTAAPAPPPLSQDVPGRADTSQPSARMRGHGEPRRPPCDPLADTIDSSGPSLTLPNGGCLSAVGLPLGPGREALEKALVIQESERRKKLRFHPRQLYLSVKQGELQKVILMLLDNLDPNFQSDQQSKRTPLHAAAQKGSVEICHVLLQAGANINAVDKQQRTPLMEAVVNNHLEVARYMVQRGGCVYSKEEDGSTCLHHAAKIGNLEMVSLLLSTGQVDVNAQDSGGWTPIIWAAEHKHIEVIRMLLTRGADVTLTDNEENICLHWASFTGSAAIAEVLLNARCDLHAVNYHGDTPLHIAARESYHDCVLWSPCPALDDPCPHFLQPQTLHWASCPLFRLFLSRGANPELRNKEGDTAWDLTPERSDVWFALQLNRKLRLGVGNRAIRTEKIICRDVARGYENVPIPCVNGVDGEPCPEDYKYISENCETSTMNIDRNITHLQHCTCVDDCSSSNCLCGQLSIRCWYDKDGRLLQEFNKIEPPLIFECNQACSCWRNCKNRVVQSGIKVRLQLYRTAKMGWGVRALQTIPQGTFICEYVGELISDAEADVREDDSYLFDLDNKDGEVYCIDARYYGNISRFINHLCDPNIIPVRVFMLHQDLRFPRIAFFSSRDIRTGEELGFDYGDRFWDIKSKYFTCQCGSEKCKHSAEAIALEQSRLARLDPHPELLPELGSLPPVNT

SEQ ID NO: 841645 - protein, 1038 aa, Homo sapiens
TGTTGPAECFKSARGMSNQEMDPPVPEKRPPEIQHFRMSDDVHSLGKVTSDLAKRRKLNSGGGLSEELGSARRSGEVTLTKGDPGSLEEWETVVGDDFSLYYDSYSVDERVDSDSKSEVEALTEQLSEEEEEEEEEEEEEEEEEEEEEEEEDEESGNQSDRSGSSGRRKAKKKWRKDSPWVKPSRKRRKREPPRAKEPRGVNGVGSSGPSEYMEVPLGSLELPSEGTLSPNHAGVSNDTSSLETERGFEELPLCSCRMEAPKIDRISERAGHKCMATESVDGELSGCNAAILKRETMRPSSRVALMVLCETHRARMVKHHCCPGCGYFCTAGTFLECHPDFRVAHRFHKACVSQLNGMVFCPHCGEDASEAQEVTIPRGDGVTPPAGTAAPAPPPLSQDVPGRADTSQPSARMRGHGEPRRPPCDPLADTIDSSGPSLTLPNGGCLSAVGLPLGPGREALEKALVIQESERRKKLRFHPRQLYLSVKQGELQKVILMLLDNLDPNFQSDQQSKRTPLHAAAQKGSVEICHVLLQAGANINAVDKQQRTPLMEAVVNNHLEVARYMVQRGGCVYSKEEDGSTCLHHAAKIGNLEMVSLLLSTGQVDVNAQDSGGWTPIIWAAEHKHIEVIRMLLTRGADVTLTDNEENICLHWASFTGSAAIAEVLLNARCDLHAVNYHGDTPLHIAARESYHDCVLLFLSRGANPELRNKEGDTAWDLTPERSDVWFALQLNRKLRLGVGNRAIRTEKIICRDVARGYENVPIPCVNGVDGEPCPEDYKYISENCETSTMNIDRNITHLQHCTCVDDCSSSNCLCGQLSIRCWYDKDGRLLQEFNKIEPPLIFECNQACSCWRNCKNRVVQSGIKVRLQLYRTAKMGWGVRALQTIPQGTFICEYVGELISDAEADVREDDSYLFDLDNKDGEVYCIDARYYGNISRFINHLCDPNIIPVRVFMLHQDLRFPRIAFFSSRDIRTGEELGFDYGDRFWDIKSKYFTCQCGSEKCKHSAEAIALEQSRLARLDPHPELLPELGSLPPVNT

SEQ ID NO: 841646 - protein, 437 aa, Homo sapiens
MLLTRGADVTLTDNEENICLHWASFTGSAAIAEVLLNARCDLHAVNYHGDTPLHIAARESYHDCVLCSPCPALDDPCPHFLQPQTLHWASCPLFRLFLSRGANPELRNKEGDTAWDLTPERSDVWFALQLNRKLRLGVGNRAIRTEKIICRDVARGYENVPIPCVNGVDGEPCPEDYKYISENCETSTMNIDRNITHLQHCTCVDDCSSSNCLCGQLSIRCWYDKDGRLLQEFNKIEPPLIFECNQACSCWRNCKNRVVQSGIKVRLQLYRTAKMGWGVRALQTIPQGTFICEYVGELISDAEADVREDDSYLFDLDNKDGEVYCIDARYYGNISRFINHLCDPNIIPVRVFMLHQDLRFPRIAFFSSRDIRTGEELGFDYGDRFWDIKSKYFTCQCGSEKCKHSAEAIALEQSRLARLDPHPELLPELGSLPPVNT

SEQ ID NO: 841647 - protein, 258 aa, Homo sapiens
  misc_feature (11)..(11): Xaa can be any naturally occurring amino acid
  misc_feature (23)..(23): Xaa can be any naturally occurring amino acid
  misc_feature (25)..(26): Xaa can be any naturally occurring amino acid
  misc_feature (28)..(28): Xaa can be any naturally occurring amino acid
PEIKYFQRCKXHLNLMQLTTCRXNXXTXVCSNCLCGQLSIRCWYDKDGRLLQEFNKIEPPLIFECNQACSCWRNCKNRVVQSGIKVRLQLYRTAKMGWGVRALQTIPQGTFICEYVGELISDAEADVREDDSYLFDLDNKDGEVYCIDARYYGNISRFINHLCDPNIIPVRVFMLHQDLRFPRIAFFSSRDIRTGEELGFDYGDRFWDIKSKYFTCQCGSEKCKHSAEAIALEQSRLARLDPHPELLPELGSLPPVNT

SEQ ID NO: 841648 - protein, 815 aa, Homo sapiens
AAMAAAAGAAAAAAAEGEAPAEMGALLLEKETRGATERVHGSLGDTPRSEETLPKATPDSLEPAGPSSPASVTVTVGDEGADTPVGATPLIGDESENLEGDGDLRGGRILLGHATKSFPSSPSKGGSCPSRAKMSMTGAGKSPPSVQSLAMRLLSMPGAQGAAAAGSEPPPATTSPEGQPKVHRARKTMSKPGNGQPPVPEKRPPEIQHFRMSDDVHSLGKVTSDLAKRRKLNSGGGLSEELGSARRSGEVTLTKGDPGSLEEWETVVGDDFSLYYDSYSVDERVDSDSKSEVEALTEQLSEEEEEEEEEEEEEEEEEEEEEEEEDEESGNQSDRSGSSGRRKAKKKWRKDSPWVKPSRKRRKREPPRAKEPRGVNGVGSSGPSEYMEVPLGSLELPSEGTLSPNHAGVSNDTSSLETERGFEELPLCSCRMEAPKIDRISERAGHKCMATESVDGELSGCNAAILKRETMRPSSRVALMVLCETHRARMVKHHCCPGCGYFCTAGTFLECHPDFRVAHRFHKACVSQLNGMVFCPHCGEDASEAQEVTIPRGDGVTPPAGTAAPAPPPLSQDVPGRADTSQPSARMRGHGEPRRPPCDPLADTIDSSGPSLTLPNGGCLSAVGLPLGPGREALEKALVIQESERRKKLRFHPRQLYLSVKQGELQKVILMLLDNLDPNFQSDQQSKRTPLHAAAQKGSVEICHVLLQAGANINAVDKQQRTPLMEAVVNNHLEVARYMVQRGGCVYSKEEDGSTCLHHAAKIGNLEMVSLLLSTGQVDVNAQLLAAHAWGCCHLLSPPPFHTFLTRDPSQALEV

SEQ ID NO: 841649 - protein, 372 aa, Homo sapiens
MAAAAGAAAAAAAEGEAPAEMGALLLEKETRGATERVHGSLGDTPRSEETLPKATPDSLEPAGPSSPASVTVTVGDEGADTPVGATPLIGDESENLEGDGDLRGGRILLGHATKSFPSSPSKGGSCPSRAKMSMTGAGKSPPSVQSLAMRLLSMPGAQGAAAAGSEPPPATTSPEGQPKVHRARKTMSKPGNGQPPVPEKRPPEIQHFRMSDDVHSLGKVTSDLAKRRKLNSGGGLSEELGSARRSGEVTLTKGDPGSLEEWETVVGDDFSLYYDSYSVDERVDSDSKSEVEALTEQLSEEEEEEEEEEEEEEEEEEEEEEEEDEESGNQSDRSGSSGRRKAKKKWRKDSPWVKPSRKRRKREPPRAKEPRE

SEQ ID NO: 841650 - protein, 206 aa, Homo sapiens
AAMAAAAGAAAAAAAEGEAPAEMGALLLEKETRGATERVHGSLGDTPRSEETLPKATPDSLEPAGPSSPASVTVTVGDEGADTPVGATPLIGDESENLEGDGDLRGGRILLGHATKSFPSSPSKGGSCPSRAKMSMTGAGKSPPSVQSLAMRLLSMPGAQGAAAAGSEPPPATTSPEGQPKVHRARKTMSKPGNGQHTKTPSLKEV

SEQ ID NO: 841651 - protein, 73 aa, Homo sapiens
EDPPGVPVGEVQSLPQLLFSSIQGVSNDTSSLETERGFEELPLCSCRMEAPKIDRISERAGHKCMATESVDGE

SEQ ID NO: 841652 - protein, 1212 aa, Homo sapiens; identical to SEQ ID NO: 841640

SEQ ID NO: 841653 - protein, 1225 aa, Homo sapiens
AAMAAAAGAAAAAAAEGEAPAEMGALLLEKETRGATERVHGSLGDTPRSEETLPKATPDSLEPAGPSSPASVTVTVGDEGADTPVGATPLIGDESENLEGDGDLRGGRILLGHATKSFPSSPSKGGSCPSRAKMSMTGAGKSPPSVQSLAMRLLSMPGAQGAAAAGSEPPPATTSPEGQPKVHRARKTMSKPGNGQPPVPEKRPPEIQHFRMSDDVHSLGKVTSDLAKRRKLNSGGGLSEELGSARRSGEVTLTKGDPGSLEEWETVVGDDFSLYYDSYSVDERVDSDSKSEVEALTEQLSEEEEEEEEEEEEEEEEEEEEEEEEDEESGNQSDRSGSSGRRKAKKKWRKDSPWVKPSRKRRKREPPRAKEPRGVNGVGSSGPSEYMEVPLGSLELPSEGTLSPNHAGVSNDTSSLETERGFEELPLCSCRMEAPKIDRISERAGHKCMATESVDGELSGCNAAILKRETMRPSSRVALMVLCETHRARMVKHHCCPGCGYFCTAGTFLECHPDFRVAHRFHKACVSQLNGMVFCPHCGEDASEAQEVTIPRGDGVTPPAGTAAPAPPPLSQDVPGRADTSQPSARMRGHGEPRRPPCDPLADTIDSSGPSLTLPNGGCLSAVGLPLGPGREALEKALVIQESERRKKLRFHPRQLYLSVKQGELQKVILMLLDNLDPNFQSDQQSKRTPLHAAAQKGSVEICHVLLQAGANINAVDKQQRTPLMEAVVNNHLEVARYMVQRGGCVYSKEEDGSTCLHHAAKIGNLEMVSLLLSTGQVDVNAQGQLPPPSLPSHPQDSGGWTPIIWAAEHKHIEVIRMLLTRGADVTLTDNEENICLHWASFTGSAAIAEVLLNARCDLHAVNYHGDTPLHIAARESYHDCVLLFLSRGANPELRNKEGDTAWDLTPERSDVWFALQLNRKLRLGVGNRAIRTEKIICRDVARGYENVPIPCVNGVDGEPCPEDYKYISENCETSTMNIDRNITHLQHCTCVDDCSSSNCLCGQLSIRCWYDKDGRLLQEFNKIEPPLIFECNQACSCWRNCKNRVVQSGIKVRLQLYRTAKMGWGVRALQTIPQGTFICEYVGELISDAEADVREDDSYLFDLDNKDGEVYCIDARYYGNISRFINHLCDPNIIPVRVFMLHQDLRFPRIAFFSSRDIRTGEELGFDYGDRFWDIKSKYFTCQCGSEKCKHSAEAIALEQSRLARLDPHPELLPELGSLPPVNT

SEQ ID NO: 841654 - protein, 1242 aa, Homo sapiens
MAAAAGAAAAAAAEGEAPAEMGALLLEKETRGATERVHGSLGDTPRSEETLPKATPDSLEPAGPSSPASVTVTVGDEGADTPVGATPLIGDESENLEGDGDLRGGRILLGHATKSFPSSPSKGGSCPSRAKMSMTGAGKSPPSVQSLAMRLLSMPGAQGAAAAGSEPPPATTSPEGQPKVHRARKTMSKPGNGQPPVPEKRPPEIQHFRMSDDVHSLGKVTSDLAKRRKLNSGGGLSEELGSARRSGEVTLTKGDPGSLEEWETVVGDDFSLYYDSYSVDERVDSDSKSEVEALTEQLSEEEEEEEEEEEEEEEEEEEEEEEEDEESGNQSDRSGSSGRRKAKKKWRKDSPWVKPSRKRRKREPPRAKEPRGVNGVGSSGPSEYMEVPLGSLELPSEGTLSPNHAGVSNDTSSLETERGFEELPLCSCRMEAPKIDRISERAGHKCMATESVDGELSGCNAAILKRETMRPSSRVALMVLCETHRARMVKHHCCPGCGYFCTAGTFLECHPDFRVAHRFHKACVSQLNGMVFCPHCGEDASEAQEVTIPRGDGVTPPAGTAAPAPPPLSQDVPGRADTSQPSARMRGHGEPRRPPCDPLADTIDSSGPSLTLPNGGCLSAVGLPLGPGREALEKALVIQESERRKKLRFHPRQLYLSVKQGELQKVILMLLDNLDPNFQSDQQSKRTPLHAAAQKGSVEICHVLLQVSTGPAPCLIHQALRPSPAPCLPGASPPAPSQAGANINAVDKQQRTPLMEAVVNNHLEVARYMVQRGGCVYSKEEDGSTCLHHAAKIGNLEMVSLLLSTGQVDVNAQDSGGWTPIIWAAEHKHIEVIRMLLTRGADVTLTDNEENICLHWASFTGSAAIAEVLLNARCDLHAVNYHGDTPLHIAARESYHDCVLLFLSRGANPELRNKEGDTAWDLTPERSDVWFALQLNRKLRLGVGNRAIRTEKIICRDVARGYENVPIPCVNGVDGEPCPEDYKYISENCETSTMNIDRNITHLQHCTCVDDCSSSNCLCGQLSIRCWYDKDGRLLQEFNKIEPPLIFECNQACSCWRNCKNRVVQSGIKVRLQLYRTAKMGWGVRALQTIPQGTFICEYVGELISDAEADVREDDSYLFDLDNKDGEVYCIDARYYGNISRFINHLCDPNIIPVRVFMLHQDLRFPRIAFFSSRDIRTGEELGFDYGDRFWDIKSKYFTCQCGSEKCKHSAEAIALEQSRLARLDPHPELLPELGSLPPVNT

SEQ ID NO: 841655 - protein, 1219 aa, Homo sapiens
AAMAAAAGAAAAAAAEGEAPAEMGALLLEKETRGATERVHGSLGDTPRSEETLPKATPDSLEPAGPSSPASVTVTVGDEGADTPVGATPLIGDESENLEGDGDLRGGRILLGHATKSFPSSPSKGGSCPSRAKMSMTGAGKSPPSVQSLAMRLLSMPGAQGAAAAGSEPPPATTSPEGQPKVHRARKTMSKPGNGQPPVPEKRPPEIQHFRMSDDVHSLGKVTSDLAKRRKLNSGGGLSEELGSARRSGEVTLTKGDPGSLEEWETVVGDDFSLYYDSYSVDERVDSDSKSEVEALTEQLSEEEEEEEEEEEEEEEEEEEEEEEEDEESGNQSDRSGSSGRRKAKKKWRKDSPWVKPSRKRRKREPPRAKEPRGVNGVGSSGPSEYMEVPLGSLELPSEGTLSPNHAGVSNDTSSLETERGFEELPLCSCRMEAPKIDRISERAGHKCMATESVDGELSGCNAAILKRETMRPSSRVALMVLCETHRARMVKHHCCPGCGYFCTAGTFLECHPDFRVAHRFHKACVSQLNGMVFCPHCGEDASEAQEVTIPRGDGVTPPAGTAAPAPPPLSQDVPGRADTSQPSARMRGHGEPRRPPCDPLADTIDSSGPSLTLPNGGCLSAVGLPLGPGREALEKALVIQESERRKKLRFHPRQLYLSVKQGELQKVILMLLDNLDPNFQSDQQSKRTPLHAAAQKGSVEICHVLLQAGANINAVDKQQRTPLMEAVVNNHLEVARYMVQRGGCVYSKEEDGSTCLHHAAKIGNLEMVSLLLSTGQVDVNAQDSGGWTPIIWAAEHKHIEVIRMLLTRGADVTLTDNVSERLVEEENICLHWASFTGSAAIAEVLLNARCDLHAVNYHGDTPLHIAARESYHDCVLLFLSRGANPELRNKEGDTAWDLTPERSDVWFALQLNRKLRLGVGNRAIRTEKIICRDVARGYENVPIPCVNGVDGEPCPEDYKYISENCETSTMNIDRNITHLQHCTCVDDCSSSNCLCGQLSIRCWYDKDGRLLQEFNKIEPPLIFECNQACSCWRNCKNRVVQSGIKVRLQLYRTAKMGWGVRALQTIPQGTFICEYVGELISDAEADVREDDSYLFDLDNKDGEVYCIDARYYGNISRFINHLCDPNIIPVRVFMLHQDLRFPRIAFFSSRDIRTGEELGFDYGDRFWDIKSKYFTCQCGSEKCKHSAEAIALEQSRLARLDPHPELLPELGSLPPVNT

SEQ ID NO: 841656 - protein, 866 aa, Homo sapiens
VEGLALVGRRLTGDLGVRNQSDRSGSSGRRKAKKKWRKDSPWVKPSRKRRKREPPRAKEPRGVSNDTSSLETERGFEELPLCSCRMEAPKIDRISERAGHKCMATESVDGELSGCNAAILKRETMRPSSRVALMVLCETHRARMVKHHCCPGCGYFCTAGTFLECHPDFRVAHRFHKACVSQLNGMVFCPHCGEDASEAQEVTIPRGDGVTPPAGTAAPAPPPLSQDVPGRADTSQPSARMRGHGEPRRPPCDPLADTIDSSGPSLTLPNGGCLSAVGLPLGPGREALEKALVIQESERRKKLRFHPRQLYLSVKQGELQKVILMLLDNLDPNFQSDQQSKRTPLHAAAQKGSVEICHVLLQAGANINAVDKQQRTPLMEAVVNNHLEVARYMVQRGGCVYSKEEDGSTCLHHAAKIGNLEMVSLLLSTGQVDVNAQDSGGWTPIIWAAEHKHIEVIRMLLTRGADVTLTDNEENICLHWASFTGSAAIAEVLLNARCDLHAVNYHGDTPLHIAARESYHDCVLLFLSRGANPELRNKEGDTAWDLTPERSDVWFALQLNRKLRLGVGNRAIRTEKIICRDVARGYENVPIPCVNGVDGEPCPEDYKYISENCETSTMNIDRNITHLQHCTCVDDCSSSNCLCGQLSIRCWYDKDGRLLQEFNKIEPPLIFECNQACSCWRNCKNRVVQSGIKVRLQLYRTAKMGWGVRALQTIPQGTFICEYVGELISDAEADVREDDSYLFDLDNKDGEVYCIDARYYGNISRFINHLCDPNIIPVRVFMLHQDLRFPRIAFFSSRDIRTGEELGFDYGDRFWDIKSKYFTCQCGSEKCKHSAEAIALEQSRLARLDPHPELLPELGSLPPVNT

SEQ ID NO: 841657 - protein, 270 aa, Homo sapiens
MVDLQGLDCYKYISENCETSTMNIDRNITHLQHCTCVDDCSSSNCLCGQLSIRCWYDKDGRLLQEFNKIEPPLIFECNQACSCWRNCKNRVVQSGIKVRLQLYRTAKMGWGVRALQTIPQGTFICEYVGELISDAEADVREDDSYLFDLDNKDGEVYCIDARYYGNISRFINHLCDPNIIPVRVFMLHQDLRFPRIAFFSSRDIRTGEELGFDYGDRFWDIKSKYFTCQCGSEKCKHSAEAIALEQSRLARLDPHPELLPELGSLPPVNT

SEQ ID NO: 841658 - protein, 861 aa, Homo sapiens
AAMAAAAGAAAAAAAEGEAPAEMGALLLEKETRGATERVHGSLGDTPRSEETLPKATPDSLEPAGPSSPASVTVTVGDEGADTPVGATPLIGDESENLEGDGDLRGGRILLGHATKSFPSSPSKGGSCPSRAKMSMTGAGKSPPSVQSLAMRLLSMPGAQGAAAAGSEPPPATTSPEGQPKVHRARKTMSKPGNGQPPVPEKRPPEIQHFRMSDDVHSLGKVTSDLAKRRKLNSGGGLSEELGSARRSGEVTLTKGDPGSLEEWETVVGDDFSLYYDSYSVDERVDSDSKSEVEALTEQLSEEEEEEEEEEEEEEEEEEEEEEEEDEESGNQSDRSGSSGRRKAKKKWRKDSPWVKPSRKRRKREPPRAKEPRGVNGVGSSGPSEYMEVPLGSLELPSEGTLSPNHAGVSNDTSSLETERGFEELPLCSCRMEAPKIDRISERAGHKCMATESVDGELSGCNAAILKRETMRPSSRVALMVLCETHRARMVKHHCCPGCGYFCTAGTFLECHPDFRVAHRFHKACVSQLNGMVFCPHCGEDASEAQEVTIPRGDGVTPPAGTAAPAPPPLSQDVPGRADTSQPSARMRGHGEPRRPPCDPLADTIDSSGPSLTLPNGGCLSAVGLPLGPGREALEKALVIQESERRKKLRFHPRQLYLSVKQGELQKVILMLLDNLDPNFQSDQQSKRTPLHAAAQKGSVEICHVLLQAGANINAVDKQQRTPLMEAVVNNHLEVARYMVQRGGCVYSKEEDGSTCLHHAAKIGNLEMVSLLLSTGQVDVNAQDSGGWTPIIWAAEHKHIEVIRMLLTRGADVTLTDNEENICLHWASFTGSAAIAEVLLNARCDLHAVNYHATPAGTELD

SEQ ID NO: 841659 - protein, 344 aa, Homo sapiens
AAMAAAAGAAAAAAAEGEAPAEMGALLLEKETRGATERVHGSLGDTPRSEETLPKATPDSLEPAGPSSPASVTVTVGDEGADTPVGATPLIGDESENLEGDGDLRGGRILLGHATKSFPSSPSKGGSCPSRAKMSMTGAGKSPPSVQSLAMRLLSMPGAQGAAAAGSEPPPATTSPEGQPKVHRARKTMSKPGNGQPPVPEKRPPEIQHFRMSDDVHSLGKVTSDLAKRRKLNSGGGLSEELGSARRSGEVTLTKGDPGSLEEWETVVGDDFSLYYDSYSVDERVDSDSKSEVEALTEQLSEEEEEEEEEEEEEEEEEEEEEAGSPLKTLFHTCTIGISSSCYC

SEQ ID NO: 841660 - protein, 204 aa, Homo sapiens
AAMAAAAGAAAAAAAEGEAPAEMGALLLEKETRGATERVHGSLGDTPRSEETLPKATPDSLEPAGPSSPASVTVTVGDEGADTPVGATPLIGDESENLEGDGDLRGGRILLGHATKSFPSSPSKGGSCPSRAKMSMTGAGKSPPSVQSLAMRLLSMPGAQGAAAAGSEPPPATTSPEGQPKVHRARKTMSKPGNGQVSGMGEMG

SEQ ID NO: 841661 - protein, 575 aa, Homo sapiens
RRSLPAAIAHWGSGRLGPAWGSCAAGLWVLAPPEPTGHLVIPGTSPLEPPCPWLDSHIFQCRFGKMLPLEKAFASPRSSPAPPDLPTPGSAAGVQQEEPETIPERTPADLEFSRLRFREFVYQEAAGPHQTLARLHELCRQWLMPEARSKEQMLELLVLEQFLGILPDKVRPWVVAQYPESCKKAASLVEGLADVLEEPGMLLGSPAGSSSILSDGVYERHMDPLLLPGELASPSQALGAGEIPAPSETPWLSPDPLFLEQRRVREAKTEEDGPANTEQKLKSFPEDPQHLGEWGHLDPAEENLKSYRKLLLWGYQLSQPDAASRLDTEELRLVERDPQGSSLPEGGRRQESAGCACEEAAPAGVLPELPTEAPPGDALADPPSGTTEEEEEQPGKAPDPQDPQDAESDSATGSQRQSVIQQPAPDRGTAKLGTKRPHPEDGDGQSLEGVSSSGDSAGLEAGQGPGADEPGLSRGKPYACGECGEAFAWLSHLMEHHSSHGGRKRYACQGCWKTFHFSLALAEHQKTHEKEKSYALGGARGPQPSTREAQAGARAGGPPESVEGEAPPAPPEAQR

SEQ ID NO: 841662 - protein, 510 aa, Homo sapiens
MLPLEKAFASPRSSPAPPDLPTPGSAAGVQQEEPETIPERTPADLEFSRLRFREFVYQEAAGPHQTLARLHELCRQWLMPEARSKEQMLELLVLEQFLGILPDKVRPWVVAQYPESCKKAASLVEGLADVLEEPGMLLGSPAGSSSILSDGVYERHMDPLLLPGELASPSQALGAGEIPAPSETPWLSPDPLFLEQRRVREAKTEEDGPANTEQKLKSFPEDPQHLGEWGHLDPAEENLKSYRKLLLWGYQLSQPDAASRLDTEELRLVERDPQGSSLPEGGRRQESAGCACEEAAPAGVLPELPTEAPPGDALADPPSGTTEEEEEQPGKAPDPQDPQDAESDSATGSQRQSVIQQPAPDRGTAKLGTKRPHPEDGDGQSLEGVSSSGDSAGLEAGQGPGADEPGLSRGKPYACGECGEAFAWLSHLMEHHSSHGGRKRYACQGCWKTFHFSLALAEHQKTHEKEKSYALGGARGPQPSTREAQAGARAGGPPESVEGEAPPAPPEAQR

SEQ ID NO: 841663 - protein, 352 aa, Homo sapiens
RRSLPAAIAHWGSGRLGPAWGSCAAGLWVLAPPEPTGHLVIPGTSPLEPPCPWLDSHIFQCRFGKMLPLEKAFASPRSSPAPPDLPTPGSAAGVQQEEPETIPERTPADLEFSRLRFREFVYQEAAGPHQTLARLHELCRQWLMPEARSKEQMLELLVLEQFLGILPDKVRPWVVAQYPESCKKAASLVEGLADVLEEPGMLLGSPAGSSSILSDGVYERHMDPLLLPGELASPSQALGAGEIPAPSETPWLSPDPLFLEQRRVREAKTEEDGPANTEQKLKSFPEDPQHLGEWGHLDPAEENLKSYRKLLLWGYQLSQPDAASRLDTEELRLVERDPQGSSLPGEVGLNWC

SEQ ID NO: 841664 - protein, 314 aa, Homo sapiens
RRSLPAAIAHWGSGRLGPAWGSCAAGLWVLAPPEPTGHLVIPGTSPLEPPCPWLDSHIFQCRFGKMLPLEKAFASPRSSPAPPDLPTPGSAAGVQQEEPETIPERTPADLEFSRLRFREFVYQEAAGPHQTLARLHELCRQWLMPEARSKEQMLELLVLEQFLGILPDKVRPWVVAQYPESCKKAASLVEGLADVLEEPGMLLGSPAGSSSILSDGVYERHMDPLLLPGELASPSQALGAGEIPAPSETPWLSPDPLFLEQRRVREAKTEEDGPANTEQGISFPSLTLPPGWTLRNSGWWKEIHKEAASQVRLG

SEQ ID NO: 841665 - protein, 288 aa, Homo sapiens
MRCRAAWEGQRCFQTAVSPAGIQSPEPCALFRQLRLGWVLLSLALGGALTQGSDLVPEGGRRQESAGCACEEAAPAGVLPELPTEAPPGDALADPPSGTTEEEEEQPGKAPDPQDPQDAESDSATGSQRQSVIQQPAPDRGTAKLGTKRPHPEDGDGQSLEGVSSSGDSAGLEAGQGPGADEPGLSRGKPYACGECGEAFAWLSHLMEHHSSHGGRKRYACQGCWKTFHFSLALAEHQKTHEKEKSYALGGARGPQPSTREAQAGARAGGPPESVEGEAPPAPPEAQR

SEQ ID NO: 841666 - protein, 575 aa, Homo sapiens; identical to SEQ ID NO: 841661

SEQ ID NO: 841667 - protein, 575 aa, Homo sapiens; identical to SEQ ID NO: 841661

SEQ ID NO: 841668 - protein, 288 aa, Homo sapiens; identical to SEQ ID NO: 841665

SEQ ID NO: 841669 - protein, 245 aa, Homo sapiens
MALSVSSAGLWVLAPPEPTGHLVIPGTSPLEPPCPWLDSHIFQCRFGKMLPLEKAFASPRSSPAPPDLPTPGSAAGVQQEEPETIPERTPADLEFSRLRFREFVYQEAAGPHQTLARLHELCRQWLMPEARSKEQMLELLVLEQFLGILPDKVRPWVVAQYPESCKKAASLVEGLADVLEEPGMLLGSPAGSSSILSDGVYERHMDPLLLPGELASPSQALGAGEIPAPSETRECPASLAASAGP

SEQ ID NO: 841670 - protein, 510 aa, Homo sapiens; identical to SEQ ID NO: 841662

SEQ ID NO: 841671 - protein, 290 aa, Homo sapiens
DLKSYRKLLLWGYQLSQEQFPHRSSSGQGYQLSQPDAASRLDTEELRLVERDPQGSSLPEGGRRQESAGCACEEAAPAGVLPELPTEAPPGDALADPPSGTTEEEEEQPGKAPDPQDPQDAESDSATGSQRQSVIQQPAPDRGTAKLGTKRPHPEDGDGQSLEGVSSSGDSAGLEAGQGPGADEPGLSRGKPYACGECGEAFAWLSHLMEHHSSHGGRKRYACQGCWKTFHFSLALAEHQKTHEKEKSYALGGARGPQPSTREAQAGARAGGPPESVEGEAPPAPPEAQR

SEQ ID NO: 841672 - protein, 575 aa, Homo sapiens; identical to SEQ ID NO: 841661

SEQ ID NO: 841673 - protein, 262 aa, Homo sapiens
RRSLPAAIAHWGSGRLGPAWGSCAAGLWVLAPPEPTGHLVIPGTSPLEPPCPWLDSHIFQCRFGKMLPLEKAFASPRSSPAPPDLPTPGSAAGVQQEEPETIPERTPADLEFSRLRFREFVYQEAAGPHQTLARLHELCRQWLMPEARSKEQMLELLVLEQFLGILPDKVRPWVVAQYPESCKKAASLVEGLADVLEEPGMLLGSPAGSSSILSDGVYERHMDPLLLPGELASPSQALGAGEIPAPSETRECPASLAASAGP

SEQ ID NO: 841674 - protein, 189 aa, Homo sapiens
MATRRTGLSEGDGDKLKACEVSKNKDGKEQSETVSLSEDETFSWPGPKTVTLKRTSQGFGFTLRHFIVYPPESAIQFSYKDEENGNRGGKQRNRLEPMDTIFVKQVKEGGPAFEAGLCTGDRIIKVNGESVIGKTYSQVIALIQNSDTTLELSVMPKDEDILQVNLEFSTFYKNTIAKFLQLSDMEMLC

SEQ ID NO: 841675 - protein, 102 aa, Homo sapiens
MATRRTGLSEGDGDKLKACEVSKNKDGKEQSETVSLSEDETFSWPGPKTVTLKRTSQGFGFTLRHFIVYPPESAIQFSYKVREIVTARKTKKPLGTNGYHIC

SEQ ID NO: 841676 - protein, 189 aa, Homo sapiens
MATRRTGLSEGDGDKLKACEVSKNKDGKEQSETVSLSEDETFSWPGPKTVTLKRTSQGFGFTLRHFIVYPPESAIQFSYKDEENGNRGGKQRNRLEPMDTIFVKQVKEGGPAFEAGLCTGDRIIKVNGESVIGKTYSQVIALIQNSDTTLELSVMPKDEDILQVVSFIYSYMSCFTVMNVRKIFLRWKY

SEQ ID NO: 841677 - protein, 189 aa, Homo sapiens; identical to SEQ ID NO: 841676

SEQ ID NO: 841678 - protein, 189 aa, Homo sapiens; identical to SEQ ID NO: 841676

SEQ ID NO: 841679 - protein, 79 aa, Homo sapiens
AERVPAGPGARPASPLQLAAALRPPGPSGREGISLGADTRTFTTHSDFSRTQEWHWEEGDRFLQLASTLAAKKTCRLCF

SEQ ID NO: 841680 - protein, 107 aa, Homo sapiens [sequence omitted]

SEQ ID NO: 841681 - protein, 97 aa, Homo sapiens
SFGGLRGVRTWRAWSWDLIREALSAVGAYLVTVALRSGTDTASLSGPHPRGLPAPLGLAQWRGASTTVEERHTQGPGCARLSAAVGASGRPPMGLSF

SEQ ID NO: 841682 - protein, 123 aa, Homo sapiens
SSEQKEPPEEAEPVAAAEPEVPENNGNNSWPHNDTEIANSTPNPKPAASSPETPSAGQQEAKTDQADGPREPPQSARRKRSYKQAVSELDEEQHLEDEELQPPRSKTPSSPCPASKVSQAPAL

SEQ ID NO: 841683 - protein, 361 aa, Homo sapiens
SSEQKEPPEEAEPVAAAEPEVPENNGNNSWPHNDTEIANSTPNPKPAASSPETPSAGQQEAKTDQADGPREPPQSARRKRSYKQAVSELDEEQHLEDEELQPPRSKTPSSPCPASKVVRPLRTFLHTVQRNQMLMTPTSAPRSVMKSFIKRNTPLRMDPKEKERQRLENLRRKEEAEQLRRQKVEEDKRRRLEEVKLKREERLRKVLQARERVEQMKEEKKKQIEQKFAQIDEKTEKAKEERLAEEKAKKKAAAKKMEEVEARRKQEEEARRLRWWLQQEEEERRHQELLQKKKEEEQERLRKAAEAKRLAEQREQERREQERREQERREQERREQERREQERQLAEQERRREQERLQAER

SEQ ID NO: 841684 - protein, 150 aa, Homo sapiens [sequence omitted]

SEQ ID NO: 841685 - protein, 57 aa, Homo sapiens
QAFERNNLIGWFGSDVLLGSNQLWPKSGVMENKYGAKSYPVDRMDTSGEARSSGAVE

SEQ ID NO: 841686 - protein, 198 aa, Homo sapiens
GKKERKEEGRKERGRKEGGEGRRERGRKEGGKGRKGEGRGGEGEKKGKRTSGYQGTETIRSPSLGRCRGSQPGTPTPAGCAPPLSPHPSPSSRHPAVHCSRSTGAPRGPLLETRQPSTHPHSVSLHPLFDMGAGALLEIRVYLRGLKTWAVGGCEALGRESACPRVWGSEWSGATRSDPIKVTFLGDISIAGSQKGKG

SEQ ID NO: 841687 - protein, 122 aa, Homo sapiens
VVVVPLAVSVACLNSDCHMATALPLGPGASVRPTTREGGRSQGPFLTGPELNTCPSHHSGSPHWDCHSGASQSTPPLEGEREENAALSSHSLKQTPTTLSLGSKWLSVDSFSQLSPLTGLNH

SEQ ID NO: 841688 - protein, 122 aa, Homo sapiens; identical to SEQ ID NO: 841687

SEQ ID NO: 841689 - protein, 75 aa, Homo sapiens
VVALSRILTPQAAVGEQGGSSPDWEPRRLDWMTCQGSPQGPANFPGDLEHSLFLDLGFSTCGAEGPAGLRHPLWL

SEQ ID NO: 841690 - protein, 159 aa, Homo sapiens
GPQAEALSAPGLTPIPLPPLLQVRYKEEFEKNKGKGFSVVADTPELQRIKKTQDQISNVSSCPALRHPCCPLFGPLPASLADASLADVNEASASTTPALQGGPGEELGVPRCLFSVYPQTTSTHSIFFLKGLYSVGACVLNQPPLSLTVVLFSGYRGYR

SEQ ID NO: 841691 - protein, 309 aa, Homo sapiens
  misc_feature (14)..(14): Xaa can be any naturally occurring amino acid
NKKAQPFVHYAHGXSSRLVLRPGYRDMMTLNMKNYKGYEKKPYCNAHYPKQSFTMVADTPENLRLKQQSELQSQVRYKEEFEKNKGKGFSVVADTPELQRIKKTQDQISNIKYHEEFEKSRMGPSGGEGMEPERRDSQDGSSYRRPLEQQQPHHIPTSAPVYQQPQQQPVAQSYGGYKEPAAPVSIQRSAPGGGGKAGTGGGIDYKRRPTEGRRSYLSKGRVNTNRYNRGSSIRTTGLEWYRQPDGNRQHARTNGANPWHEDRTYSDGKAHTCETPQQRRPRKAGELSNERNTFSPPGEPFGTIPGDPL

SEQ ID NO: 841692 - protein, 215 aa, Homo sapiens
MNPNCARCGKIVYPTEKVNCLDKFWHKACFHCETCKMTLNMKNYKGYEKKPYCNAHYPKQSFTMVADTPENLRLKQQSELQSQVRYKEEFEKNKGKGFSVVADTPELQRIKKTQDQISNIKYHEEFEKSRMGPSGGEGMEPERRDSQDGSSYRRPLEQQQPHHIPTSAPVYQQPQQQPVAQSYGGYKEPAAPVSIQRSRPHLSSAHSTASHPSWA

SEQ ID NO: 841693 - protein, 225 aa, Homo sapiens
MNPNCARCGKIVYPTEKVNCLDKFWHKACFHCETCKMTLNMKNYKGYEKKPYCNAHYPKQSFTMVADTPENLRLKQQSELQSQIKYHEEFEKSRMGPSGGEGMEPERRDSQDGSSYRRPLEQQQPHHIPTSAPVYQQPQQQPVAQSYGGYKEPAAPVSIQRSAPGGGGKRYRAVYDYSAADEDEVSFQDGDTIVNVQQIDDGWMYGTVERTGDTGMLPANYVEAI

SEQ ID NO: 841694 - protein, 227 aa, Homo sapiens
TLTLTANPHPNRVTLTLTAYAHYPKQSFTMVADTPENLRLKQQSELQSQVRYKEEFEKNKGKGFSVVADTPELQRIKKTQDQISNIKYHEEFEKSRMGPSGGEGMEPERRDSQDGSSYRRPLEQQQPHHIPTSAPVYQQPQQQPVAQSYGGYKEPAAPVSIQRSAPGGGGKRYRAVYDYSAADEDEVSFQDGDTIVNVQQIDDGWMYGTVERTGDTGMLPANYVEAI

SEQ ID NO: 841695 - protein, 261 aa, Homo sapiens
MNPNCARCGKIVYPTEKVNCLDKFWHKACFHCETCKMTLNMKNYKGYEKKPYCNAHYPKQSFTMVADTPENLRLKQQSELQSQVRYKEEFEKNKGKGFSVVADTPELQRIKKTQDQISNIKYHEEFEKSRMGPSGGEGMEPERRDSQDGSSYRRPLEQQQPHHIPTSAPVYQQPQQQPVAQSYGGYKEPAAPVSIQRSAPGGGGKRYRAVYDYSAADEDEVSFQDGDTIVNVQQIDDGWMYGTVERTGDTGMLPANYVEAI

SEQ ID NO: 841696 - protein, 140 aa, Homo sapiens
AKSSRGSTAWVRFLPAAGLQRAKSSRGSTAWVRFLPFLILGTATGRRGTRSSLPQPLSPRPPPVSRDPCLPPRLEAMVPKCRARVPQDLLVFSLPQPPGSGLGGRSSLLLMGRCLRAFHDLPSPAQCQVDLELHKVSRDH

SEQ ID NO: 841697 - protein, 137 aa, Homo sapiens
MARYEAGVESAPRPAPAAVAAACVVAAAAASRQLASGNRTRVSSGVPAPAFLGTMNPNCARCGKIVYPTEKVNCLDKFWHKACFHCETCNRVCSLLGLSGGGRLCHSRHMFPHLCLGLQNRVAEVSPCGCLPRGLFP

SEQ ID NO: 841698 - protein, 261 aa, Homo sapiens; identical to SEQ ID NO: 841695

SEQ ID NO: 841699 - protein, 261 aa, Homo sapiens; identical to SEQ ID NO: 841695

SEQ ID NO: 841700 - protein, 261 aa, Homo sapiens; identical to SEQ ID NO: 841695

SEQ ID NO: 841701 - protein, 261 aa, Homo sapiens; identical to SEQ ID NO: 841695

SEQ ID NO: 841702 - protein, 261 aa, Homo sapiens; identical to SEQ ID NO: 841695

SEQ ID NO: 841703 - protein, 261 aa, Homo sapiens; identical to SEQ ID NO: 841695

SEQ ID NO: 841704 - protein, 261 aa, Homo sapiens; identical to SEQ ID NO: 841695

SEQ ID NO: 841705 - protein, 261 aa, Homo sapiens; identical to SEQ ID NO: 841695

SEQ ID NO: 841706 - protein, 261 aa, Homo sapiens; identical to SEQ ID NO: 841695

SEQ ID NO: 841707 - protein, 261 aa, Homo sapiens; identical to SEQ ID NO: 841695

SEQ ID NO: 841708 - protein, 261 aa, Homo sapiens
MNPNCARCGKIVYPTEKVNCLDKFWHKACFHCETCKMTLNMKNYKGYEKKPYCNAHYPKQSFTMVADTPENLRLKQQSELQSQVRYKEEFEKNKGKGFSVVADTPELQRIKKTQDQISNIKYHEEFEKSRMGPSGGEGMEPERRDSQDGSSYRRPLMMTWVGRCTAFSFLRLPFPSLPFPSVLPSFAPFLSSPSLSSIFLFFLHIICPRPPWPEINISCKSGFLQPIFQVGKLRHGPKVPQPHRGKQPPLNVTMHQSAWSS

SEQ ID NO: 841709 - protein, 152 aa, Homo sapiens
MNPNCARCGKIVYPTEKVNCLDKFWHKACFHCETCKKKKKKKRKKRGARRRRPTRRKKAREEKGKAQRDRARKDAEAAEREGGGGKPQGTSKRERTAEKSKRTSRQKAKEKREQKKRKTEAKERGEKGREDKKRGRSKEQDRRKRREEEEDP

SEQ ID NO: 841710 - protein, 91 aa, Homo sapiens
MNPNCARCGKIVYPTEKVNCLDKFWHKACFHCETCKMTLNMKNYKGYEKKPYCNAHYPKQSFTMVADTPENLRLKQQSELQSQVRGWAVLG

SEQ ID NO: 841711 - protein, 99 aa, Homo sapiens
WACSDDWLSAYSGDPIYDSLADASLADVNEASASTTPALQGGPGEELGVPRCLFSVYPQTTSTHSIFFLKGLYSVGACVLNQPPLSLTVVLFSGYRGYR

SEQ ID NO: 841712 - protein, 261 aa, Homo sapiens; identical to SEQ ID NO: 841695

SEQ ID NO: 841713 - protein, 235 aa, Homo sapiens
MNPNCARCGKIVYPTEKVNCLDKFWHKACFHCETCKMTLNMKNYKGYEKKPYCNAHYPKQSFTMVADTPENLRLKQQSELQSQVRYKEEFEKNKGKGFSVVADTPELQRIKKTQDQISNIKYHEEFEKSRMGPSGGEGMEPERRDSQDGSSYRRPLEQQQPHHIPTSAPVYQQPQQQPVAQSYGGYKEPAAPVSIQRSAPGGGGNVQQIDDGWMYGTVERTGDTGMLPANYVEAI

SEQ ID NO: 841714 - protein, 289 aa, Homo sapiens
MNPNCARCGKIVYPTEKVNCLDKFWHKACFHCETCKMTLNMKNYKGYEKKPYCNAHYPKQSFTMVADTPENLRLKQQSELQSQVRYKEEFEKNKGKGFSVVADTPELQRIKKTQDQISNIKYHEEFEKSRMGPSGGEGMEPERRDSQDGSSYRRPLEQQQPHHIPTSAPVYQQPQQQPVAQSYGGYKEPAAPCLCFLKPATACDSYPSSSFFCQLKPSSATSAGSLLWQASPLIDFLVFSLDGTGMGLSGGGRAGMGDLLACGPHLPLCSLPSHPPAQLLTYPHIPGLG

SEQ ID NO: 841715 - protein, 249 aa, Homo sapiens
TIQRRLAWPLRKDDTQIREAVPYLMTLNMKNYKGYEKKPYCNAHYPKQSFTMVADTPENLRLKQQSELQSQVRYKEEFEKNKGKGFSVVADTPELQRIKKTQDQISNIKYHEEFEKSRMGPSGGEGMEPERRDSQDGSSYRRPLEQQQPHHIPTSAPVYQQPQQQPVAQSYGGYKEPAAPVSIQRSAPGGGGKRYRAVYDYSAADEDEVSFQDGDTIVNVQQIDDGWMYGTVERTGDTGMLPANYVEAI

SEQ ID NO: 841716 - protein, 123 aa, Homo sapiens [sequence omitted]

SEQ ID NO: 841717 - protein, 261 aa, Homo sapiens; identical to SEQ ID NO: 841695

SEQ ID NO: 841718 - protein, 261 aa, Homo sapiens; identical to SEQ ID NO: 841695

SEQ ID NO: 841719 - protein, 261 aa, Homo sapiens; identical to SEQ ID NO: 841695

SEQ ID NO: 841720 - protein, 261 aa, Homo sapiens; identical to SEQ ID NO: 841695

SEQ ID NO: 841721 - protein, 261 aa, Homo sapiens; identical to SEQ ID NO: 841695

SEQ ID NO: 841722 - protein, 261 aa, Homo sapiens; identical to SEQ ID NO: 841695

SEQ ID NO: 841723 - protein, 261 aa, Homo sapiens; identical to SEQ ID NO: 841695

SEQ ID NO: 841724 - protein, 261 aa, Homo sapiens; identical to SEQ ID NO: 841695

SEQ ID NO: 841725 - protein, 261 aa, Homo sapiens; identical to SEQ ID NO: 841695

SEQ ID NO: 841726 - protein, 261 aa, Homo sapiens; identical to SEQ ID NO: 841695

SEQ ID NO: 841727 - protein, 261 aa, Homo sapiens; identical to SEQ ID NO: 841695

SEQ ID NO: 841728 - protein, 220 aa, Homo sapiens
MNPNCARCGKIVYPTEKVNCLDKFWHKACFHCETCKMTLNMKNYKGYEKKPYCNAHYPKQSFTMVADTPENLRLKQQSELQSQVRYKEEFEKNKGKGFSVVADTPELQRIKKTQDQISNVSSCPALRHPCCPLFGPLPASLADASLADVNEASASTTPALQGGPGEELGVPRCLFSVYPQTTSTHSIFFLKGLYSVGACVLNQPPLSLTVVLFSGYRGYR

SEQ ID NO: 841729 - protein, 61 aa, Homo sapiens
PAFGDGEIGNRKKEGEEMAFCSPDARQPVRRRVKGTPPAVPGPPFHGAVASCWPGKRPAPP

SEQ ID NO: 841730 - protein, 72 aa, Homo sapiens
DILLSGLVVRIQRSHRRSPGSIPGHGTKKWSRTSRGQKYPTQPSWPASSTSPIVNQVLTDFSPLLSCSTYGQ

SEQ ID NO: 841731 - protein, 101 aa, Homo sapiens
LHTAGSPDMQLAPSVTVHTASSPDMQPAPSVTLHTASSPDMQPAPSVTLHTASSPDMQPAPSVTLHTASSPDMQPAPSVTLHTASSPDMQPAPSVTLHTAS

SEQ ID NO: 841732 - protein, 125 aa, Homo sapiens
MRKLQVGPPNAQAPQSTCWAESSPGEDSWGIYLLLLPAFPCPHHLRMPGTTLSPQSLCLGLCVCDRASAPLQVGSWEQAFLCPRPSTLGGEGTQDHRKVLSPPPGLHLCHSVNSQESFAGISPVT

SEQ ID NO: 841733 - protein, 220 aa, Homo sapiens
SLSWKPTENLHPLTPWSTPVVALCALTRAVAWRTAAAPAAARPPAAGPPAAAPAAVCPAAAGPSAASLCAVSPPAAAPAAVRPPAVGPPAAAPAAVCPAAADPSAASLCAASPPAAAPAAVRPPAAGPLAAAPAAVCPAAADPSAASLCAASPPAAAPAAASPAAAAPLAVNPAAAAPAAACVQSVAESPATPLAIAQPVSSPPAPAPCAVPPLAAKSLL

SEQ ID NO: 841734 - protein, 305 aa, Homo sapiens
CHHRGSPGSPVSAPPGSPGSPACHRRGRRGAPGLTNEVTWEPRGSPPRSPGSVTCVTRSPSVSHRSPRNSCHRQGHLEIRVTAEVPWEPRGCRTSAPALPPGSGSPRPPGLRAAAKPRVDRASAAASAGPRLAAASLYLRPPRGRCRSCRGRSSPARPFRVAAMPPAPRPGKQVRGSLGPCVGPWLAGDGPAPPRRGIACPRTQDPVREARAAGTGLSTLAMVGTKPHCALDTRSVLAATCRFQLVSMQGHGRHHRAICKKLSELSSPKTAAILLWFGIIGNMPFLKETVFQACSPSYSGGRGRS

SEQ ID NO: 841735 - protein, 69 aa, Homo sapiens
SGPRLSTRRHLSKSLPSGRNGSNLSLPNPHPIFPSNVTQARSKRKHLRYEYALTYMSVLVDIPRIHDSL

SEQ ID NO: 841736 - protein, 109 aa, Homo sapiens
SSPRAVRHSGHQDSKMASVGECPAPVPVKDKKLLEVKLGELPSWILMRDFSPSGIFGAFQRGYYRYYNKYINVKKGSISGITMVLACYVLFSYSFSYKHLKHERLRKYH

SEQ ID NO: 841737 - protein, 110 aa, Homo sapiens
MCYWEIIQWVFFLTLPFQLPVKDKKLLEVKLGELPSWILMRDFSPSGIFGAFQRGYYRYYNKYINVKKGSISGITMVLACYVLFSYSFSYKHLSECLCGVLPLVPMRGWW

SEQ ID NO: 841738 - protein, 133 aa, Homo sapiens
VAEVTLDYPSVSGASVTEHQKRSVSKRSNTTYPQQAGLRSDQDSKMASVVPVKDKKLLEVKLGELPSWILMRDFSPSGIFGAFQRGYYRYYNKYINVKKGSISGITMVLACYVLFSYSFSYKHLKHERLRKYH

SEQ ID NO: 841739 - protein, 94 aa, Homo sapiens
VAEVTLDYPSVSGASVTEHQKRSVSKRSNTTYPQQAGLRSDQDSKMASVVPVKDKKLLEVKLGELPSWILMRDFSPSGIFGAFQRGQSLVDVCK

SEQ ID NO: 841740 - protein, 109 aa, Homo sapiens; identical to SEQ ID NO: 841736

SEQ ID NO: 841741 - protein, 109 aa, Homo sapiens; identical to SEQ ID NO: 841736

SEQ ID NO: 841742 - protein, 103 aa, Homo sapiens
SSPRAVRHSGHQDSKMASVVPVKDKKLLEVKLGELPSWILMRDFSPSGIFGAFQRGYYRYYNKYINVKKGSISGITMVLACYVLFSYSFSYKHLKHERLRKYH

SEQ ID NO: 841743 - protein, 103 aa, Homo sapiens; identical to SEQ ID NO: 841742

SEQ ID NO: 841744 - protein, 94 aa, Homo sapiens; identical to SEQ ID NO: 841739

SEQ ID NO: 841745 - protein, 122 aa, Homo sapiens
VLPLKDGFSGAVCLSVCSLCSFWKESGWPGGRLAPEVSLCPPGLLILQRHRQAGHGSSLKGILRKALCDLSLLPAMLCLHCNLLRYLPSCLPDFRARAAPQIPLKRTHSAPPHPTTLARAPP

SEQ ID NO: 841746 - protein, 103 aa, Homo sapiens; identical to SEQ ID NO: 841742

SEQ ID NO: 841747 - protein, 109 aa, Homo sapiens; identical to SEQ ID NO: 841736

SEQ ID NO: 841748 - protein, 133 aa, Homo sapiens; identical to SEQ ID NO: 841738

SEQ ID NO: 841749 - protein, 109 aa, Homo sapiens; identical to SEQ ID NO: 841736

SEQ ID NO: 841750 - protein, 212 aa, Homo sapiens
QVEHQLEEEKKANNERQKAERVLEVQIQTLIIQKEELNTDLYHMERSLRYFEEESKDLAVRLQHSLQCKGELERALSAVIATEKKKANQLSSCSKAHTEWELEQSLQDQALLKAQLTQLKESFQQLQLERDECAEHIEGERARWHQRMSKMSQEICTLKKEKQDMRWVEQLEWSLSKLKNQTAEPLPPEPPAVPSEVELQHLRKELERVAGE

SEQ ID NO: 841751 - protein, 312 aa, Homo sapiens
DLQATKHGFSVLKGQAELQMKRIWGEKEKKNLEDGINNLKKQWETLEPLHLEAENQIKKCDIRNKMKETILWAKNLLGELNPSIPLLPDDILSQIRKCKVTHDGILARQQSVESLAEEVKDKVPSLTTYEGGDLNNTLEDLRNQYQMLVLKSTQRSQQLEFKLEERSNFFAIIRKFQLMVQESETLIIPRVETAATEAELKHHHVTLEASQKELQEIDSGISTHLQELTNIYEELNVFERLFLEDQLKNLKIRTNRIQRFIQNTCNEVEHKVKFCRQFHEKTSALQEEADSIQRNELLLNQEVNKGVKEEIY

SEQ ID NO: 841752 - protein, 425 aa, Homo sapiens
MPVPWSWTSSLQNCPCHKRRASICCTQLGSLSALKHAVLGLYLLVFLILVGIFILAVSRPRSSPDDLKALTRNVNRLNESFRDLQLRLLQAPLQADLTEQVWKVQDALQNQSDSLLALAGAVQRLEGALWGLQAQAVQTEQAVALLRDRTGQQSDTAQLELYQLQVESNSSQLLLRRHAGLLDGLARRVGILGEELADVGGVLRGSTTACPTTWPPPHAAAGPAGAGEQRQRGHAPLRLAHVGMELQLKQELAMLNAVTEDLRLKDWEHSIALRNISLAKEGHRDPKVIRGMKERKAGLASLDCLDFEVCPGREVPQDVPGPKGDDGKLGATGPMGMRGFKGDRGPKGEKGEKGDRAGDASGVEAPMMIRLVNGSGPHEGRVEVYHDRRWGTVCDDGWDKKDGDVVCRMLGFRGVEEVYRTDEEP

SEQ ID NO: 841753 - protein, 377 aa, Homo sapiens
MANAEILRGQGSTASARGTQLLQGVMENKAMYLHTVSDCDTSSICEDSFDGRSLSKLNLCEDGPCHKRRASICCTQLGSLSALKHAVLGLYLLVFLILVGIFILAVSRPRSSPDDLKALTRNVNRLNESFRDLQLRLLQAPLQADLTEQVWKVQDALQNQSDSLLALAGAVQRLEGALWGLQAQAVQTEQAVALLRDRTGQQSDTAQLELYQLQVESNSSQLLLRRRLRLAHVGMELQLKQELAMLNAVTEDLRLKDWEHSIALRNISLAKAGPKGDDGKLGATGPMGMRGFKGDRGPKGEKGEKGDRAGDASGVEAPMMIRLVNGSGPHEGRVEVYHDRRWGTVCDDGWDKKDGDVVCRMLGFRGVEEVYRTDEEP

SEQ ID NO: 841754 - protein, 448 aa, Homo sapiens
MENKAMYLHTVSDCDTSSICEDSFDGRSLSKLNLCEDGPCHKRRASICCTQLGSLSALKHAVLGLYLLVFLILVGIFILAVSRPRSSPDDLKALTRNVNRLNESFRDLQLRLLQAPLQADLTEQVWKVQDALQNQSDSLLALAGAVQRLEGALWGLQAQAVQTEQAVALLRDRTGQQSDTAQLELYQLQVESNSSQLLLRRHAGLLDGLARRVGILGEELADVGGVLRGSTTACPTTWPPPHAAAGPAGAGEQRQRGHAPLRLAHVGMELQLKQELAMLNAVTEDLRLKDWEHSIALRNISLAKGPPGPKGDQGDEGKEGRPGIPGLPGLRGLPGERGTPGLPGPKGDDGKLGATGPMGMRGFKGDRGPKGEKGEKGDRAGDASGVEAPMMIRLVNGSGPHEGRVEVYHDRRWGTVCDDGWDKKDGDVVCRMLGFRGVEEVYRTDEEP

SEQ ID NO: 841755 - protein, 165 aa, Homo sapiens
MGDVLEQFFILTGLLVCLACLAKCVRFSRCVLLNYWKVLPKSFLRSMGQWAVITGAGDGIGKAYSFELAKRGLNVVLISRTLEKLEAIATEIERTTGRSVKIIQADFTKDDIYEHIKEKLAGLEIGILVNNVGMLPNLLPSHFLNAPDEIQHSIHSQEYHFSRYL

SEQ ID NO: 841756 - protein, 165 aa, Homo sapiens; identical to SEQ ID NO: 841755

SEQ ID NO: 841757 - protein, 165 aa, Homo sapiens; identical to SEQ ID NO: 841755

SEQ ID NO: 841758 - protein, 310 aa, Homo sapiens
MGDVLEQFFILTGLLVCLACLAKCVRFSRCVLLNYWKVLPKSFLRSMGQWAVITGAGDGIGKAYSFELAKRGLNVVLISRTLEKLEAIATEIERTTGRSVKIIQADFTKDDIYEHIKEKLAGLEIGILVNNVGMLPNLLPSHFLNAPDEIQSLIHCNITSVVKMTQLILKHMESRQKGLILNISSGIALFPWPLYSMYSASKAFVCAFSKALQEEYKAKEVIIQVLTPYAVSTAMTKYLNTNVITKTADEFVKESLNYVTIGGETCGCLAHEILAGFLSLIPAWAFYSGAFQRLLLTHYVAYLKLNTKVR

SEQ ID NO: 841759 - protein, 274 aa, Homo sapiens
MGDVLEQFFILTGLLVCLACLAKCVRFSRCVLLNYWKVLPKSFLRSMGQWAVITGAGDGIGKAYSFELAKRGLNVVLISRTLEKLEAIATEIVNNVGMLPNLLPSHFLNAPDEIQSLIHCNITSVVKMTQLILKHMESRQKGLILNISSGIALFPWPLYSMYSASKAFVCAFSKALQEEYKAKEVIIQVLTPYAVSTAMTKYLNTNVITKTADEFVKESLNYVTIGGETCGCLAHEILAGFLSLIPAWAFYSGAFQRLLLTHYVAYLKLNTKVR

SEQ ID NO: 841760 - protein, 165 aa, Homo sapiens; identical to SEQ ID NO: 841755

SEQ ID NO: 841761 - protein, 39 aa, Homo sapiens
KGGILAHAFGPGSGIGGDAHFDEDEFWTTHSGGGQNKQT

SEQ ID NO: 841762 - protein, 208 aa, Homo sapiens
MKFLLILLLQATASGALPLNSSTSLEKNNVLFGERYLEKFYGLEINKLPVTKMKYSGNLMKEKIQEMQHFLGLKVTGQLDTSTLEMMHAPRCGVPDVHHFREMPGGPVWRKHYITYRINNYTPDMNREDVDYAIRKAFQVWSNVTPLKFSKINTGMADILVVFARGAHGDFHAFDGKGGILAHAFGPGSGIGGDAHFDEDEFWTTHSG

SEQ ID NO: 841763 - protein, 31 aa, Homo sapiens
MGAGLSPPYRSQQGKSKPLPAPGVLHPEATV

SEQ ID NO: 841764 - protein, 100 aa, Homo sapiens
RLIETEKYNKREKRQGDRVKGTNGREKQIQRDGDTETENTEAQKSDRRKQRQIEQQETHGKIRCTKADKGRGRRKKKTGEKRQKQGEVGSYIKLQELWEH

SEQ ID NO: 841765 - protein, 59 aa, Homo sapiens [sequence omitted]

SEQ ID NO: 841766 - protein, 1237 aa, Homo sapiens
MLPYTVNFKVSARTLTGALNAHNKAAVDWLRTPSFQVARIGQGWQGLIAYGCHSLVVVIDSITAQTLQVLEKHKADVVKVKWARENYHHNIGSPYCLRLASADVNGKIIVWDVAAGVAQCEIQEHAKPIQDVQWLWNQDASRDLLLAIHPPNYIVLWNADTGTKLWKKSYADNILSFSFDPFDPSHLTLLTSEGIVFISDFSPSKPPSGPGKKVYISSPHSSPAHNKLATATGAKKALNKVKILITQEKPSAEFITLNDCLQLAYLPSKRNHMLLLYPREILILDLEVNQTVGVIAIERTGVPFLQVIPCFQRDGLFCLHENGCITLRVRRSYNNIFTTSNEEPDPDPVQELTYDLRSQCDAIRVTKTVRPFSMVCCPVNENAAALVVSDGRVMIWELKSAVCNRNSRNSSSGVSPLYSPVSFCGIPVGVLQNKLPDLSLDNMIGQSAIAGEEHPRGSILREVHLKFLLTGLLSGLPAPQFAIRMCPPLTTKNIKMYQPLLAVGTSNGSVLVYHLTSGLLHKELSIHSCEVKGIEWTSLTSFLSFATSTPNNMGLVRNELQLVDLPTGRSIAFRGERGNDESAIEMIKVSHLKQYLAVVFRDKPLELWDVRTCTLLREMSKNFPTITALEWSPSHNLKSLRKKQLATREAMARQTVVSDTELSIVESSVISLLQEAESKSELSQNISAREHFVFTDIDGQVYHLTVEGNSVKDSARIPPDGSMGSITCIAWKGDTLVLGDMDGNLNFWDLKGRVSRGIPTHRSWVRKIRFAPGKGNQKLIAMYNDGAEVWDTKEVQMVSSLRSGRNVTFRILDVDWCTSDKVILASDDGCIRVLEMSMKSACFRMDEQELTEPVWCPYLLVPRASLALKAFLLHQPWNGQYSLDISHVDYPENEEIKNLLQEQLNSLSNDIKKLLLDPEFTLLQRCLLVSRLYGDESELHFWTVAAHYLHSLSQEKSASTTAPKEAAPRDKLSNPLDICYDVLCENAYFQKFQLERVNLQEVKRSTYDHTRKCTDQLLLLGQTDRAVQLLLETSADNQHYYCDSLKACLVTTVTSSGPSQSTIKLVATNMIANGKLAEGVQLLCLIDKAADACRYLQTYGEWNRAAWLAKVRLNPEECADVLRRWVDHLCSPQVNQKSKALLVLLSLGCFFSVAETLHSMRYFDRAALFVEACLKYGAFEVTEDTEKLITAIYADYARSLKNLGFKQGAVLFASKAGAAGKDLLNELESPKEEPIEE

SEQ ID NO: 841767 - protein, 965 aa, Homo sapiens
MLLLYPREILILDLEVNQTVGVIAIERTGVPFLQVIPCFQRDGLFCLHENGCITLRVRRSYNNIFTTSNEEPDPDPVQELTYDLRSQCDAIRVTKTVRPFSMVCCPVNENAAALVVSDGRVMIWELKSAVCNRNSRNSSSGVSPLYSPVSFCGIPVGVLQNKLPDLSLDNMIGQSAIAGEEHPRGSILREVHLKFLLTGLLSGLPAPQFAIRMCPPLTTKNIKMYQPLLAVGTSNGSVLVYHLTSGLLHKELSIHSCEVKGIEWTSLTSFLSFATSTPNNMGLVRNELQLVDLPTGRSIAFRGERGNDESAIEMIKVSHLKQYLAVVFRDKPLELWDVRTCTLLREMSKNFPTITALEWSPSHNLKSLRKKQLATREAMARQTVVSDTELSIVESSVISLLQEAESKSELSQNISAREHFVFTDIDGQVYHLTVEGNSVKDSARIPPDGSMGSITCIAWKGDTLVLGDMDGNLNFWDLKGRVSRGIPTHRSWVRKIRFAPGKGNQKLIAMYNDGAEVWDTKEVQMVSSLRSGRNVTFRILDVDWCTSDKVILASDDGCIRVLEMSMKSACFRMDEQELTEPVWCPYLLVPRASLALKAFLLHQPWNGQYSLDISHVDYPENEEIKNLLQEQLNSLSNDIKKLLLDPEFTLLQRCLLVSRLYGDESELHFWTVAAHYLHSLSQEKSASTTAPKEAAPRDKLSNPLDICYDVLCENAYFQKFQLERVNLQEVKRSTYDHTRKCTDQLLLLGQTDRAVQLLLETSADNQHYYCDSLKACLVTTVTSSGPSQSTIKLVATNMIANGKLAEGVQLLCLIDKAADACRYLQTYGEWNRAAWLAKVRLNPEECADVLRRWVDHLCSPQVNQKSKALLVLLSLGCFFSVAETLHSMRYFDRAALFVEACLKYGAFEVTEDTEKLITAIYADYARSLKNLGFKQGAVLFASKAGAAGKDLLNELESPKEEPIEE

SEQ ID NO: 841768 - protein, 619 aa, Homo sapiens
MSKNFPTITALEWSPSHNLKSLRKKQLATREAMARQTVVSDTELSIVESSVISLLQEAESKSELSQNISAREHFVFTDIDGQVYHLTVEGNSVKDSARIPPDGSMGSITCIAWKGDTLVLGDMDGNLNFWDLKGRVSRGIPTHRSWVRKIRFAPGKGNQKLIAMYNDGAEVWDTKEVQMVSSLRSGRNVTFRILDVDWCTSDKVILASDDGCIRVLEMSMKSACFRMDEQELTEPVWCPYLLVPRASLALKAFLLHQPWNGQYSLDISHVDYPENEEIKNLLQEQLNSLSNDIKKLLLDPEFTLLQRCLLVSRLYGDESELHFWTVAAHYLHSLSQEKSASTTAPKEAAPRDKLSNPLDICYDVLCENAYFQKFQLERVNLQEVKRSTYDHTRKCTDQLLLLGQTDRAVQLLLETSADNQHYYCDSLKACLVTTVTSSGPSQSTIKLVATNMIANGKLAEGVQLLCLIDKAADACRYLQTYGEWNRAAWLAKVRLNPEECADVLRRWVDHLCSPQVNQKSKALLVLLSLGCFFSVAETLHSMRYFDRAALFVEACLKYGAFEVTEDTEKLITAIYADYARSLKNLGFKQGAVLFASKAGAAGKDLLNELESPKEEPIEE

SEQ ID NO: 841769 - protein, 1206 aa, Homo sapiens
MLPYTVNFKVSARTLTGALNAHNKAAVDWGWQGLIAYGCHSLVVVIDSITAQTLQVLEKHKADVVKVKWARENYHHNIGSPYCLRLASADVNGKIIVWDVAAGVAQCEIQEHAKPIQDVQWLWNQDASRDLLLAIHPPNYIVLWNADTGTKLWKKSYADNILSFSFDPFDPSHLTLLTSEGIVFISDFSPSKPPSGPGKKVYISSPHSSPAHNKLATATGAKKALNKVKILITQEKPSAEFITLNDCLQLAYLPSKRNHMLLLYPREILILDLEVNQTVGVIAIERTGVPFLQVIPCFQRDGLFCLHENGCITLRVRRSYNNIFTTSNEEPDPDPVQELTYDLRSQCDAIRVTKTVRPFSMVCCPVNENAAALVVSDGRVMIWELKSAVCNRNSRNSSSGVSPLYSPVSFCGIPVGVLQNKLPDLSLDNMIGQSAIAGEEHPRGSILREVHLKFLLTGLLSGLPAPQFAIRMCPPLTTKNIKMYQPLLAVGTSNGSVLVYHLTSGLLHKELSIHSCEVKGIEWTSLTSFLSFATSTPNNMGLVRNELQLVDLPTGRSIAFRGERGNDESAIEMIKVSHLKQYLAVVFRDKPLELWDVRTCTLLREMSKNFPTITALEWSPSHNLKSLRKKQLATREAMARQTVVSDTELSIVESSVISLLQEAESKSELSQNISAREHFVFTDIDGQVYHLTVEGNSVKDSARIPPDGSMGSITCIAWKGDTLVLGDMDGNLNFWDLKGRVSRGIPTHRSWVRKIRFAPGKGNQKLIAMYNDGAEVWDTKEVQMVSSLRSGRNVTFRILDVDWCTSDKVILASDDGCIRVLEMSMKSACFRMDEQELTEPVWCPYLLVPRASLALKAFLLHQPWNGQYSLDISHVDYPENEEIKNLLQEQLNSLSNDIKKLLLDPEFTLLQRCLLVSRLYGDESELHFWTVAAHYLHSLSQEKSASTTAPKEAAPRDKLSNPLDICYDVLLKRSTYDHTRKCTDQLLLLGQTDRAVQLLLETSADNQHYYCDSLKACLVTTVTSSGPSQSTIKLVATNMIANGKLAEGVQLLCLIDKAADACRYLQTYGEWNRAAWLAKVRLNPEECADVLRRWVDHLCSPQVNQKSKALLVLLSLGCFFSVAETLHSMRYFDRAALFVEACLKYGAFEVTEDTEKLITAIYADYARSLKNLGFKQGAVLFASKAGAAGKDLLNELESPKEEPIEE

SEQ ID NO: 841770 - protein, 797 aa, Homo sapiens
MLPYTVNFKVSARTLTGALNAHNKAAVDWGWQGLIAYGCHSLVVVIDSITAQTLQVLEKHKADVVKVKWARENYHHNIGSPYCLRLASADVNGKIIVWDVAAGVAQCEIQEHAKPIQDVQWLWNQDASRDLLLAIHPPNYIVLWNADTGTKLWKKSYADNILSFSFDPFDPSHLTLLTSEGIVFISDFSPSKPPSGPGKKVYISSPHSSPAHNKLATATGAKKALNKVKILITQEKPSAEFITLNDCLQLAYLPSKRNHMLLLYPREILILDLEVNQTVGVIAIERTGVPFLQVIPCFQRDGLFCLHENGCITLRVRRSYNNIFTTSNEEPDPDPVQELTYDLRSQCDAIRVTKTVRPFSMVCCPVNENAAALVVSDGRVMIWELKSAVCNRNSRNSSSGVSPLYSPVSFCGIPVGVLQNKLPDLSLDNMIGQSAIAGEEHPRGSILREVHLKFLLTGLLSGLPAPQFAIRMCPPLTTKNIKMYQPLLAVGTSNGSVLVYHLTSGLLHKELSIHSCEVKGIEWTSLTSFLSFATSTPNNMGLVRNELQLVDLPTGRSIAFRGERGNDESAIEMIKVSHLKQYLAVVFRDKPLELWDVRTCTLLREMSKNFPTITALEWSPSHNLKSLRKKQLATREAMARQTVVSDTELSIVESSVISLLQEAESKSELSQNISAREHFVFTDIDGQVYHLTVEGNSVKDSARIPPDGSMGSITCIAWKGDTLVLGDMDGNLNFWDLKGRVSRGIPTHRSWVRKIRFAPGKGNQKLIAMYNDGAEVWDTKESLCGAPISLFQGPLLP

SEQ ID NO: 841771 - protein, 1224 aa, Homo sapiens
MLPYTVNFKVSARTLTGALNAHNKAAVDWGWQGLIAYGCHSLVVVIDSITAQTLQVLEKHKADVVKVKWARENYHHNIGSPYCLRLASADVNGKIIVWDVAAGVAQCEIQEHAKPIQDVQWLWNQDASRDLLLAIHPPNYIVLWNADTGTKLWKKSYADNILSFSFDPFDPSHLTLLTSEGIVFISDFSPSKPPSGPGKKVYISSPHSSPAHNKLATATGAKKALNKVKILITQEKPSAEFITLNDCLQLAYLPSKRNHMLLLYPREILILDLEVNQTVGVIAIERTGVPFLQVIPCFQRDGLFCLHENGCITLRVRRSYNNIFTTSNEEPDPDPVQELTYDLRSQCDAIRVTKTVRPFSMVCCPVNENAAALVVSDGRVMIWELKSAVCNRNSRNSSSGVSPLYSPVSFCGIPVGVLQNKLPDLSLDNMIGQSAIAGEEHPRGSILREVHLKFLLTGLLSGLPAPQFAIRMCPPLTTKNIKMYQPLLAVGTSNGSVLVYHLTSGLLHKELSIHSCEVKGIEWTSLTSFLSFATSTPNNMGLVRNELQLVDLPTGRSIAFRGERGNDESAIEMIKVSHLKQYLAVVFRDKPLELWDVRTCTLLREMSKNFPTITALEWSPSHNLKSLRKKQLATREAMARQTVVSDTELSIVESSVISLLQEAESKSELSQNISAREHFVFTDIDGQVYHLTVEGNSVKDSARIPPDGSMGSITCIAWKGDTLVLGDMDGNLNFWDLKGRVSRGIPTHRSWVRKIRFAPGKGNQKLIAMYNDGAEVWDTKEVQMVSSLRSGRNVTFRILDVDWCTSDKVILASDDGCIRVLEMSMKSACFRMDEQELTEPVWCPYLLVPRASLALKAFLLHQPWNGQYSLDISHVDYPENEEIKNLLQEQLNSLSNDIKKLLLDPEFTLLQRCLLVSRLYGDESELHFWTVAAHYLHSLSQEKSASTTAPKEAAPRDKLSNPLDICYDVLCENAYFQKFQLERVNLQEVKRSTYDHTRKCTDQLLLLGQTDRAVQLLLETSADNQHYYCDSLKACLVTTVTSSGPSQSTIKLVATNMIANGKLAEGVQLLCLIDKAADACRYLQTYGEWNRAAWLAKVRLNPEECADVLRRWVDHLCSPQVNQKSKALLVLLSLGCFFSVAETLHSMRYFDRAALFVEACLKYGAFEVTEDTEKLITAIYADYARSLKNLGFKQGAVLFASKAGAAGKDLLNELESPKEEPIEE

SEQ ID NO: 841772 - protein, 1224 aa, Homo sapiens; identical to SEQ ID NO: 841771

SEQ ID NO: 841773 - protein, 117 aa, Homo sapiens [sequence omitted]

SEQ ID NO: 841774 - protein, 566 aa, Homo sapiens
MLPYTVNFKVSARTLTGALNAHNKAAVDWGWQGLIAYGCHSLVVVIDSITAQTLQVLEKHKADVVKVKWARENYHHNIGSPYCLRLASADVNGKIIVWDVAAGVAQCEIQEHAKPIQDVQWLWNQDASRDLLLAIHPPNYIVLWNADTGTKLWKKSYADNILSFSFDPFDPSHLTLLTSEGIVFISDFSPSKPPSGPGKKVYISSPHSSPAHNKLATATGAKKALNKVKILITQEKPSAEFITLNDCLQLAYLPSKRNHMLLLYPREILILDLEVNQTVGVIAIERTGVPFLQVIPCFQRDGLFCLHENGCITLRVRRSYNNIFTTSNEEPDPDPVQELTYDLRSQCDAIRVTKTVRPFSMVCCPVNENAAALVVSDGRVMIWELKSAVCNRNSRNSSSGVSPLYSPVSFCGIPVGVLQNKLPDLSLDNMIGQSAIAGEEHPRGSILREVHLKFLLTGLLSGLPAPQFAIRMCPPLTTKNIKMYQPLLAVGTSNGSVLVYHLTSGLLHKELSIHSCEVKGIEWTSLTSFLSFATSTPNNMGLVRNELQLVDLPTGLFLKIQIGLSY

SEQ ID NO: 841775 - protein, 565 aa, Homo sapiens
MLPYTVNFKVSARTLTGALNAHNKAAVDWGWQGLIAYGCHSLVVVIDSITAQTLQVLEKHKADVVKVKWARENYHHNIGSPYCLRLASADVNGKIIVWDVAAGVAQCEIQEHAKPIQDVQWLWNQDASRDLLLAIHPPNYIVLWNADTGTKLWKKSYADNILSFSFDPFDPSHLTLLTSEGIVFISDFSPSKPPSGPGKKVYISSPHSSPAHNKLATATGAKKALNKVKILITQEKPSAEFITLNDCLQLAYLPSKRNHMLLLYPREILILDLEVNQTVGVIAIERTGVPFLQVIPCFQRDGLFCLHENGCITLRVRRSYNNIFTTSNEEPDPDPVQELTYDLRSQCDAIRVTKTVRPFSMVCCPVNENAAALVVSDGRVMIWELKSAVCNRNSRNSSSGVSPLYSPVSFCGIPVGVLQNKLPDLSLDNMIGQSAIAGEEHPRGSILREVHLKFLLTGLLSGLPAPQFAIRMCPPLTTKNIKMYQPLLAVGTSNGSVLVYHLTSGLLHKELSIHSCEVKGIEWTSLTSFLSFATSTPNNMGLVRNELQLVDLPTGLFLKIQIGLS

SEQ ID NO: 841776 - protein, 1224 aa, Homo sapiens; identical to SEQ ID NO: 841771

SEQ ID NO: 841777 - protein, 1111 aa, Homo sapiens
MLPYTVNFKVSARTLTGALNAHNKAAVDWGWQGLIAYGCHSLVVVIDSITAQTLQVLEKHKADVVKVKWARENYHHNIGSPYCLRLASADVNGKIIVWDVAAGVAQCEIQEHAKPIQDVQWLWNQDASRDLLLAIHPPNYIVLWNADTGTKLWKKSYADNILSFSFDPFDPSHLTLLTSEGIVFISDFSPSKPPSGPGKKVYISSPHSSPAHNKLATATGAKKALNKVKILITQEKPSAEFITLNDCLQLAYLPSKRNHMLLLYPREILILDLEVNQTVGVIAIERTGVPFLQVIPCFQRDGLFCLHENGCITLRVRRSYNNIFTTSNEEPDPDPVQELTYDLRSQCDAIRVTKTVRPFSMVCCPVNENAAALVVSDGRVMNGNSSLQFVIEIHGTGQSAIAGEEHPRGSILREVHLKFLLTGLLSGLPAPQFAIRMCPPLTTKNIKMYQPLLAVGTSNGSVLVYHLTSGLLHKELSIHSCEVKGIEWTSLTSFLSFATSTPNNMGLVRNELQLVDLPTGRSIAFRGERGNDESAIEMIKVSHLKQYLAVVFRDKPLELWDVRTCTLLREMSKNFPTITALEWSPSHNLKSLRKKQLATREAMARQTVVSDTELSIVESSVISLLQEAESKSELSQNISAREHFVFTDIDGQVYHLTVEGNSVKDSARIPPDGSMGSITCIAWKGDTLVLGDMDGNLNFWDLKGRVSRGIPTHRSWVRKIRFAPGKGNQKLIAMYNDGAEVWDTKEVQMVSSLRSGRNVTFRILDVDWCTSDKVILASDDGCIRVLEMSMKSACFRMDEQELTEPVWCPYLLVPRASLALKAFLLHQPWNGQYSLDISHVDYPENEEIKNLLQEQLNSLSNDIKKLLLDPEFTLLQRCLLVSRLYGDESELHFWTVAAHYLHSLSQEKSASTTAPKEAAPRDKLSNPLDICYDVLCENAYFQKFQLERVNLQEVKRSTYDHTRKCTDQLLLLGQTDRAVQLLLETSADNQHYYCDSLKACLVTTVTSSGPSQSTIKLVATNMIANGKLAEGVQLLCLIDKAADACRYLQTYGEWNRAAWLAKVRLNPEECADVLRRWVDHLCSPQVNQKSKALLVLLSLGCFFSVAETLHR

SEQ ID NO: 841778 - protein, 645 aa, Homo sapiens
GIRLVDLSSLQQQQIYRSTTCTLLREMSKNFPTITALEWSPSHNLKSLRKKQLATREAMARQTVVSDTELSIVESSVISLLQEAESKSELSQNISAREHFVFTDIDGQVYHLTVEGNSVKDSARIPPDGSMGSITCIAWKGDTLVLGDMDGNLNFWDLKGRVSRGIPTHRSWVRKIRFAPGKGNQKLIAMYNDGAEVWDTKEVQMVSSLRSGRNVTFRILDVDWCTSDKVILASDDGCIRVLEMSMKSACFRMDEQELTEPVWCPYLLVPRASLALKAFLLHQPWNGQYSLDISHVDYPENEEIKNLLQEQLNSLSNDIKKLLLDPEFTLLQRCLLVSRLYGDESELHFWTVAAHYLHSLSQEKSASTTAPKEAAPRDKLSNPLDICYDVLCENAYFQKFQLERVNLQEVKRSTYDHTRKCTDQLLLLGQTDRAVQLLLETSADNQHYYCDSLKACLVTTVTSSGPSQSTIKLVATNMIANGKLAEGVQLLCLIDKAADACRYLQTYGEWNRAAWLAKVRLNPEECADVLRRWVDHLCSPQVNQKSKALLVLLSLGCFFSVAETLHSMRYFDRAALFVEACLKYGAFEVTEDTEKLITAIYADYARSLKNLGFKQGAVLFASKAGAAGKDLLNELESPKEEPIEE

SEQ ID NO: 841779 - protein, 797 aa, Homo sapiens; identical to SEQ ID NO: 841770

SEQ ID NO: 841780 - protein, 285 aa, Homo sapiens
HEVCLEEQLLEELLCWLTFPGISCAGSGQRQSRSAYFQKFQLERVNLQEVKRSTYDHTRKCTDQLLLLGQTDRAVQLLLETSADNQHYYCDSLKACLVTTVTSSGPSQSTIKLVATNMIANGKLAEGVQLLCLIDKAADACRYLQTYGEWNRAAWLAKVRLNPEECADVLRRWVDHLCSPQVNQKSKALLVLLSLGCFFSVAETLHSMRYFDRAALFVEACLKYGAFEVTEDTEKLITAIYADYARSLKNLGFKQGAVLFASKAGAAGKDLLNELESPKEEPIEE

SEQ ID NO: 841781 - protein, 1224 aa, Homo sapiens; identical to SEQ ID NO: 841771

SEQ ID NO: 841782 - protein, 566 aa, Homo sapiens; identical to SEQ ID NO: 841774

SEQ ID NO: 841783 - protein, 68 aa, Homo sapiens
SAPRSWAGRRDVALHSELQGVGAHPHGGPQRPQQGGGGLVRTPSFQVARIGQECVRGKGEGQEVSPPG

SEQ ID NO: 841784 - protein, 128 aa, Homo sapiens
LDFSSCVMKFPPDFQRPFQACKRFDSHPSVPTKPPGQPDPRVGRKRLHQGALWELRSSWGFVAWSDLCTGIFSCQARPRPLPGTGQTPSLMHLCPLRLPSPRMAHPSGPSSLSSSFQGLIPQGCPLFW

SEQ ID NO: 841785 - protein, 135 aa, Homo sapiens
MAPEHSWSFGVSPATRERERDMRPFQACKRFDSHPSVPTKPPGQPDPRVGRKRLHQGALWELRSSWGFVAWSDLCTGIFSCQARPRPLPGTGQTPSLMHLCPLRLPSPRMAHPSGPSSLSSSFQGLIPQGCPLFW

SEQ ID NO: 841786 - protein, 111 aa, Homo sapiens [sequence omitted]

SEQ ID NO: 841787 - protein, 109 aa, Homo sapiens
ERQSHSVAQAGVQWHNLSSLQPPPPRFKQFSCLSLQSSWNYKCPPPRPANFFCILVEKGFHHVVQAGLKLLSSGNLPASASQRAGITGMSHCAQHSLSFEAAQSTQLLS

SEQ ID NO: 841788 - protein, 103 aa, Homo sapiens
NKCQEVATHTLKKNSEPLYPTFAFSGVIGLAHTHVNRADVSHFWAKEFKKWGLSPLHSLFPLLPALIPQGMSEYGTEGARTSTLHCSGRKKYIFWPAQGGSRL

SEQ ID NO: 841789 - protein, 86 aa, Homo sapiens
QGHPLSKMYSLDISHSMPTSIFPTTLGINYQTIFSDTEKGVASSINTALSTSKPSGILQYVASLAPVNVPVLQMRKWRLLEEVREI

SEQ ID NO: 841790 - protein, 116 aa, Homo sapiens
MTPQYIPKHPNTHTITHTHTHSYHTLSISTPYPTPTLPDTPRTQLQPCYLPTDSYPQSPDTSPDTHTLPTAPNVSPSYSSALPQTPVSSPIPFQTYSLPLQHTYTHCFKHPLKQEH

SEQ ID NO: 841791 - protein, 142 aa, Homo sapiens
RFSSVSLCAQGLAESSWVEWRQLGGMGSCLNSVSLEVLHGGQPCHPPDSCFYLQASSPANLPICPLPLSRPTYLGPISAQPLRAVCCLLFMTFCSQLLAFAHASSHLEISLEQLRVALMQEIHMGAIQAAQLWVHWAPAAPT

SEQ ID NO: 841792 - protein, 212 aa, Homo sapiens
NELLTEQVHKARVKFNTLKGKLRETRDALREKTLALESVQLDLKQAQHRIKEMKQMHPNGEAKESQSIGKQNSSEERIRQRELENLLLERQLEDARKEGDNKEIVINIHRDCLENGKEDLLEERNKELMNEYNYLKEKLLQYEKEKAEREVIVREFQEELVDHLKKFSMSESPLEGTSHCHINLDETWTSKKKLFQVEIQPEEKHEEFRKVF

SEQ ID NO: 841793 - protein, 285 aa, Homo sapiens
MGSKALPAPIPLHPSLQLTNYSFLQAVNTFPATVDHLQGLYGLSAVQTMHMNHWTLGYPNVHEITRSTITEMAAAQGLVDARFPFPALPFTTHLFHPKQGAIAHVLPALHKDRPRFDFANLAVAATQEDPPKMGDLSKLSPGLGSPISGLSKLTPDRKPSRGRLPSKTKKEFICKFCGRHFTKSYNLLIHERTHTDERPYTCDICHKAFRRQDHLRDHRYIHSKEKPFKCQECGKGFCQSRTLAVHKTLHMQDIKPYSCEQCGKVFRRNCDLRRHSLTHTPRQDF

SEQ ID NO: 841794 - protein, 107 aa, Homo sapiens
QLQVVYEHRSRLEKSLQKERLEHKKAKEDFLVYKLEAQETLNKGRQDSNSRYSALNVQHQMLKSQHEELKKQHSDLEEEHRKQGEDFSRTFNDHKQKYLLWDLVGCT

SEQ ID NO: 841795 - protein, 237 aa, Homo sapiens
MHMNHWTLGYPNVHEITRSTITEMAAAQGLVDARFPFPALPFTTHLFHPKQGAIAHVLPALHKDRPRFDFANLAVAATQEDPPKMGDLSKLSPGLGSPISGLSKLTPDRKPSRGRLPSKTKKEFICKFCGRHFTKSYNLLIHERTHTDERPYTCDICHKAFRRQDHLRDHRYIHSKEKPFKCQECGKGFCQSRTLAVHKTLHMQDIKPYSCEQCGKVFRRNCDLRRHSLTHTPRQDF

SEQ ID NO: 841796 - protein, 267 aa, Homo sapiens
MGSKALPAPIPLHPSLQLTNYSFLQAVNTFPATVDHLQGLYGLSAVQTMHMNHWTLGYPNVHEITRSTITEMAAAQGLVDARFPFPALPFTTHLFHPKQGAIAHVLPALHKDRPRFDFANLAVAATQEDPPKMGDLSKLSPGLGSPISGLSKLTPDRKPSRGRLPSKTKKEFICKFCGRHFTKSYNLLIHERTHTDERPYTCDICHKAFRRQDHLRDHRYIHSKEKPFKCQECGKGFCQSRTLAVHKTLHMQSRTCSSRELTLLLGD

SEQ ID NO: 841797 - protein, 312 aa, Homo sapiens
MGSKALPAPIPLHPSLQLTNYSFLQAVNTFPATVDHLQGLYGLSAVQTMHMNHWTLGYPNVHEITRSTITEMAAAQGLVDARFPFPALPFTTHLFHPKQGAIAHVLPALHKDRPRFDFANLAVAATQEDPPKMGDLSKLSPGLGSPISGLSKLTPDRKPSRGRLPSKTKKEFICKFCGRHFTKSYNLLIHERTHTDERPYTCDICHKAFRRQDHLRDHRYIHSKEKPFKCQECGKGFCQSRTLAVHKTLHMQESPHKCPTCGRTFNQRSNLKTHLLTHTDIKPYSCEQCGKVFRRNCDLRRHSLTHTPRQDF

SEQ ID NO: 841798 - protein, 50 aa, Homo sapiens
VHPGARKMKEKWENDKDVAMSFHYISMGDCIGWLEDFLMGMDSTLEPSAG

SEQ ID NO: 841799 - protein, 191 aa, Homo sapiens
LPWGPSKRKMAQEKSLGGASQLALWRPFPACGERLSATPPGPATSQPLPGVRPQGMSKKPQKPKHSSPGKKPAGRKTRSPRLWREKIMTQIEMRSQGPNFPHTGQDCLAYPRIVENSAVATPTSELPKFWGLQSPLPTAWEASCPDAMHPLVTGSHLSIPQDRKGSNSPREPRAVLGASGCRGKLRTLETN

SEQ ID NO: 841800 - protein, 177 aa, Homo sapiens
LPWGPSKRKMAQEKSLGGASQLALWRPFPACGERLSATPPGPATSQPLPGVRPQGMSKKPQKPKHSSPGKKPAGRKTRSPRLWREKIMTQIEMRSQGPNFPHTGQDCLAYPRIVENSAVATPTSELPKFWGLQSPLPTAWEASCPDAMHPLVTGSHLSIPQDRKGSNSPREPRAVLG

SEQ ID NO: 841801 - protein, 139 aa, Homo sapiens
HPQETVEALGALAWPGCRLHGRAGRCLLSQLPRLSAASRSPTQGWGSVPPTHTRRLPQEEQAGPRAAGWAAGRSDLAGESAIPAIASDKLGLLWPQHRFNTHCAMCQLLHTHLHTQLTGSKAGKEGTGPRPHRCCELGL

SEQ ID NO: 841802 - protein, 136 aa, Homo sapiens
AAARTVAAQGLRGLLGGHTAGPGRGVSLQGAPQAQGPSGDSTVTRPAGGSQFCVSGARSTDSTLTALCASCCTLTSTPNSQEARLGRRELAPGHTDAASWDYDRVQWLTPVIPALGEAKASGLLEPRSLRPAWATW

SEQ ID NO: 841803 - protein, 146 aa, Homo sapiens
AAARTVAAQGLRGLLGGHTAGPGRGVSLQGAPQAQGPSGDSTVTRPAGGSQFCVSGARSTGWVGAGAGAAEVGKAWGAQALGVESRQEAPVGTTPGPRLPPVLPPTHGHGHQEQRDLGSPRDSAGRAQTSGVRAREGQLPASCFLG

SEQ ID NO: 841804 - protein, 158 aa, Homo sapiens
MASRSMRLLLLLSCLAKTGVLGDIIMRPSCAPGWFYHKSNCYGYFRKLRNWSDAELECQSYGNGAHLASILSLKEASTIAEYISGYQRSQPIWIGLHDPQKRQQWQWIDGAMYLYRSWSGKSMGGNKHCAEMSSNNNFLTWSSNECNKRQHFLCKYRP

SEQ ID NO: 841805 - protein, 158 aa, Homo sapiens; identical to SEQ ID NO: 841804

SEQ ID NO: 841806 - protein, 119 aa, Homo sapiens
MASRSMRLLLLLSCLAKTGVLGDIIMRPSCAPGWFYHKSNCYGYFRKLRNWSDAELECQSYGNGAHLASILSLKEASTIAEYISGYQRSQPIWIGLHDPQKPSHSTPACFSFGHRKVYQ

SEQ ID NO: 841807 - protein, 158 aa, Homo sapiens; identical to SEQ ID NO: 841804

SEQ ID NO: 841808 - protein, 74 aa, Homo sapiens
RDIHFSIEVRLQEDPLKRQQWQWIDGAMYLYRSWSGKSMGGNKHCAEMSSNNNFLTWSSNECNKRQHFLCKYRP

SEQ ID NO: 841809 - protein, 487 aa, Homo sapiens
AIAAMASLLWGGDAGAAESERLNSHFSNLSQPRKNLWGIKSTAVRNIDGSINNINEDDEEDVVDLAANSLLNKLIHQSLVESSHRVEVLQKDPSSPLYSVKTFEELRLKEELLKGIYAMGFNRPSKIQEMALPMMLAHPPQNLIAQSQSGTGKTAAFVLAMLSRVNALELFPQCLCLAPTYELALQTGRVVEQMGKFCVDVQVMYAIRGNRIPRGTDITKQIIIGTPGTVLDWCFKLKLIDLTKIRVFVLDEADVMIDTQGFSDHSIRIQRALPSECQMLLFSATFEDSVWHFAERIIPDPNVIKLRKEELTLNNIRQYYVLCEHRKDKYQALCNIYGSITIGQAIIFCQTRRNAKWLTVEMIQDGHQVSLLSGELTVEQRASIIQRFRDGKEKVLITTNVCARGIDVKQVTIVVNFDLPVKQGEEPDYETYLHRIGRTGRFGKKGLAFNMIEVDELPSLMKIQDHFNSSIKQLNAEDMDEIEKIDY

SEQ ID NO: 841810 - protein, 487 aa, Homo sapiens; identical to SEQ ID NO: 841809

SEQ ID NO: 841811 - protein, 476 aa, Homo sapiens
KGGIVVLRYNNRKKFSNLSQPRKNLWGIKSTAVRNIDGSINNINEDDEEDVVDLAANSLLNKLIHQSLVESSHRVEVLQKDPSSPLYSVKTFEELRLKEELLKGIYAMGFNRPSKIQEMALPMMLAHPPQNLIAQSQSGTGKTAAFVLAMLSRVNALELFPQCLCLAPTYELALQTGRVVEQMGKFCVDVQVMYAIRGNRIPRGTDITKQIIIGTPGTVLDWCFKLKLIDLTKIRVFVLDEADVMIDTQGFSDHSIRIQRALPSECQMLLFSATFEDSVWHFAERIIPDPNVIKLRKEELTLNNIRQYYVLCEHRKDKYQALCNIYGSITIGQAIIFCQTRRNAKWLTVEMIQDGHQVSLLSGELTVEQRASIIQRFRDGKEKVLITTNVCARGIDVKQVTIVVNFDLPVKQGEEPDYETYLHRIGRTGRFGKKGLAFNMIEVDELPSLMKIQDHFNSSIKQLNAEDMDEIEKIDY

SEQ ID NO: 841812 - protein, 487 aa, Homo sapiens; identical to SEQ ID NO: 841809

SEQ ID NO: 841813 - protein, 79 aa, Homo sapiens
FLCLPVELLAPRHGGLGIRSQWPYAGGWSRGSAARLAAVVGSDGDRSAAGAMCQVVPVPANHLPVGSTVNTVHLSSDGT

SEQ ID NO: 841814 - protein, 79 aa, Homo sapiens; identical to SEQ ID NO: 841813

SEQ ID NO: 841815 - protein, 79 aa, Homo sapiens; identical to SEQ ID NO: 841813

SEQ ID NO: 841816 - protein, 147 aa, Homo sapiens
EKEGNSTAIKAVLKGIVQLLKTILRLHISQWSTSPDLRVSLRTAIMKPSGLTGMSLPLLENQIKNRECVPLQNVIQAGRKGSCILEECSKNKCKITVAGTGQGMGQEAGPLQTIGPWQPPKIGQKCTCRMRSCDHLSLKDSVLFQLE

SEQ ID NO: 841817 - protein, 247 aa, Homo sapiens
HFKSILERHRIIHTEEKPYKCNECGKTFRQKSILTRHHRLHTGEKPYKCNECGKTFSHKSSLTCHHRLHTGEKPYKCNECGKTFSHKSSLTCHRRLHTGEKPYKCEECDKAYSFRSNFEIHRKIHTEDNAYKCNECGKTFSRTSSLTCHRRRHTGEQPYKCEECDKAFRFKSNLERHRRIHTGEKPYKCNECGKTFSRKSYLTCHHRLHTGEKAYKCNECGKTFSWKSSLTCHRRLHSGEKPYKCKE

SEQ ID NO: 841818 - protein, 128 aa, Homo sapiens
CPVCGALFWQPALTHKPTSDLGPDWVQAYTAWPAQPLSAFTASCSFHCSGILILAFLVGHCSPDHFIWAGMRRQGGPQGHSCPSAVLPYLSYPLDHAKCLSYAVFCSLVNAYNRHILSIHDVPAAPQL

SEQ ID NO: 841819 - protein, 124 aa, Homo sapiens
LTLILSYPQYRLPQLIILLLTSKMPSLPSPYIPLPSPFLPLLGLTLTPTSPNNSPGPSCPKVSETAHTTLARPSPVTCFLFVHLFPISFNMWMTFFFAAPLTNPPSKTLSCFFNTSTPRGTEYP

SEQ ID NO: 841820 - protein, 174 aa, Homo sapiens
TVKTTDTRGGSPKTSASLGLGTSLRTVGSWLKDLGSPEAATEPRTTSVQKSNHLVLYSAARDNHILLLLHPKAPMESSDVELDLQRSVQAVLRELSTQAPALQSNQGMWRWSLHKKVERDPGKSPVLVRILLRELEKVSSWTSGRKTGMKGREGPIGQGLSPGSAISHKLWLPA

SEQ ID NO: 841821 - protein, 71 aa, Homo sapiens
SILRACAHPLNISVMRTYCVPGTVLSAGEALLSWGLQSRTQVITTQIKGKTTLSSGALQNRSVELMELIGA

SEQ ID NO: 841822 - protein, 91 aa, Homo sapiens
CFRNNLTARYEAGWCERWASLGTTGTSAAKPGARESPTTRSGSMSWGAQLPTPRFGPRRIHTVRVRGGNKKYRALRLDRGEFLLGLRVLYS

SEQ ID NO: 841823 - protein, 91 aa, Homo sapiens; identical to SEQ ID NO: 841822

SEQ ID NO: 841824 - protein, 69 aa, Homo sapiens
KKKTEASGGRVLIGRGRAMGISRDNWHKRRKTGGKRKPYHKKRKYELGRPAANTKIWPPPHPHSPCAGR

SEQ ID NO: 841825 - protein, 141 aa, Homo sapiens
MEPKAAGGRSLYTHRIKKKTPRGGGQHRDALSWEDTQLPHKEREGSLERGDYIAGGALYNTKEGGEFPKEAGRRAKYISEKYMRPPGQFRGGSTRYAKTREHTTNDKPHSKKTTKQKRKKSKNIRSTKQKKETSRQNNKLK

SEQ ID NO: 841826 - protein, 82 aa, Homo sapiens
AARANYGCEKRQKGKTRIIDVVYNASNNELVRTKTLVKNCIVLIDSTPYRQWYESHYALPLGRKKGAKLTPEEEEILNKKTI

SEQ ID NO: 841827 - protein, 39 aa, Homo sapiens
MRPGSNTCFSATHVLGTKGDKLGGTLRGRIIILKGRVHL

SEQ ID NO: 841828 - protein, 32 aa, Homo sapiens
MFGPPRRNARQNAKRSPNRRGNPVVVHATPLP

SEQ ID NO: 841829 - protein, 91 aa, Homo sapiens; identical to SEQ ID NO: 841822

SEQ ID NO: 841830 - protein, 91 aa, Homo sapiens; identical to SEQ ID NO: 841822

SEQ ID NO: 841831 - protein, 91 aa, Homo sapiens; identical to SEQ ID NO: 841822

SEQ ID NO: 841832 - protein, 91 aa, Homo sapiens; identical to SEQ ID NO: 841822

SEQ ID NO: 841833 - protein, 91 aa, Homo sapiens; identical to SEQ ID NO: 841822

SEQ ID NO: 841834 - protein, 91 aa, Homo sapiens; identical to SEQ ID NO: 841822

SEQ ID NO: 841835 - protein, 91 aa, Homo sapiens; identical to SEQ ID NO: 841822

SEQ ID NO: 841836 - protein, 91 aa, Homo sapiens; identical to SEQ ID NO: 841822

SEQ ID NO: 841837 - protein, 91 aa, Homo sapiens; identical to SEQ ID NO: 841822

SEQ ID NO: 841838 - protein, 91 aa, Homo sapiens; identical to SEQ ID NO: 841822

SEQ ID NO: 841839 - protein, 91 aa, Homo sapiens; identical to SEQ ID NO: 841822

SEQ ID NO: 841840 - protein, 91 aa, Homo sapiens; identical to SEQ ID NO: 841822

SEQ ID NO: 841841 - protein, 91 aa, Homo sapiens; identical to SEQ ID NO: 841822

SEQ ID NO: 841842 - protein, 91 aa, Homo sapiens; identical to SEQ ID NO: 841822

SEQ ID NO: 841843 - protein, 91 aa, Homo sapiens; identical to SEQ ID NO: 841822

SEQ ID NO: 841844 - protein, 91 aa, Homo sapiens; identical to SEQ ID NO: 841822

SEQ ID NO: 841845 - protein, 91 aa, Homo sapiens; identical to SEQ ID NO: 841822

SEQ ID NO: 841846 - protein, 91 aa, Homo sapiens; identical to SEQ ID NO: 841822

SEQ ID NO: 841847 - protein, 88 aa, Homo sapiens
CFRNNLTARYEAGWCERWASLGTTGTSAAKPGARESPTTRSGSMSWGAQLPTPRFGPRRIHTVRVRGGNKKYRALRLDRGEFLLGLRV

SEQ ID NO: 841848 - protein, 88 aa, Homo sapiens; identical to SEQ ID NO: 841847

SEQ ID NO: 841849 - protein, 91 aa, Homo sapiens; identical to SEQ ID NO: 841822

SEQ ID NO: 841850 - protein, 89 aa, Homo sapiens
RPLLLLNWGRSDAERWASLGTTGTSAAKPGARESPTTRSGSMSWGAQLPTPRFGPRRIHTVRVRGGNKKYRALRLDRGEFLLGLRVLYS

SEQ ID NO: 841851 - protein, 94 aa, Homo sapiens
MSWGAQLPTPRFGPRRIHTVRVRGGNKKYRALRLDVGNFSWGSECCTRKTRIIDVVYNASNNELVRTKTWERFHLSRRPPNAVDRHYASRTKRS

SEQ ID NO: 841852 - protein, 91 aa, Homo sapiens; identical to SEQ ID NO: 841822

SEQ ID NO: 841853 - protein, 91 aa, Homo sapiens; identical to SEQ ID NO: 841822

SEQ ID NO: 841854 - protein, 91 aa, Homo sapiens; identical to SEQ ID NO: 841822

SEQ ID NO: 841855 - protein, 91 aa, Homo sapiens; identical to SEQ ID NO: 841822

SEQ ID NO: 841856 - protein, 91 aa, Homo sapiens; identical to SEQ ID NO: 841822

SEQ ID NO: 841857 - protein, 91 aa, Homo sapiens; identical to SEQ ID NO: 841822

SEQ ID NO: 841858 - protein, 91 aa, Homo sapiens; identical to SEQ ID NO: 841822

SEQ ID NO: 841859 - protein, 91 aa, Homo sapiens; identical to SEQ ID NO: 841822

SEQ ID NO: 841860 - protein, 91 aa, Homo sapiens; identical to SEQ ID NO: 841822

SEQ ID NO: 841861 - protein, 91 aa, Homo sapiens; identical to SEQ ID NO: 841822

SEQ ID NO: 841862 - protein, 91 aa, Homo sapiens; identical to SEQ ID NO: 841822

SEQ ID NO: 841863 - protein, 81 aa, Homo sapiens
ISSVPPPYPWGISPGAQSVVLVKQGIIDVVYNASNNELGSYQDPWVKNCIVLIDSTPYRQWYESHFMRCPWAAKKGAKLDS

SEQ ID NO: 841864 - protein, 88 aa, Homo sapiens; identical to SEQ ID NO: 841847

SEQ ID NO: 841865 - protein, 91 aa, Homo sapiens; identical to SEQ ID NO: 841822

SEQ ID NO: 841866 - protein, 50 aa, Homo sapiens
MASGRSWVGRKTFVTPGRPFEKSRLDHNLKLIGEYVPRNKREVGGVNFPW

SEQ ID NO: 841867 - protein, 91 aa, Homo sapiens; identical to SEQ ID NO: 841822

SEQ ID NO: 841868 - protein, 37 aa, Homo sapiens
KIKQAEKYFHLLSTKFTTHFIYAHILAFIFVTKDEHF

SEQ ID NO: 841869 - protein, 111 aa, Homo sapiens [sequence omitted]

SEQ ID NO: 841870 - protein, 658 aa, Homo sapiens
SSSLKINCLHIAFFAPKLFPLVVLRGDAQGAPPFKNWIMNNFILLEEQLIKKSQQKRRTSPSNFKVRFFVLTKASLAYFEDRHGKKRTLKGSIELSRIKCVEIVKSDISIPCHYKYPFQVVHDNYLLYVFAPDRESRQRWVLALKEETRNNNSLVPKYHPNFWMDGKWRCCSQLEKLATGCAQYDPTKNASKKPLPPTPEDNRRPLWEPEETVVIALYDYQTNDPQELALRRNEEYCLLDSSEIHWWRVQDRNGHEGYVPSSYLVEKSPNNLETYEWYNKSISRDKAEKLLLDTGKEGAFMVRDSRTAGTYTVSVFTKAVVSENNPCIKHYHIKETNDNPKRYYVAEKYVFDSIPLLINYHQHNGGGLVTRLRYPVCFGRQKAPVTAGLRYGKWVIDPSELTFVQEIGSGQFGLVHLGYWLNKDKVAIKTIREGAMSEEDFIEEAEVMMKLSHPKLVQLYGVCLEQAPICLVFEFMEHGCLSDYLRTQRGLFAAETLLGMCLDVCEGMAYLEEACVIHRDLAARNCLVGENQVIKVSDFGMTRFVLDDQYTSSTGTKFPVKWASPEVFSFSRYSSKSDVWSFGVLMWEVFSEGKIPYENRSNSEVVEDISTGFRLYKPRLASTHVYQIMNHCWKERPEDRPAFSRLLRQLAEIAESGL

SEQ ID NO: 841871 - protein, 620 aa, Homo sapiens
MNNFILLEEQLIKKSQQKRRTSPSNFKVRFFVLTKASLAYFEDRHGKKRTLKGSIELSRIKCVEIVKSDISIPCHYKYPFQVVHDNYLLYVFAPDRESRQRWVLALKEETRNNNSLVPKYHPNFWMDGKWRCCSQLEKLATGCAQYDPTKNASKKPLPPTPEDNRRPLWEPEETVVIALYDYQTNDPQELALRRNEEYCLLDSSEIHWWRVQDRNGHEGYVPSSYLVEKSPNNLETYEWYNKSISRDKAEKLLLDTGKEGAFMVRDSRTAGTYTVSVFTKAVVSENNPCIKHYHIKETNDNPKRYYVAEKYVFDSIPLLINYHQHNGGGLVTRLRYPVCFGRQKAPVTAGLRYGKWVIDPSELTFVQEIGSGQFGLVHLGYWLNKDKVAIKTIREGAMSEEDFIEEAEVMMKLSHPKLVQLYGVCLEQAPICLVFEFMEHGCLSDYLRTQRGLFAAETLLGMCLDVCEGMAYLEEACVIHRDLAARNCLVGENQVIKVSDFGMTRFVLDDQYTSSTGTKFPVKWASPEVFSFSRYSSKSDVWSFGVLMWEVFSEGKIPYENRSNSEVVEDISTGFRLYKPRLASTHVYQIMNHCWKERPEDRPAFSRLLRQLAEIAESGL

SEQ ID NO: 841872 - protein, 223 aa, Homo sapiens
MKFVPCLLLVTLSCLGTLGQAPRQKQGSTGEEFHFQTGGRDSCTMRPSSLGQGAGEVWLRVDCRNTDQTYWCEYRGQPSMCQAFAADPKPYWNQALQELRRLHHACQGAPVLRPSVCREAGPQAHMQQVTSSLKGSPEPNQQPEAGTPSLRPKATVKLTEATQLGKDSMEELGKAKPTTRPTAKPTQPGPRPGGNEEAKKKAWEHCWKPFQALCAFLISFFRG

SEQ ID NO: 841873 - protein, 372 aa, Homo sapiens
GDRPRRASAAEGRPSKEGFSGRGETIQGSEWGLKFSLKFWPTSVSKVPPFKGLSILTLPPAATSTWAPRSRSSSLPDFPLAHPVQSQPGLSAHMAPAHQHSGALHQSLTPLPTLQFQDVTGPSFLPQALHQQYLLQQQLLEAQHRRLVSHPRRSQERVSVHPHRLHPSFDFGQLQTPQPRYLAEGTDWDLSVDAGLSPAQFQVRPIPQHYQHYLATPRMHHFPRNSSSTQMVVHEIRNYPYPQLHFLALQGLNPSRHTSAVRESYEELLQLEDRLGNVTRGAVQNTIERFTFPHKYKKRRPQDGKGKKDEGEESDTDEKCTICLSMLEDGEDVRRLPCMHLFHQLCVDQWLAMSKKCPICRVDIETQLGADS

SEQ ID NO: 841874 - protein, 101 aa, Homo sapiens
QICKEFQDLLSQDRSPLGSSRPTPILDLDIQRHLTHFSLITHGFGTPAICAALSTFQTVLSEMLNYLEKHTTHKNGGAADSGQGHANSEKAPLRKTSEAAV

SEQ ID NO: 841875 - protein, 98 aa, Homo sapiens
MGTRAARKQDSGFPSALGAPGTNPTEHVPQETMQGQNQPPASPLTGLSRPRLSSHSLSASQEPGPGLGPAVQRPWVTPHQRDPSTAQKREAMPLSGKP

SEQ ID NO: 841876 - protein, 66 aa, Homo sapiens
MAIYIELKLDQSKNSACEARSHTSVLRSHAWRTALVLESADVEHSLHRESSLDGAGLQRPLPRECT

SEQ ID NO: 841877 - protein, 74 aa, Homo sapiens
LLAYGVAILYFFIFLINWFHLSLWTRSEFFLARDPRTPSGGLDRDPCLVTTADISLQHIELCVDVLELASCELT

SEQ ID NO: 841878 - protein, 40 aa, Homo sapiens
MEWKRLRASPGLVNYQISVKCSNQFLILQFLILGAIPQLG

SEQ ID NO: 841879 - protein, 132 aa, Homo sapiens
MEWKRLRASPGLVNYQISVKCSNQFKLEVCLLNAENKVVDNQAGTQGQLKVLGANLWWPYLMHEHPAYLYSWEVWLTAQKSLGPLTSTHSLWGSALWPSPRASSSSAGNLSISTASTSMRMRTCVGAPGSSW

SEQ ID NO: 841880 - protein, 183 aa, Homo sapiens
MEWKPCRASPGLVNYQISVKCSNQFKLEVCLLNAENKVVDNQAGTQGQLKVLGANLWWPYLMHEHPAYLYIVGGVADCTEVTGAFDFYTLPVGLRTVAVTESQFLISGKPFYFHGVNKHEDADIQGKGFDCPLLVKDFNLLCWLGANTFCPSHYPYTEEMLQICYRYGIVVIDECPAVGLMLP

SEQ ID NO: 841881 - protein, 590 aa, Homo sapiens
MDSVVFEDVAVDFTLEEWALLDSAQRDLYRDVMLETFQNLASVDDETQFKASGSVSQQDIYGEKIPKESKIATFTRNVSWASVLGKIWDSLSIEDQTTNQGRNLSRNHGLERLCESNDQCGEALSQIPHLNLYKKIPPGVKQYEYNTYGKVFMHRRTSLKSPITVHTGHKPYQCQECGQAYSCRSHLRMHVRTHNGERPYVCKLCGKTFPRTSSLNRHVRIHTAEKTYECKQCGKAFIDFSSLTSHLRSHTGEKPYKCKECGKAFSYSSTFRRHTITHTGEKPYKCKECAEAFSYSSTFRRHMISHTGEKPHKCKECGEAFSYSSAFRRHMITHTGEKPYECKQCGKTFIYLQSFRRHERIHTGEKPYECKQCGKTFIYPQSFRRHERTHGGEKPYECNQCGKAFSHPSSFRGHMRVHTGEKPYECKQCGKTFNWPISLRKHMRTHTREKPYECKQCGKAFSLSACFREHVRMHPEDKSYECKLCGKAFYCHISLQKHMRRHTAEKLYKCKQCGKAFSWPELLQQHVRTHTVEKPYECKECGKVFKWPSSLPIHMRLHTGEKPYQCKHCGKAFNCSSSLRRHVRIHTTEK

SEQ ID NO: 841882 - protein, 491 aa, Homo sapiens
MLLIFSRNHGLERLCESNDQCGEALSQIPHLNLYKKIPPGVKQYEYNTYGKVFMHRRTSLKSPITVHTGHKPYQCQECGQAYSCRSHLRMHVRTHNGERPYVCKLCGKTFPRTSSLNRHVRIHTAEKTYECKQCGKAFIDFSSLTSHLRSHTGEKPYKCKECGKAFSYSSTFRRHTITHTGEKPYKCKECAEAFSYSSTFRRHMISHTGEKPHKCKECGEAFSYSSAFRRHMITHTGEKPYECKQCGKTFIYLQSFRRHERIHTGEKPYECKQCGKTFIYPQSFRRHERTHGGEKPYECNQCGKAFSHPSSFRGHMRVHTGEKPYECKQCGKTFNWPISLRKHMRTHTREKPYECKQCGKAFSLSACFREHVRMHPEDKSYECKLCGKAFYCHISLQKHMRRHTAEKLYKCKQCGKAFSWPELLQQHVRTHTVEKPYECKECGKVFKWPSSLPIHMRLHTGEKPYQCKHCGKAFNCSSSLRRHVRIHTTEK

SEQ ID NO: 841883 - protein, 107 aa, Homo sapiens
RNSSSVPSLGDSRVTPRVHAANSPLSNVTPVKSLPGIWGCIPGSLCSELSEASDCCNKSNGRDLLQHHPSSFCFPMRAEIQCVCRGLRVRVSREFPIWRKGRKGERD

SEQ ID NO: 841884 - protein, 78 aa, Homo sapiens
LRQSRSKMAAVGVFSVSRLLGRSRPQLGRPMSSGAHGEEGSARMWKTLTFFVALPISASGPSRFPGEMVTILYSITLM

SEQ ID NO: 841885 - protein, 116 aa, Homo sapiens
SVPRHQKHHLPRPPRAPRLCAGSNSDTARLGSSNSDHGPRIMASPELMPPHRGARGHAPCSLEAGSPQPLDRLTPLPTSLTDGQVRWFTPVILALWEAVECGSPDVRSLRPAWPTR

SEQ ID NO: 841886 - protein, 119 aa, Homo sapiens
CGPRPLSEPELSPTLQKPLGSLILSPLASGGRRSGCHTGSLVLHGTHPTCHVVSFTVMPRASPSALELSQGRDGIFLVSAAPTSPSSQHRVWPVFLNEKARCHITVGNAIQAQSQKVPT

SEQ ID NO: 841887 - protein, 124 aa, Homo sapiens
ISLGDSPRRARGHAVKNSSHVDRRSMPSMGYMTHTVSAPSLHGKSADDTYLQLKKDLEYLDLKMTGRDLLKDRSLKPVKIAESDTDVKLSIFCEQDRVLQDLEDKIRALKENKDQLESVLEVLH

SEQ ID NO: 841888 - protein, 117 aa, Homo sapiens [sequence omitted]

SEQ ID NO: 841889 - protein, 140 aa, Homo sapiens
VARGYLEDPRAAQMMPTSRNMHIPGLIWPRGLPEHRDDLPISQEHKPQPGVQSSHKMLLLKKEADLEATASLLSPWGENSLVGSLYSILAQGNHMILHLHAPILRWLSLRFSPDILQLTTFLSVISLGDMVISREHHVGV

SEQ ID NO: 841890 - protein, 143 aa, Homo sapiens
NLTYRVLEKHRVVLHSRMPTSRNMHIPGLIWPRGLPEHRDDLPISQEHKPQPGVQSSHKMLLLKKEADLEATASLLSPWGENSLVGSLYSILAQGNHMILHLHAPILRWLSLRFSPDILQLTTFLSVISLGDMVISREHHVGV

SEQ ID NO: 841891 - protein, 68 aa, Homo sapiens
SEHLCSAASLGYCNSLLFPRSFIPQTFTECQLCVGTMLGARVRVMNKKVLGALPSLVPSNRFSQAEQE

SEQ ID NO: 841892 - protein, 85 aa, Homo sapiens
FRALLPKSALQVEEESWNAYPYTRTRYTCPFVEKFSIEIETYYLPDGGQQPNVFNLSSEPGSELRGEGTILMDNFFRNKLLSIHL

SEQ ID NO: 841893 - protein, 1354 aa, Homo sapiens
MSLPRGISQDRSPLVKVRSNSLKAPSTHVTKPSFSQKSFVSMKDQRPVNHLHQNSLLNQQTWVRTDSAPDQQVETGKSPSLSGASAKPAPQSSENAGTSDLELPVSQRNQDLSLQEAETEQSDTLDNKEAVILREKPPSGRQTPQPLRHQSYILAVNDQETGSDTTCWLPNDARREVHIKRMEERKASSTSPPGDSLASIPFIDEPTSPSIDHDIAHIPASAVISASTSQVPSIATVPPCLTTSAPLIRRQLSHDHESVGPPSLDAQPNSKTERSKSYDEGLDDYREDAKLSFKHVSSLKGIKIADSQKSSEDSGSRKDSSSEVFSDAAKEGWLHFRPLVTDKGKRVGGSIRPWKQMYVVLRGHSLYLYKDKREQTTPSEEEQPISVNACLIDISYSETKRKNVFRLTTSDCECLFQAEDRDDMLAWIKTIQESSNLNEEDTGVTNRDLISRRIKEYNNLMSKAEQLPKTPRQSLSIRQTLLGAKSEPKTQSPHSPKEESERKLLSKDDTSPPKDKGTWRKGIPSIMRKTFEKKPTATGTFGVRLDDCPPAHTNRYIPLIVDICCKLVEERGLEYTGIYRVPGNNAAISSMQEELNKGMADIDIQDDKWRDLNVISSLLKSFFRKLPEPLFTNDKYADFIEANRKEDPLDRLKTLKRLIHDLPEHHYETLKFLSAHLKTVAENSEKNKMEPRNLAIVFGPTLVRTSEDNMTHMVTHMPDQYKIVETLIQHHDWFFTEEGAEEPLTTVQEESTVDSQPVPNIDHLLTNIGRTGVSPGDVSDSATSDSTKSKGSWGSGKDQYSRELLVSSIFAAASRKRKKPKEKAQPSSSEDELDNVFFKKENVEQCHNDTKEESKKESETLGRKQKIIIAKENSTRKDPSTTKDEKISLGKESTPSEEPSPPHNSKHNKSPTLSCRFAILKESPRSLLAQKSSHLEETGSDSGTLLSTSSQASLARFSMKKSTSPETKHSEFLANVSTITSDYSTTSSATYLTSLDSSRLSPEVQSVAESKGDEADDERSELISEGRPVETDSESEFPVFPTALTSERLFRGKLQEVTKSSRRNSEGSELSCTEGSLTSSLDSRRQLFSSHKLIECDTLSRKKSARFKSDSGSLGDAKNEKEAPSLTKVFDVMKKGKSTGSLLTPTRGESEKQEPTWKTKIADRLKLRPRAPADDMFGVGNHKVNAETAKRKSIRRRHTLGGHRDATEISVLNFWKVHEQSGERESELSAVNRLKPKCSAQDLSISDWLARERLRTSTSDLSRGEIGDPQTENPSTREIATTDTPLSLHCNTGSSSSTLASTNRPLLSIPPQSPDQINGESFQNVSKNASSAANAQPHKLSETPGTKAEFHPCL

SEQ ID NO: 841894 - protein, 1307 aa, Homo sapiens
MSLPRGISQDRSPLVKVRSNSLKAPSTHVTKPSFSQKSFVSMKDQRPVNHLHQNSLLNQQTWVRTDSAPDQQVETGKSPSLSGASAKPAPQSSENAGTSDLELPVSQRNQDLSLQEAETEQSDTLDNKEAVILREKPPSGRQTPQPLRHQSYILAVNDQETGSDTTCWLPNDARREVHIKRMEERKASSTSPPGDSLASIPFIDEPTSPSIDHDIAHIPASAVISASTSQVPSIATVPPCLTTSAPLIRRQLSHDHESVGPPSLDAQPNSKTERSKSYDEGLDDYREDAKLSFKHVSSLKGIKIADSQKSSEDSGSRKDSSSEVFSDAAKEGWLHFRPLVTDKGKTSLTVRPRGKMCFDSPRPTVNACFRLKTEMIMLAWIKTIQESSNLNEEDTGVTNRDLISRRIKEYNNLMSKAEQLPKTPRQSLSIRQTLLGAKSEPKTQSPHSPKEESERKLLSKDDTSPPKDKGTWRKGIPSIMRKTFEKKPTATGTFGVRLDDCPPAHTNRYIPLIVDICCKLVEERGLEYTGIYRVPGNNAAISSMQEELNKGMADIDIQDDKWRDLNVISSLLKSFFRKLPEPLFTNDKYADFIEANRKEDPLDRLKTLKRLIHDLPEHHYETLKFLSAHLKTVAENSEKNKMEPRNLAIVFGPTLVRTSEDNMTHMVTHMPDQYKIVETLIQHHDWFFTEEGAEEPLTTVQEESTVDSQPVPNIDHLLTNIGRTGVSPGDVSDSATSDSTKSKGSWGSGKDQYSRELLVSSIFAAASRKRKKPKEKAQPSSSEDELDNVFFKKENVEQCHNDTKEESKKESETLGRKQKIIIAKENSTRKDPSTTKDEKISLGKESTPSEEPSPPHNSKHNKSPTLSCRFAILKESPRSLLAQKSSHLEETGSDSGTLLSTSSQASLARFSMKKSTSPETKHSEFLANVSTITSDYSTTSSATYLTSLDSSRLSPEVQSVAESKGDEADDERSELISEGRPVETDSESEFPVFPTALTSERLFRGKLQEVTKSSRRNSEGSELSCTEGSLTSSLDSRRQLFSSHKLIECDTLSRKKSARFKSDSGSLGDAKNEKEAPSLTKVFDVMKKGKSTGSLLTPTRGESEKQEPTWKTKIADRLKLRPRAPADDMFGVGNHKVNAETAKRKSIRRRHTLGGHRDATEISVLNFWKVHEQSGERESELSAVNRLKPKCSAQDLSISDWLARERLRTSTSDLSRGEIGDPQTENPSTREIATTDTPLSLHCNTGSSSSTLASTNRPLLSIPPQSPDQINGESFQNVSKNASSAANAQPHKLSETPGTKAEFHPCL

SEQ ID NO: 841895 - protein, 764 aa, Homo sapiens
MQEELNKGMADIDIQDDKWRDLNVISSLLKSFFRKLPEPLFTNDKYADFIEANRKEDPLDRLKTLKRLIHDLPEHHYETLKFLSAHLKTVAENSEKNKMEPRNLAIVFGPTLVRTSEDNMTHMVTHMPDQYKIVETLIQHHDWFFTEEGAEEPLTTVQEESTVDSQPVPNIDHLLTNIGRTGVSPGDVSDSATSDSTKSKGSWGSGKDQYSRELLVSSIFAAASRKRKKPKEKAQPSSSEDELDNVFFKKENVEQCHNDTKEESKKESETLGRKQKIIIAKENSTRKDPSTTKDEKISLGKESTPSEEPSPPHNSKHNKSPTLSCRFAILKESPRSLLAQKSSHLEETGSDSGTLLSTSSQASLARFSMKKSTSPETKHSEFLANVSTITSDYSTTSSATYLTSLDSSRLSPEVQSVAESKGDEADDERSELISEGRPVETDSESEFPVFPTALTSERLFRGKLQEVTKSSRRNSEGSELSCTEGSLTSSLDSRRQLFSSHKLIECDTLSRKKSARFKSDSGSLGDAKNEKEAPSLTKVFDVMKKGKSTGSLLTPTRGESEKQEPTWKTKIADRLKLRPRAPADDMFGVGNHKVNAETAKRKSIRRRHTLGGHRDATEISVLNFWKVHEQSGERESELSAVNRLKPKCSAQDLSISDWLARERLRTSTSDLSRGEIGDPQTENPSTREIATTDTPLSLHCNTGSSSSTLASTNRPLLSIPPQSPDQINGESFQNVSKNASSAANAQPHKLSETPGTKAEFHPCL

SEQ ID NO: 841896 - protein, 565 aa, Homo sapiens
MGSWGSGKDQYSRELLVSSIFAAASRKRKKPKEKAQPSSSEDELDNVFFKKENVEQCHNDTKEESKKESETLGRKQKIIIAKENSTRKDPSTTKDEKISLGKESTPSEEPSPPHNSKHNKSPTLSCRFAILKESPRSLLAQKSSHLEETGSDSGTLLSTSSQASLARFSMKKSTSPETKHSEFLANVSTITSDYSTTSSATYLTSLDSSRLSPEVQSVAESKGDEADDERSELISEGRPVETDSESEFPVFPTALTSERLFRGKLQEVTKSSRRNSEGSELSCTEGSLTSSLDSRRQLFSSHKLIECDTLSRKKSARFKSDSGSLGDAKNEKEAPSLTKVFDVMKKGKSTGSLLTPTRGESEKQEPTWKTKIADRLKLRPRAPADDMFGVGNHKVNAETAKRKSIRRRHTLGGHRDATEISVLNFWKVHEQSGERESELSAVNRLKPKCSAQDLSISDWLARERLRTSTSDLSRGEIGDPQTENPSTREIATTDTPLSLHCNTGSSSSTLASTNRPLLSIPPQSPDQINGESFQNVSKNASSAANAQPHKLSETPGTKAEFHPCL

SEQ ID NO: 841897 - protein, 1354 aa, Homo sapiens; identical to SEQ ID NO: 841893

SEQ ID NO: 841898 - protein, 252 aa, Homo sapiens
GSPLICWDSGSLGDAKNEKEAPSLTKVFDVMKKGKSTGSLLTPTRGESEKQEPTWKTKIADRLKLRPRAPADDMFGVGNHKVNAETAKRKSIRRRHTLGGHRDATEISVLNFWKVHEQSGERESELSAVNRLKPKCSAQDLSISDWLARERLRTSTSDLSRGEIGDPQTENPSTREIATTDTPLSLHCNTGSSSSTLASTNRPLLSIPPQSPDQINGESFQNVSKNASSAANAQPHKLSETPGTKAEFHPCL

SEQ ID NO: 841899 - protein, 1341 aa, Homo sapiens
MSLPRGISQDRSPLVKVRSNSLKAPSTHVTKPSFSQKSFVSMKDQRPVNHLHQNSLLNQQTWVRTDSAPDQQVETGKSPSLSGASAKPAPQSSENAGTSDLELPVSQRNQDLSLQEAETEQSDTLDNKEAVILREKPPSGRQTPQPLRHQSYILAVNDQETGSDTTCWLPNDARREVHIKRMEERKASSTSPPGDSLASIPFIDEPTSPSIDHDIAHIPASAVISASTSQVPSIATVPPCLTTSAPLIRRQLSHDHESVGPPSLDAQPNSKTERSKSYDEGLDDYREDAKLSFKHVSSLKGIKIADSQKSSEDSGSRKDSSSEVFSDAAKEGWLHFRPLVTDKGKRVGGSIRPWKQMYVVLRGHSLYLYKDKREQTTPSEEEQPISVNACLIDISYSETKRKNVFRLTTSDCECLFQAEDRDDMLAWIKTIQESSNLNEEDTGVTNRDLISRRIKEYNNLMSKAEQLPKTPRQSLSIRQTLLGAKSEPKTQSPHSPKEESERKLLSKDDTSPPKDKGTWRKGIPSIMRKTFEKKPTATGTFGVRLDDCPPAHTNRYIPLIVDICCKLVEERGLEYTGIYRVPGNNAAISSMQEELNKGMADIDIQDDKWRDLNVISSLLKSFFRKLPEPLFTNDKYADFIEANRKEDPLDRLKTLKRLFLSAHLKTVAENSEKNKMEPRNLAIVFGPTLVRTSEDNMTHMVTHMPDQYKIVETLIQHHDWFFTEEGAEEPLTTVQEESTVDSQPVPNIDHLLTNIGRTGVSPGDVSDSATSDSTKSKGSWGSGKDQYSRELLVSSIFAAASRKRKKPKEKAQPSSSEDELDNVFFKKENVEQCHNDTKEESKKESETLGRKQKIIIAKENSTRKDPSTTKDEKISLGKESTPSEEPSPPHNSKHNKSPTLSCRFAILKESPRSLLAQKSSHLEETGSDSGTLLSTSSQASLARFSMKKSTSPETKHSEFLANVSTITSDYSTTSSATYLTSLDSSRLSPEVQSVAESKGDEADDERSELISEGRPVETDSESEFPVFPTALTSERLFRGKLQEVTKSSRRNSEGSELSCTEGSLTSSLDSRRQLFSSHKLIECDTLSRKKSARFKSDSGSLGDAKNEKEAPSLTKVFDVMKKGKSTGSLLTPTRGESEKQEPTWKTKIADRLKLRPRAPADDMFGVGNHKVNAETAKRKSIRRRHTLGGHRDATEISVLNFWKVHEQSGERESELSAVNRLKPKCSAQDLSISDWLARERLRTSTSDLSRGEIGDPQTENPSTREIATTDTPLSLHCNTGSSSSTLASTNRPLLSIPPQSPDQINGESFQNVSKNASSAANAQPHKLSETPGTKAEFHPCL

SEQ ID NO: 841900 - protein, 620 aa, Homo sapiens
AIVIADSRGYNSARRKATVDSQPVPNIDHLLTNIGRTGVSPGDVSDSATSDSTKSKGSWGSGKDQYSRELLVSSIFAAASRKRKKPKEKAQPSSSEDELDNVFFKKENVEQCHNDTKEESKKESETLGRKQKIIIAKENSTRKDPSTTKDEKISLGKESTPSEEPSPPHNSKHNKSPTLSCRFAILKESPRSLLAQKSSHLEETGSDSGTLLSTSSQASLARFSMKKSTSPETKHSEFLANVSTITSDYSTTSSATYLTSLDSSRLSPEVQSVAESKGDEADDERSELISEGRPVETDSESEFPVFPTALTSERLFRGKLQEVTKSSRRNSEGSELSCTEGSLTSSLDSRRQLFSSHKLIECDTLSRKKSARFKSDSGSLGDAKNEKEAPSLTKVFDVMKKGKSTGSLLTPTRGESEKQEPTWKTKIADRLKLRPRAPADDMFGVGNHKVNAETAKRKSIRRRHTLGGHRDATEISVLNFWKVHEQSGERESELSAVNRLKPKCSAQDLSISDWLARERLRTSTSDLSRGEIGDPQTENPSTREIATTDTPLSLHCNTGSSSSTLASTNRPLLSIPPQSPDQINGESFQNVSKNASSAANAQPHKLSETPGTKAEFHPCL

SEQ ID NO: 841901 - protein, 407 aa, Homo sapiens
MVWELYLNKTVKEIQQGIETKHSEFLANVSTITSDYSTTSSATYLTSLDSSRLSPEVQSVAESKGDEADDERSELISEGRPVETDSESEFPVFPTALTSERLFRGKLQEVTKSSRRNSEGSELSCTEGSLTSSLDSRRQLFSSHKLIECDTLSRKKSARFKSDSGSLGDAKNEKEAPSLTKVFDVMKKGKSTGSLLTPTRGESEKQEPTWKTKIADRLKLRPRAPADDMFGVGNHKVNAETAKRKSIRRRHTLGGHRDATEISVLNFWKVHEQSGERESELSAVNRLKPKCSAQDLSISDWLARERLRTSTSDLSRGEIGDPQTENPSTREIATTDTPLSLHCNTGSSSSTLASTNRPLLSIPPQSPDQINGESFQNVSKNASSAANAQPHKLSETPGTKAEFHPCL

SEQ ID NO: 841902 - protein, 973 aa, Homo sapiens
MSLPRGISQDRSPLVKVRSNSLKAPSTHVTKPSFSQKSFVSMKDQRPVNHLHQNSLLNQQTWVRTDSAPDQQVETGKSPSLSGASAKPAPQSSENAGTSDLELPVSQRNQDLSLQEAETEQSDTLDNKEAVILREKPPSGRQTPQPLRHQSYILAVNDQETGSDTTCWLPNDARREVHIKRMEERKASSTSPPGDSLASIPFIDEPTSPSIDHDIAHIPASAVISASTSQVPSIATVPPCLTTSAPLIRRQLSHDHESVGPPSLDAQPNSKTERSKSYDEGLDDYREDAKLSFKHVSSLKGIKIADSQKSSEDSGSRKDSSSEVFSDAAKEGWLHFRPLVTDKGKRVGGSIRPWKQMYVVLRGHSLYLYKDKREQTTPSEEEQPISVNACLIDISYSETKRKNVFRLTTSDCECLFQAEDRDDMLAWIKTIQESSNLNEEDTGVTNRDLISRRIKEYNNLMSKAEQLPKTPRQSLSIRQTLLGAKSEPKTQSPHSPKEESERKLLSKDDTSPPKDKGTWRKGIPSIMRKTFEKKPTATGTFGVRLDDCPPAHTNRYIPLIVDICCKLVEERGLEYTGIYRVPGNNAAISSMQEELNKGMADIDIQDDKWRDLNVISSLLKSFFRKLPEPLFTNDKYADFIEANRKEDPLDRLKTLKRLIHDLPEHHYETLKFLSAHLKTVAENSEKNKMEPRNLAIVFGPTLVRTSEDNMTHMVTHMPDQYKIVETLIQHHDWFFTEEGAEEPLTTVQEESTVDSQPVPNIDHLLTNIGRTGVSPGDVSDSATSDSTKSKGSWGSGKDQYSRELLVSSIFAAASRKRKKPKEKAQPSSSEDELDNVFFKKENVEQCHNDTKEESKKESETLGRKQKIIIAKENSTRKDPSTTKDEKISLGKESTPSEEPSPPHNSKHNKSPTLSCRFAILKESPRSLLAQKSSHLEETGSDSGTLLSTRLLKPPLPPLAPPLCWDSTEEVTAQ

SEQ ID NO: 841903 - protein, 67 aa, Homo sapiens
VCVCVCVCVCVRCGCGATSTKISKNVADSLGAQEESCCRCGTTAVSTRGMLSGIVGIGLSLQPQNNR

SEQ ID NO: 841904 - protein, 241 aa, Homo sapiens
MTLQWAAVATFLYAEIGLILIFCLPFIPPQRWQKIFSFNVWGKIATFWNKAFLTIIILLIVLFLDAVREVRKYSSVHTIEKSSTSRPDAYEHTQMKLFRSQRNLYISGFSLFFWLVLRRLVTLITQLAKELSNKGVLKTQAENTNKAAKKFMEENEKLKRILKSHGKDEECVLEAENKKLVEDQEKLKTELRKTSDALSKAQNDVMEMKMQSERLSKEYDQLLKEHSELQDRLERGNKKRL

SEQ ID NO: 841905 - protein, 348 aa, Homo sapiens
MTLQWAAVATFLYAEIGLILIFCLPFIPPQRWQKIFSFNVWGKIATFWNKAFLTIIILLIVLFLDAVREVRKYSSVHTIEKSSTSRPDAYEHTQMKLFRSQRNLYISGFSLFFWLVLRRLVTLITQLAKELSNKGVLKTQAENTNKAAKKFMEENEKLKRILKSHGKDEECVLEAENKKLVEDQEKLKTELRKTSDALSKAQNDVMEMKMQSERLSKEYDQLLKEHSELQHSSFGEFLSKRSHKNGSIGKQTGSRKGSFRKRQQEKTVNFIKDTCNILCQNDNFVMLASRKFKFRKMHYDRFVIFLMPHIGCIVMALSKYLMMFQIYCKVCIPALKKNISMLNTIFTY

SEQ ID NO: 841906 - protein, 358 aa, Homo sapiens
MTLQWAAVATFLYAEIGLILIFCLPFIPPQRWQKIFSFNVWGKIATFWNKAFLTIIILLIVLFLDAVREVRKYSSVHTIEKSSTSRPDAYEHTQMKLFRSQRNLYISGFSLFFWLVLRRLVTLITQLAKELSNKGVLKTQAENTNKAAKKFMEENEKLKRILKSHGKDEECVLEAENKKLVEDQEKLKTELRKTSDALSKAQNDVMEMKMQSERLSKEYDQLLKEHSELQVPLGSFYILAFAPGLHNPHPSSPRSGGGFSAIDNPRGSFRKRQQEKTVNFIKDTCNILCQNDNFVMLASRKFKFRKMHYDRFVIFLMPHIGCIVMALSKYLMMFQIYCKVCIPALKKNISMLNTIFTY

SEQ ID NO: 841907 - protein, 241 aa, Homo sapiens; identical to SEQ ID NO: 841904

SEQ ID NO: 841908 - protein, 241 aa, Homo sapiens; identical to SEQ ID NO: 841904

SEQ ID NO: 841909 - protein, 171 aa, Homo sapiens
MTLQWAAVATFLYAEIGLILIFCLPFIPPQRWQKIFSFNVWGKIATFWNKAFLTIIILLIVLFLDAVREVRKYSSVHTIEKSSTSRPDAYEHTQMKLFRSQRNLYISGFSLFFWLVLRRLVTLITQLAKELSNKGVLKTQAENTNKAAKKFMEENEKLKRFLLAKVHCRKL

SEQ ID NO: 841910 - protein, 283 aa, Homo sapiens
RAGKPGVGGGRRWASVAAKLAEKAVASEPPRQFPRLPGVKKKMTLQWAAVATFLYAEIGLILIFCLPFIPPQRWQKIFSFNVWGKIATFWNKAFLTIIILLIVLFLDAVREVRKYSSVHTIEKSSTSRPDAYEHTQMKLFRSQRNLYISGFSLFFWLVLRRLVTLITQLAKELSNKGVLKTQAENTNKAAKKFMEENEKLKRILKSHGKDEECVLEAENKKLVEDQEKLKTELRKTSDALSKAQNDVMEMKMQSERLSKEYDQLLKEHSELQDRLERGNKKRL

SEQ ID NO: 841911 - protein, 337 aa, Homo sapiens
MTLQWAAVATFLYAEIGLILIFCLPFIPPQRWQKIFSFNVWGKIATFWNKAFLTIIILLIVLFLDAVREVRKYSSVHTIEKSSTSRPDAYEHTQMKLFRSQRNLYISGFSLFFWLVLRRLVTLITQLAKELSNKGVLKTQAENTNKAAKKFMEENEKLKRILKSHGKDEECVLEAENKKLVEDQEKLKTELRKTSDALSKAQNDVMEMKMQSERLSKEYDQLLKEHSELQKQREILPHRRGESTVTTEAEIGVMEPQQRNADSHQKLEEAKNRFFPRASSSRSMALQIPIKLILDFLASRTMGINLLFQAIKFVIICYCCHSKLIQEHAGQICNGLN

SEQ ID NO: 841912 - protein, 281 aa, Homo sapiens
MTLQWAAVATFLYAEIGLILIFCLPFIPPQRWQKIFSFNVWGKIATFWNKAFLTIIILLIVLFLDAVREVRKYSSVHTIEKSSTSRPDAYEHTQMKLFRSQRNLYISGFSLFFWLVLRRLVTLITQLAKELSNKGVLKTQAENTNKAAKKFMEENEKLKRILKSHGKDEECVLEAENKKLVEDQEKLKTELRKTSDALSKAQNDVMEMKMQSERLSKEYDQLLKEHSELQVPLGSFYILAFAPGLHNPHPSSPRSGGGFSAIDNPRGALPPCLVCVLFHHL

SEQ ID NO: 841913 - protein, 241 aa, Homo sapiens; identical to SEQ ID NO: 841904

SEQ ID NO: 841914 - protein, 115 aa, Homo sapiens
MTLQWAAVATFLYAEIGLILIFCLPFIPPQRWQKIFSFNVWGKIATFWNKAFLTIIILLIVLFLDAVREVRKYSSVHTIEKSSTSRPDAYEHTQMKLFRSQRNLYISGFSLFFWL

SEQ ID NO: 841915 - protein, 241 aa, Homo sapiens; identical to SEQ ID NO: 841904

SEQ ID NO: 841916 - protein, 284 aa, Homo sapiens
MTLQWAAVATFLYAEIGLILIFCLPFIPPQRWQKIFSFNVWGKIATFWNKAFLTIIILLIVLFLDAVREVRKYSSVHTIEKSSTSRPDAYEHTQMKLFRSQRNLYISGFSLFFWLVLRRLVTLITQLAKELSNKGVLKTQAENTNKAAKKFMEENEKLKRILKSHGKDEECVLEAENKKLVEDQEKLKTELRKTSDALSKAQNDVMEMKMQSERLSKEYDQLLKEHSELQVPLGSFYILAFAPGLHNPHPSSPRSGGGFSAIDNPRGALPPCLDRLERGNKKRL

SEQ ID NO: 841917 - protein, 147 aa, Homo sapiens
MKLFRSQRNLYISGFSLFFWLVLRRLVTLITQLAKELSNKGVLKTQAENTNKAAKKFMEENEKLKRILKSHGKDEECVLEAENKKLVEDQEKLKTELRKTSDALSKAQNDVMEMKMQSERLSKEYDQLLKEHSELQDRLERGNKKRL

SEQ ID NO: 841918 - protein, 218 aa, Homo sapiens
MTLQWAAVATFLYAEIGLILIFCLPFIPPQRWQKIFSFNVWDAVREVRKYSSVHTIEKSSTSRPDAYEHTQMKLFRSQRNLYISGFSLFFWLVLRRLVTLITQLAKELSNKGVLKTQAENTNKAAKKFMEENEKLKRILKSHGKDEECVLEAENKKLVEDQEKLKTELRKTSDALSKAQNDVMEMKMQSERLSKEYDQLLKEHSELQDRLERGNKKRL

SEQ ID NO: 841919 - protein, 241 aa, Homo sapiens; identical to SEQ ID NO: 841904

SEQ ID NO: 841920 - protein, 147 aa, Homo sapiens; identical to SEQ ID NO: 841917

SEQ ID NO: 841921 - protein, 190 aa, Homo sapiens
MKLFRSQRNLYISGFSLFFWLVLRRLVTLITQLAKELSNKGVLKTQAENTNKAAKKFMEENEKLKRILKSHGKDEECVLEAENKKLVEDQEKLKTELRKTSDALSKAQNDVMEMKMQSERLSKEYDQLLKEHSELQVPLGSFYILAFAPGLHNPHPSSPRSGGGFSAIDNPRGALPPCLDRLERGNKKRL

SEQ ID NO: 841922 - protein, 244 aa, Homo sapiens
MTLQWAAVATFLYAEIGLILIFCLPFIPPQRWQKIFSFNVWGKIATFWNKAFLTIIILLIVLFLDAVREVRKYSSVHTIEKSSTSRPDAYEHTQMKLFRSQRNLYISGFSLFFWLVLRRLVTLITQLAKELSNKGVLKTQAENTNKAAKKFMEENEKLKRILKSHGKDEECVLEAENKKLVEDQEKLKTELRKTSDALSKAQNDVMEMKMQSERLSKEYDQLLKEHSELQVFAKLLNYLLMRKW

SEQ ID NO: 841923 - protein, 331 aa, Homo sapiens
MTSPHFSSYDEGPLDVSMAATNLENQLHSAQKNLLFLQREHASTLKGLHSEIRRLQQHCTDLTYELTVKSSEQTGDGTSKSSELKKRCEELEAQLKVKENENAELLKELEQKNAMITVLENTIKEREKKYLEELKAKSHKLTLLSSELEQRASTIAYLTSQLHAAKKKLMSSSGTSDASPSGSPVLASYKPAPPKDKLPETPRRRMKKSLSAPLHPEFEEVYRFGAESRKLLLREPVDAMPDPTPFLLARESAEVHLIKERPLVIPPIASDRSGEQHSPAREKPHKAHVGVAHRIHHATPPQAQPEVKTLAVDQVNGGKVVRKHSGTDRTV

SEQ ID NO: 841924 - protein, 331 aa, Homo sapiens; identical to SEQ ID NO: 841923

SEQ ID NO: 841925 - protein, 331 aa, Homo sapiens; identical to SEQ ID NO: 841923

SEQ ID NO: 841926 - protein, 314 aa, Homo sapiens
MAATNLENQLHSAQKNLLFLQREHASTLKGLHSEIRRLQQHCTDLTYELTVKSSEQTGDGTSKSSELKKRCEELEAQLKVKENENAELLKELEQKNAMITVLENTIKEREKKYLEELKAKSHKLTLLSSELEQRASTIAYLTSQLHAAKKKLMSSSGTSDASPSGSPVLASYKPAPPKDKLPETPRRRMKKSLSAPLHPEFEEVYRFGAESRKLLLREPVDAMPDPTPFLLARESAEVHLIKERPLVIPPIASDRSGEQHSPAREKPHKAHVGVAHRIHHATPPQAQPEVKTLAVDQVNGGKVVRKHSGTDRTV

SEQ ID NO: 841927 - protein, 228 aa, Homo sapiens
PRVTSSSRYFFSRSLMVFSIKEREKKYLEELKAKSHKLTLLSSELEQRASTIAYLTSQLHAAKKKLMSSSGTSDASPSGSPVLASYKPAPPKDKLPETPRRRMKKSLSAPLHPEFEEVYRFGAESRKLLLREPVDAMPDPTPFLLARESAEVHLIKERPLVIPPIASDRSGEQHSPAREKPHKAHVGVAHRIHHATPPQAQPEVKTLAVDQVNGGKVVRKHSGTDRTV

SEQ ID NO: 841928 - protein, 331 aa, Homo sapiens; identical to SEQ ID NO: 841923

SEQ ID NO: 841929 - protein, 331 aa, Homo sapiens; identical to SEQ ID NO: 841923

SEQ ID NO: 841930 - protein, 331 aa, Homo sapiens; identical to SEQ ID NO: 841923

SEQ ID NO: 841931 - protein, 331 aa, Homo sapiens; identical to SEQ ID NO: 841923

SEQ ID NO: 841932 - protein, 314 aa, Homo sapiens; identical to SEQ ID NO: 841926

SEQ ID NO: 841933 - protein, 331 aa, Homo sapiens; identical to SEQ ID NO: 841923

SEQ ID NO: 841934 - protein, 119 aa, Homo sapiens
MLLLLGPLRLPLCPPKRKNPLHLHLVTDAVARNILETLFHTWMVPAVRVSFYHADQLKAGAQPFPPPLSCVHRSPLSKTWWGWRRESSVPPPPTEAQTPLFWGFTPSPLCHCKHVFWCS

SEQ ID NO: 841935 - protein, 721 aa, Homo sapiens
MLPRGRPRALGAAALLLLLLLLGFLLFGGDLGCERREPGGRAGAPGCFPGPLMPRVPPDGRLRRAAALDGDPGAGPGDHNRSDCGPQPPPPPKCELLHVAIVCAGHNSSRDVITLVKSMLFYRKNPLHLHLVTDAVARNILETLFHTWMVPAVRVSFYHADQLKPQVSWIPNKHYSGLYGLMKLVLPSALPAELARVIVLDTDVTFASDISELWALFAHFSDTQAIGLVENQSDWYLGNLWKNHRPWPALGRGFNTGVILLRLDRLRQAGWEQMWRLTARRELLSLPATSLADQDIFNAVIKEHPGLVQRLPCVWNVQLSDHTLAERCYSEASDLKVIHWNSPKKLRVKNKHVEFFRNFYLTFLEYDGNLLRRELFVCPSQPPPGAEQLQQALAQLDEEDPCFEFRQQQLTVHRVHVTFLPHEPPPPRPHDVTLVAQLSMDRLQMLEALCRHWPGPMSLALYLTDAEAQQFLHFVEASPVLAARQDVAYHVVYREGPLYPVNQLRNVALAQALTPYVFLSDIDFLPAYSLYDYLRASIEQLGLGSRRKAALVVPAFETLRYRFSFPHSKVELLALLDAGTLYTFRYHEWPRGHAPTDYARWREAQAPYRVQWAANYEPYVVVPRDCPRYDPRFVGFGWNKVAHIVELDAQEYELLVLPEAFTIHLPHAPSLDISRFRSSPTYRDCLQALKDEFHQDLSRHHGAAALKYLPALQQPQSPARG

SEQ ID NO: 841936 - protein, 744 aa, Homo sapiens
MLPRGRPRALGAAALLLLLLLLGFLLFGGDLGCERREPGGRAGAPGCFPGPLMPRVPPDGRLRRAAALDGDPGAGPGDHNRSDCGPQPPPPPKCELLHVAIVCAGHNSSRDVITLVKSMLFYRKNPLHLHLVTDAVARNILETLFHTWMVPAVRVSFYHADQLKPQVSWIPNKHYSGLYGLMKLVLPSALPAELARVIVLDTDVTFASDISELWALFAHFSDTQAIGLVENQSDWYLGNLWKNHRPWPALGRGFNTGVILLRLDRLRQAGWEQMWRLTARRELLSLPATSLADQAEEALPGGVWQAGGWDVMGVSAQDIFNAVIKEHPGLVQRLPCVWNVQLSDHTLAERCYSEASDLKVIHWNSPKKLRVKNKHVEFFRNFYLTFLEYDGNLLRRELFVCPSQPPPGAEQLQQALAQLDEEDPCFEFRQQQLTVHRVHVTFLPHEPPPPRPHDVTLVAQLSMDRLQMLEALCRHWPGPMSLALYLTDAEAQQFLHFVEASPVLAARQDVAYHVVYREGPLYPVNQLRNVALAQALTPYVFLSDIDFLPAYSLYDYLRASIEQLGLGSRRKAALVVPAFETLRYRFSFPHSKVELLALLDAGTLYTFRYHEWPRGHAPTDYARWREAQAPYRVQWAANYEPYVVVPRDCPRYDPRFVGFGWNKVAHIVELDAQEYELLVLPEAFTIHLPHAPSLDISRFRSSPTYRDCLQALKDEFHQDLSRHHGAAALKYLPALQQPQSPARG

SEQ ID NO: 841937 - protein, 693 aa, Homo sapiens
MLPRGRPRALGAAALLLLLLLLGFLLFGGDLGCERREPGGRAGAPGCFPGPLMPRVPPDGRLRRAAALDGDPGAGPGDHNRSDCGPQPPPPPKCELLHVAIVCAGHNSSRDVITLVKSMLFYRKNPLHLHLVTDAVARNILETLFHTWMVPAVRVSFYHADQLKPQVSWIPNKHYSGLYGLMKLVLPSALPAELARVIVLDTDVTFASDISELWALFAHFSDTQAIGLVENQSDWYLGNLWKNHRPWPALGRGFNTGVILLRLDRLRQAGWEQMWRLTARRELLSLPATSLADQDIFNAVIKEHPGLVQRLPCVWNVQLSDHTLAERCYSEASDLKVIHWNSPKKLRVKNKHVEFFRNFYLTFLEYDGNLLRRELFVCPSQPPPGAEQLQQALAQLDEEDPCFEFRQQQLTVHRVHVTFLPHEPPPPRPHDVTLVAQLSMDRLQMLEALCRHWPGPMSLALYLTDAEAQQFLHFVEASPVLAARQDVAYHVVYREGPLYPVNQLRNVALAQALTPYVFLSDIDFLPAYSLYDYLRASIEQLGLGSRRKAALVVPAFETLRYRFSFPHSKVELLALLDAGTLYTFRYHEWPRGHAPTDYARWREAQAPYRVQWAANYEPYVVVPRDCPRYDPRFVGFGWNKVAHIVELDAQEYELLVLPEAFTIHLPHAPSLDISRAALKYLPALQQPQSPARG

SEQ ID NO: 841938 - protein, 535 aa, Homo sapiens
MLPRGRPRALGAAALLLLLLLLGFLLFGGDLGCERREPGGRAGAPGCFPGPLMPRVPPDGRLRRAAALDGDPGAGPGDHNRSDCGPQPPPPPKCELLHVAIVCAGHNSSRDVITLVKSMLFYRKNPLHLHLVTDAVARNILETLFHTWMVPAVRVSFYHADQLKPQVSWIPNKHYSGLYGLMKLVLPSALPAELARVIVLDTDVTFASDISELWALFAHFSDTQAIGLVENQSDWYLGNLWKNHRPWPALGRGFNTGVILLRLDRLRQAGWEQMWRLTARRELLSLPATSLADQDIFNAVIKEHPGLVQRLPCVWNVQLSDHTLAERCYSEASDLKVIHWNSPKKLRVKNKHVEFFRNFYLTFLEYDGNLLRRELFVCPSQPPPGAEQLQQALAQLDEEDPCFEFRQQQLTVHRVHVTFLPHEPPPPRPHDVTLVAQLSMDRLQMLEALCRHWPGPMSLALYLTDAEAQQFLHFVEASPVLAARQDVAYHVVYREGPLYPVNQLRNVATWRLSTWRLSTLASVHVASVHVDRLVH

SEQ ID NO: 841939 - protein, 498 aa, Homo sapiens
MLPRGRPRALGAAALLLLLLLLGFLLFGGDLGCERREPGGRAGAPGCFPGPLMPRVPPDGRLRRAAALDGDPGAGPGDHNRSDCGPQPPPPPKCELLHVAIVCAGHNSSRDVITLVKSMLFYRKNPLHLHLVTDAVARNILETLFHTWMVPAVRVSFYHADQLKPQVSWIPNKHYSGLYGLMKLVLPSALPAELARVIVLDTDVTFASDISELWALFAHFSDTQAIGLVENQSDWYLGNLWKNHRPWPALGRGFNTGVILLRLDRLRQAGWEQMWRLTARRELLSLPATSLADQDIFNAVIKEHPGLVQRLPCVWNVQLSDHTLAERCYSEASDLKVIHWNSPKKLRVKNKHVEFFRNFYLTFLEYDGNLLRRELFVCPSQPPPGAEQLQQALAQLDEEDPCFEFRQQQLTVHRVHVTFLPHEPPPPRPHDVTLVAQLSMDRTWPTMWCTVRGPYTPSTSFATWPWPRPSRLTSSSVTLTSCLPILSTTTSGGPAGRE

SEQ ID NO: 841940 - protein, 101 aa, Homo sapiens
ASSPEPRSCGSFRQLPYALPSQTRRRSVLWRTRVTGTWATSGRTTGPGLPWAGDLTQVGTVVRGGRRGGLLVLGPLGLGGAKNARKSPRKNIAVKRTLDEE

SEQ ID NO: 841941 - protein, 721 aa, Homo sapiens; identical to SEQ ID NO: 841935

SEQ ID NO: 841942 - protein, 686 aa, Homo sapiens
MLPRGRPRALGAAALLLLLLLLGFLLFGGDLGCERREPGGRAGAPGCFPGPLMPRVPPDGRLRRAAALDGDPGAGPGDHNRSDCGPQPPPPPKCELLHVAIVCAGHNSSRDVITLVKSMLFYRKNPLHLHLVTDAVARNILETLFHTWMVPAVRVSFYHADQLKPQVSWIPNKHYSGLYGLMKLVLPSALPAELARVIVLDTDVTFASDISELWALFAHFSGVILLRLDRLRQAGWEQMWRLTARRELLSLPATSLADQDIFNAVIKEHPGLVQRLPCVWNVQLSDHTLAERCYSEASDLKVIHWNSPKKLRVKNKHVEFFRNFYLTFLEYDGNLLRRELFVCPSQPPPGAEQLQQALAQLDEEDPCFEFRQQQLTVHRVHVTFLPHEPPPPRPHDVTLVAQLSMDRLQMLEALCRHWPGPMSLALYLTDAEAQQFLHFVEASPVLAARQDVAYHVVYREGPLYPVNQLRNVALAQALTPYVFLSDIDFLPAYSLYDYLRASIEQLGLGSRRKAALVVPAFETLRYRFSFPHSKVELLALLDAGTLYTFRYHEWPRGHAPTDYARWREAQAPYRVQWAANYEPYVVVPRDCPRYDPRFVGFGWNKVAHIVELDAQEYELLVLPEAFTIHLPHAPSLDISRFRSSPTYRDCLQALKDEFHQDLSRHHGAAALKYLPALQQPQSPARG

SEQ ID NO: 841943 - protein, 719 aa, Homo sapiens
MLPRGRPRALGAAALLLLLLLLGFLLFGGDLGCERREPGGRAGAPGCFPGPLMPRVPPDGRLRRAAALDGDPGAGPGDHNRSDCGPQPPPPPKCELLHVAIVCAGHNSSRDVITLVKSMLFYRKNPLHLHLVTDAVARNILETLFHTWMVPAVRVSFYHADQLKPQVSWIPNKHYSGLYGLMKLVLPSALPAELARVIVLDTDVTFASDISELWALFAHFSGERPGSLPGLPRIPASSPEPRSCGSFRQLPYALPSQTRRRSVLWRTRVTGTWATSGRTTGPGLPWAGDLTQDIFNAVIKEHPGLVQRLPCVWNVQLSDHTLAERCYSEASDLKVIHWNSPKKLRVKNKHVEFFRNFYLTFLEYDGNLLRRELFVCPSQPPPGAEQLQQALAQLDEEDPCFEFRQQQLTVHRVHVTFLPHEPPPPRPHDVTLVAQLSMDRLQMLEALCRHWPGPMSLALYLTDAEAQQFLHFVEASPVLAARQDVAYHVVYREGPLYPVNQLRNVALAQALTPYVFLSDIDFLPAYSLYDYLRASIEQLGLGSRRKAALVVPAFETLRYRFSFPHSKVELLALLDAGTLYTFRYHEWPRGHAPTDYARWREAQAPYRVQWAANYEPYVVVPRDCPRYDPRFVGFGWNKVAHIVELDAQEYELLVLPEAFTIHLPHAPSLDISRFRSSPTYRDCLQALKDEFHQDLSRHHGAAALKYLPALQQPQSPARG

SEQ ID NO: 841944 - protein, 485 aa, Homo sapiens
MLPRGRPRALGAAALLLLLLLLGFLLFGGDLGCERREPGGRAGAPGCFPGPLMPRVPPDGRLRRAAALDGDPGAGPGDHNRSDCGPQPPPPPKCELLHVAIVCAGHNSSRDVITLVKSMLFYRKNPLHLHLVTDAVARNILETLFHTWMVPAVRVSFYHADQLKPQVSWIPNKHYSGLYGLMKLVLPSALPAELARVIVLDTDVTFASDISELWALFAHFSDTQAIGLVENQSDWYLGNLWKNHRPWPALGRGFNTGVILLRLDRLRQAGWEQMWRLTARRELLSLPATSLADQDIFNAVIKEHPGLVQRLPCVWNVQLSDHTLAERCYSEASDLKVIHWNSPKKLRVKNKHVEFFRNFYLTFLEYDGNLLRRELFVCPSQPPPGAEQLQQALAQLDEEDPCFEFRQQQLTVHRVHVTFLPHEPPPPRPHDVTLVAQLSMDRLQMLEALCRHWPGPMSLALYLTDAEAQQFLHFVEANVVGIDRV

SEQ ID NO: 841945 - protein, 232 aa, Homo sapiens
FSPAHGCSSSGPPLSSWGWAAGARQHWWCRHSRPCATASASPIPRWSCWPCWMRALSTPSGRRGYFSAHSTHLPTLAPTTHELLASAWLPPTLLHRYHEWPRGHAPTDYARWREAQAPYRVQWAANYEPYVVVPRDCPRYDPRFVGFGWNKVAHIVELDAQEYELLVLPEAFTIHLPHAPSLDISRFRSSPTYRDCLQALKDEFHQDLSRHHGAAALKYLPALQQPQSPARG

SEQ ID NO: 841946 - protein, 153 aa, Homo sapiens [sequence omitted]

SEQ ID NO: 841947 - protein, 153 aa, Homo sapiens [sequence omitted]

SEQ ID NO: 841948 - protein, 48 aa, Homo sapiens
GSSLAVAGADAGERPRSSLGSVLAPTLGFSLWAQAGVRLSFLYPSAEG

SEQ ID NO: 841949 - protein, 984 aa, Homo sapiens
MTVRRLSLLCRDLWALWLLLKAGADEIMHQDIVPLCAADIQDQLKKRFAYLSGGRGQDGSPVITFPDYPAFSEIPDKEFQNVMTYLTSIPSLQDAGIGFILVIDRRRDKWTSVKASVLRIAASFPANLQLVLVLRPTGFFQRTLSDIAFKFNRDDFKMKVPVIMLSSVPDLHGYIDKSQLTEDLGGTLDYCHSRWLCQRTAIESFALMVKQTAQMLQSFGTELAETELPNDVQSTSSVLCAHTEKKDKAKEDLRLALKEGHSVLESLRELQAEGSEPSVNQDQLDNQATVQRLLAQLNETEAAFDEFWAKHQQKLEQCLQLRHFEQGFREVKAILDAASQKIATFTDIGNSLAHVEHLLRDLASFEEKSGVAVERARALSLDGEQLIGNKHYAVDSIRPKCQELRHLCDQFSAEIARRRGLLSKSLELHRRLETSMKWCDEGIYLLASQPVDKCQSQDGAEAALQEIEKFLETGAENKIQELNAIYKEYESILNQDLMEHVRKVFQKQASMEEVFHRRQASLKKLAARQTRPVQPVAPRPEALAKSPCPSPGIRRGSENSSSEGGALRRGPYRRAKSEMSESRQGRGSAGEEEESLAILRRHVMSELLDTERAYVEELLCVLEGYAAEMDNPLMAHLLSTGLHNKKDVLFGNMEEIYHFHNRIFLRELENYTDCPELVGRCFLERMEDFQIYEKYCQNKPRSESLWRQCSDCPFFQECQRKLDHKLSLDSYLLKPVQRITKYQLLLKEMLKYSRNCEGAEDLQEALSSILGILKAVNDSMHLIAITGYDGNLGDLGKLLMQGSFSVWTDHKRGHTKVKELARFKPMQRHLFLHEKAVLFCKKREENGEGYEKAPSYSYKQSLNMAAVGITENVKGDAKKFEIWYNAREEVYIVQAPTPEIKAAWVNEIRKVLTSQLQACREASQHRALEQSQSLPLPAPTSTSPSRGNSRNIKKLEERKTDPLSLEGYVSSAPLTKPPEKGKEP

SEQ ID NO: 841950 - protein, 190 aa, Homo sapiens
AAISYRFTQYFLSGYYASYSVIIFYYELFISRSVWPIRPVGTIRGSTASPSSFYPFGLAPCLKAHHTGTSRCTCATGHRDVAGCSFGRWNAGALLPDAGMVHARSVGRWNAGALLPDAGMVHACPVGLWNAGALLPNAGMVHGCSVGRWNAGALLPDAGMVHACSVGRWNAGALLPKCRNGTRMLCWTLE

SEQ ID NO: 841951 - protein, 1417 aa, Homo sapiens
WGGGGGLATLPRLKLLGSNDPPASASASASASGVAGTTGLKYCFFKEGHVTYNTKPQKDSCGFGRGELREFLAYGPVMAAMALHRHELESAGGSQDAACVECTVWLGANHGEGGEPRACSARFPHWVLRPWAGDAPAGRGWSIPGQPRTHAWTQRPTDLLTWARRGWHAATRKGRAGLLRPLQLYTCHGAAGDEIMHQDIVPLCAADIQDQLKKRFAYLSGGRGQDGSPVITFPDYPAFSEIPDKEFQNVMTYLTSIPSLQDAGIGFILVIDRRRDKWTSVKASVLRIAASFPANLQLVLVLRPTGFFQRTLSDIAFKFNRDDFKMKVPVIMLSSVPDLHGYIDKSQLTEDLGGTLDYCHSRWLCQRTAIESFALMVKQTAQMLQSFGTELAETELPNDVQSTSSVLCAHTEKKDKAKEDLRLALKEGHSVLESLRELQAEGSEPSVNQDQLDNQATVQRLLAQLNETEAAFDEFWAKHQQKLEQCLQLRHFEQGFREVKAILDAASQKIATFTDIGNSLAHVEHLLRDLASFEEKSGVAVERARALSLDGEQLIGNKHYAVDSIRPKCQELRHLCDQFSAEIARRRGLLSKSLELHRRLETSMKWCDEGIYLLASQPVDKCQSQDGAEAALQEIEKFLETGAENKIQELNAIYKEYESILNQDLMEHVRKVFQKQASMEEVFHRRQASLKKLAARQTRPVQPVAPRPEALAKSPCPSPGIRRGSENSSSEGGALRRGPYRRAKSEMSESRQGRGSAGEEEESLAILRRHVMSELLDTERAYVEELLCVLEGYAAEMDNPLMAHLLSTGLHNKKDVLFGNMEEIYHFHNRIFLRELENYTDCPELVGRCFLERMEDFQIYEKYCQNKPRSESLWRQCSDCPFFQECQRKLDHKLSLDSYLLKPVQRITKYQLLLKEMLKYSRNCEGAEDLQEALSSILGILKAVNDSMHLIAITGYDGNLGDLGKLLMQGSFSVWTDHKRGHTKVKELARFKPMQRHLFLHEKAVLFCKKREENGEGYEKAPSYSYKQSLNMAAVGITENVKGDAKKFEIWYNAREEVYIVQAPTPEIKAAWVNEIRKVLTSQLQACREASQHRALEQSQSLPLPAPTSTSPSRGNSRNIKKLEERKTDPLSLEGYVSSAPLTKPPEKGKGWSKTSHSLEAPEDDGGWSSAEEQINSSDAEEDGGLGPKKLVPGKYTVVADHEKGGPDALRVRSGDVVELVQEGDEGLWYVRDPTTGKEGWVPASSLSVRLGPSGSAQCLSSSESSPGSAVLSNSSSCSEGGQAPFSDLQEVARPRRRRPARCLGLRWRGEGAAPGRPEEGAPHRPDPERLAVRAAEDPSGAEAGSTEDPGPLGLPRRLQSPQRRGRREQPRAAGAGQRHLVLAPPCCFCLRTVLSGDARTVVELLPEKWRILWPTA

SEQ ID NO: 841952 - protein, 1249 aa, Homo sapiens
MTVRRLSLLCRDLWALWLLLKAGADEIMHQDIVPLCAADIQDQLKKRFAYLSGGRGQDGSPVITFPDYPAFSEIPDKEFQNVMTYLTSIPSLQDAGIGFILVIDRRRDKWTSVKASVLRIAASFPANLQLVLVLRPTGFFQRTLSDIAFKFNRDDFKMKVPVIMLSSVPDLHGYIDKSQLTEDLGGTLDYCHSRWLCQRTAIESFALMVKQTAQMLQSFGTELAETELPNDVQSTSSVLCAHTEKKDKAKEDLRLALKEGHSVLESLRELQAEGSEPSVNQDQLDNQATVQRLLAQLNETEAAFDEFWAKHQQKLEQCLQLRHFEQGFREVKAILDAASQKIATFTDIGNSLAHVEHLLRDLASFEEKSGVAVERARALSLDGEQLIGNKHYAVDSIRPKCQELRHLCDQFSAEIARRRGLLSKSLELHRRLETSMKWCDEGIYLLASQPVDKCQSQDGAEAALQEIEKFLETGAENKIQELNAIYKEYESILNQDLMEHVRKVFQKQASMEEVFHRRQASLKKLAARQTRPVQPVAPRPEALAKSPCPSPGIRRGSENSSSEGGALRRGPYRRAKSEMSESRQGRGSAGEEEESLAILRRHVMSELLDTERAYVEELLCVLEGYAAEMDNPLMAHLLSTGLHNKKDVLFGNMEEIYHFHNRIFLRELENYTDCPELVGRCFLERMEDFQIYEKYCQNKPRSESLWRQCSDCPFFQECQRKLDHKLSLDSYLLKPVQRITKYQLLLKEMLKYSRNCEGAEDLQEALSSILGILKAVNDSMHLIAITGYDGNLGDLGKLLMQGSFSVWTDHKRGHTKVKELARFKPMQRHLFLHEKAVLFCKKREENGEGYEKAPSYSYKQSLNMAAVGITENVKGDAKKFEIWYNAREEVYIVQAPTPEIKAAWVNEIRKVLTSQLQACREASQHRALEQSQSLPLPAPTSTSPSRGNSRNIKKLEERKTDPLSLEGYVSSAPLTKPPEKGKGWSKTSHSLEAPEDDGGWSSAEEQINSSDAEEDGGLGPKKLVPGKYTVVADHEKGGPDALRVRSGDVVELVQEGDEGLWYVRDPTTGKEGWVPASSLSVRLGPSGSAQCLSSSESSPGSAVLSNSSSCSEGGQAPFSDLQEVARPRRRRPARCLGLRWRGEGAAPGRPEEGAPHRPDPERLAVRAAEDPSGAEAGSTEDPGPLGLPRRLQSPQRRGRREQPRAAGAGQRHLVLAPPCCFCLRTVLSGDARTVVELLPEKWRILWPTA

SEQ ID NO: 841953 - protein, 1417 aa, Homo sapiens; identical to SEQ ID NO: 841951

SEQ ID NO: 841954 - protein, 1417 aa, Homo sapiens; identical to SEQ ID NO: 841951

SEQ ID NO: 841955 - protein, 1224 aa, Homo sapiens
WGGGGGLATLPRLKLLGSNDPPASASASASASGVAGTTGLKYCFFKEGHVTYNTKPQKDSCGFGRGELREFLAYGPVMAAMALHRHELESAGGSQDAACVECTVWLGANHGEGGEPRACSARFPHWVLRPWAGDAPAGRGWSIPGQPRTHAWTQRPTDLLTWARRGWHAATRKGRAGLLRPLQLYTCHGAAGDEIMHQDIVPLCAADIQDQLKKRFAYLSGGRGQDGSPVITFPDYPAFSEIPDKEFQNVMTYLTSIPSLQDAGIGFILVIDRRRDKWTSVKASVLRIAASFPANLQLVLVLRPTGFFQRTLSDIAFKFNRDDFKMKVPVIMLSSVPDLHGYIDKSQLTEDLGGTLDYCHSRWLCQRTAIESFALMVKQTAQMLQSFGTELAETELPNDVQSTSSVLCAHTEKKDKAKEDLRLALKEGHSVLESLRELQAEGSEPSVNQDQLDNQATVQRLLAQLNETEAAFDEFWAKHQQKLEQCLQLRHFEQGFREVKAILDAASQKIATFTDIGNSLAHVEHLLRDLASFEEKSGVAVERARALSLDGEQLIGNKHYAVDSIRPKCQELRHLCDQFSAEIARRRGLLSKSLELHRRLETSMKWCDEGIYLLASQPVDKCQSQDGAEAALQEIEKFLETGAENKIQELNAIYKEYESILNQDLMEHVRKVFQKQASMEEVFHRRQASLKKLAARQTRPVQPVAPRPEALAKSPCPSPGIRRGSENSSSEGGALRRGPYRRAKSEMSESRQGRGSAGEEEESLAILRRHVMSELLDTERAYVEELLCVLEGYAAEMDNPLMAHLLSTGLHNKKDVLFGNMEEIYHFHNRIFLRELENYTDCPELVGRCFLERMEDFQIYEKYCQNKPRSESLWRQCSDCPFFQECQRKLDHKLSLDSYLLKPVQRITKYQLLLKEMLKYSRNCEGAEDLQEALSSILGILKAVNDSMHLIAITGYDGNLGDLGKLLMQGSFSVWTDHKRGHTKVKELARFKPMQRHLFLHEKAVLFCKKREENGEGYEKAPSYSYKQSLNMAAVGITENVKGDAKKFEIWYNAREEVYIVQAPTPEIKAAWVNEIRKVLTSQLQACREASQHRALEQSQSLPLPAPTSTSPSRGNSRNIKKLEERKTDPLSLEGYVSSAPLTKPPEKGKGWSKTSHSLEAPEDDGGWSSAEEQINSSDAEEDGGLGPKKLVPTQPPVEPTRGCTFLRGDSPHPPTLYVIECCH

SEQ ID NO: 841956 - protein, 445 aa, Homo sapiens
  misc_feature (438)..(438): Xaa can be any naturally occurring amino acid
WGGGGGLATLPRLKLLGSNDPPASASASASASGVAGTTGLKYCFFKEGHVTYNTKPQKDSCGFGRGELREFLAYGPVMAAMALHRHELESAGGSQDAACVECTVWLGANHGEGGEPRACSARFPHWVLRPWAGDAPAGRGWSIPGQPRTHAWTQRPTDLLTWARRGWHAATRKGRAGLLRPLQLYTCHGAAGDEIMHQDIVPLCAADIQDQLKKRFAYLSGGRGQDGSPVITFPDYPAFSEIPDKEFQNVMTYLTSIPSLQDAGIGFILVIDRRRDKWTSVKASVLRIAASFPANLQLVLVLRPTGFFQRTLSDIAFKFNRDDFKMKVPVIMLSSVPDLHGYIDKSQLTEDLGGTLDYCHSRWLCQRTAIESFALMVKQTAQMLQSFGTELAETELPNDVQSTSSVLCAHTEKKDKAKRKEFEGLALEKKGAQVVLGXSLKGWFA

SEQ ID NO: 841957 - protein, 139 aa, Homo sapiens
MTVRRLSLLCRDLWALWLLLKAGADEIMHQDIVPLCAADIQDQLKKRFAYLSGGRGQDGSPVITFPDYPAFSEIPDKEFQNVMTYLTSIPSLQDAGIGFILVIDRRRDKWTSVKASVLRIALRARCTESEPLHPGGSGI

SEQ ID NO: 841958 - protein, 1478 aa, Homo sapiens
WGGGGGLATLPRLKLLGSNDPPASASASASASGVAGTTGLKYCFFKEGHVTYNTKPQKDSCGFGRGELREFLAYGPVMAAMALHRHELESAGGSQDAACVECTVWLGANHGEGGEPRACSARFPHWVLRPWAGDAPAGRGWSIPGQPRTHAWTQRPTDLLTWARRGWHAATRKGRAGLLRPLQLYTCHGAAGDEIMHQDIVPLCAADIQDQLKKRFAYLSGGRGQDGSPVITFPDYPAFSEIPDKEFQNVMTYLTSIPSLQDAGIGFILVIDRRRDKWTSVKASVLRIAASFPANLQLVLVLRPTGFFQRTLSDIAFKFNRDDFKMKVPVIMLSSVPDLHGYIDKSQLTEDLGGTLDYCHSRWLCQRTAIESFALMVKQTAQMLQSFGTELAETELPNDVQSTSSVLCAHTEKKDKAKEDLRLALKEGHSVLESLRELQAEGSEPSVNQDQLDNQATVQRLLAQLNETEAAFDEFWAKHQQKLEQCLQLRHFEQGFREVKAILDAASQKIATFTDIGNSLAHVEHLLRDLASFEEKSGVAVERARALSLDGEQLIGNKHYAVDSIRPKCQELRHLCDQFSAEIARRRGLLSKSLELHRRLETSMKWCDEGIYLLASQPVDKCQSQDGAEAALQEIEKFLETGAENKIQELNAIYKEYESILNQDLMEHVRKVFQKQASMEEVFHRRQASLKKLAARQTRPVQPVAPRPEALAKSPCPSPGIRRGSENSSSEGGALRRGPYRRAKSEMSESRQGRGSAGEEEESLAILRRHVMSELLDTERAYVEELLCVLEGYAAEMDNPLMAHLLSTGLHNKKDVLFGNMEEIYHFHNRIFLRELENYTDCPELVGRCFLERMEDFQIYEKYCQNKPRSESLWRQCSDCPFFQECQRKLDHKLSLDSYLLKPVQRITKYQLLLKEMLKYSRNCEGAEDLQEALSSILGILKAVNDSMHLIAITGYDGNLGDLGKLLMQGSFSVWTDHKRGHTKVKELARFKPMQRHLFLHEKAVLFCKKREENGEGYEKAPSYSYKQSLNMAAVGITENVKGDAKKFEIWYNAREEVYIVQAPTPEIKAAWVNEIRKVLTSQLQACREASQHRALEQSQSLPLPAPTSTSPSRGNSRNIKKLEERKTDPLSLEGYVSSAPLTKPPEKGKGWSKTSHSLEAPEDDGGWSSAEEQINSSDAEEDGGLGPKKLVPGKYTVVADHEKGGPDALRVRSGDVVELVQEGDEGLWYDPALSPGLPRTWLPLTLAPCRYVRDPTTGKEGWVPASSLSVRLGPSGSAQCLSSSVRPTCPEPTRDAAKGPGEEAAPCVPGRADAEARPRLISPQSRARGRRAEQLVQLQRGRPGPLLRPAGVARPRRRRPARCLGLRWRGEGAAPGRPEEGAPHRPDPERLAVRAAEDPSGAEAGSTEDPGPLGLPRRLQSPQRRGRREQPRAAGAGQRHLVLAPPCCFCLRTVLSGDARTVVELLPEKWRILWPTA

SEQ ID NO: 841959 - protein, 122 aa, Homo sapiens
MTVRRLSLLCRDLWALWLLLKAGAGAWGAGGSSPPRKVLWGDSAGTPGGGGRSGPSPVLRGCWGRSPGLGDAGDGCWGGCLRDQRSPVPWQGRCARALPDGWFRAMALGSLVSSGAASALGL

SEQ ID NO: 841960 - protein, 1223 aa, Homo sapiens
MRAGSGTAGMGLPGPPCAMPLTWYCRNGIMNMGDRSPKRFSEGFRGQPASHLHTLTAALFLTAACLQDAGIGFILVIDRRRDKWTSVKASVLRIAASFPANLQLVLVLRPTGFFQRTLSDIAFKFNRDDFKMKVPVIMLSSVPDLHGYIDKSQLTEDLGGTLDYCHSRWLCQRTAIESFALMVKQTAQMLQSFGTELAETELPNDVQSTSSVLCAHTEKKDKAKEDLRLALKEGHSVLESLRELQAEGSEPSVNQDQLDNQATVQRLLAQLNETEAAFDEFWAKHQQKLEQCLQLRHFEQGFREVKAILDAASQKIATFTDIGNSLAHVEHLLRDLASFEEKSGVAVERARALSLDGEQLIGNKHYAVDSIRPKCQELRHLCDQFSAEIARRRGLLSKSLELHRRLETSMKWCDEGIYLLASQPVDKCQSQDGAEAALQEIEKFLETGAENKIQELNAIYKEYESILNQDLMEHVRKVFQKQASMEEVFHRRQASLKKLAARQTRPVQPVAPRPEALAKSPCPSPGIRRGSENSSSEGGALRRGPYRRAKSEMSESRQGRGSAGEEEESLAILRRHVMSELLDTERAYVEELLCVLEGYAAEMDNPLMAHLLSTGLHNKKDVLFGNMEEIYHFHNRIFLRELENYTDCPELVGRCFLERMEDFQIYEKYCQNKPRSESLWRQCSDCPFFQECQRKLDHKLSLDSYLLKPVQRITKYQLLLKEMLKYSRNCEGAEDLQEALSSILGILKAVNDSMHLIAITGYDGNLGDLGKLLMQGSFSVWTDHKRGHTKVKELARFKPMQRHLFLHEKAVLFCKKREENGEGYEKAPSYSYKQSLNMAAVGITENVKGDAKKFEIWYNAREEVYIVQAPTPEIKAAWVNEIRKVLTSQLQACREASQHRALEQSQSLPLPAPTSTSPSRGNSRNIKKLEERKTDPLSLEGYVSSAPLTKPPEKGKGWSKTSHSLEAPEDDGGWSSAEEQINSSDAEEDGGLGPKKLVPGKYTVVADHEKGGPDALRVRSGDVVELVQEGDEGLWYVRDPTTGKEGWVPASSLSVRLGPSGSAQCLSSSESSPGSAVLSNSSSCSEGGQAPFSDLQEVARPRRRRPARCLGLRWRGEGAAPGRPEEGAPHRPDPERLAVRAAEDPSGAEAGSTEDPGPLGLPRRLQSPQRRGRREQPRAAGAGQRHLVLAPPCCFCLRTVLSGDARTVVELLPEKWRILWPTA

SEQ ID NO: 841961 - protein, 1287 aa, Homo sapiens
TTGGSLMFDCWRFILCKRPGSNSYSSPQRPNEAKKEETDHQIDVSDVIRLVQDTPEATAMATDEIMHQDIVPLCAADIQDQLKKRFAYLSGGRGQDGSPVITFPDYPAFSEIPDKEFQNVMTYLTSIPSLQDAGIGFILVIDRRRDKWTSVKASVLRIAASFPANLQLVLVLRPTGFFQRTLSDIAFKFNRDDFKMKVPVIMLSSVPDLHGYIDKSQLTEDLGGTLDYCHSRWLCQRTAIESFALMVKQTAQMLQSFGTELAETELPNDVQSTSSVLCAHTEKKDKAKEDLRLALKEGHSVLESLRELQAEGSEPSVNQDQLDNQATVQRLLAQLNETEAAFDEFWAKHQQKLEQCLQLRHFEQGFREVKAILDAASQKIATFTDIGNSLAHVEHLLRDLASFEEKSGVAVERARALSLDGEQLIGNKHYAVDSIRPKCQELRHLCDQFSAEIARRRGLLSKSLELHRRLETSMKWCDEGIYLLASQPVDKCQSQDGAEAALQEIEKFLETGAENKIQELNAIYKEYESILNQDLMEHVRKVFQKQASMEEVFHRRQASLKKLAARQTRPVQPVAPRPEALAKSPCPSPGIRRGSENSSSEGGALRRGPYRRAKSEMSESRQGRGSAGEEEESLAILRRHVMSELLDTERAYVEELLCVLEGYAAEMDNPLMAHLLSTGLHNKKDVLFGNMEEIYHFHNRIFLRELENYTDCPELVGRCFLERMEDFQIYEKYCQNKPRSESLWRQCSDCPFFQECQRKLDHKLSLDSYLLKPVQRITKYQLLLKEMLKYSRNCEGAEDLQEALSSILGILKAVNDSMHLIAITGYDGNLGDLGKLLMQGSFSVWTDHKRGHTKVKELARFKPMQRHLFLHEKAVLFCKKREENGEGYEKAPSYSYKQSLNMAAVGITENVKGDAKKFEIWYNAREEVYIVQAPTPEIKAAWVNEIRKVLTSQLQACREASQHRALEQSQSLPLPAPTSTSPSRGNSRNIKKLEERKTDPLSLEGYVSSAPLTKPPEKGKGWSKTSHSLEAPEDDGGWSSAEEQINSSDAEEDGGLGPKKLVPGKYTVVADHEKGGPDALRVRSGDVVELVQEGDEGLWYVRDPTTGKEGWVPASSLSVRLGPSGSAQCLSSSESSPGSAVLSNSSSCSEGGQAPFSDLQEVARPRRRRPARCLGLRWRGEGAAPGRPEEGAPHRPDPERLAVRAAEDPSGAEAGSTEDPGPLGLPRRLQSPQRRGRREQPRAAGAGQRHLVLAPPCCFCLRTVLSGDARTVVELLPEKWRILWPTA

SEQ ID NO: 841962 - protein, 1241 aa, Homo sapiens
WSLPRRRRGTAGRSRPDEIMHQDIVPLCAADIQDQLKKRFAYLSGGRGQDGSPVITFPDYPAFSEIPDKEFQNVMTYLTSIPSLQDAGIGFILVIDRRRDKWTSVKASVLRIAASFPANLQLVLVLRPTGFFQRTLSDIAFKFNRDDFKMKVPVIMLSSVPDLHGYIDKSQLTEDLGGTLDYCHSRWLCQRTAIESFALMVKQTAQMLQSFGTELAETELPNDVQSTSSVLCAHTEKKDKAKEDLRLALKEGHSVLESLRELQAEGSEPSVNQDQLDNQATVQRLLAQLNETEAAFDEFWAKHQQKLEQCLQLRHFEQGFREVKAILDAASQKIATFTDIGNSLAHVEHLLRDLASFEEKSGVAVERARALSLDGEQLIGNKHYAVDSIRPKCQELRHLCDQFSAEIARRRGLLSKSLELHRRLETSMKWCDEGIYLLASQPVDKCQSQDGAEAALQEIEKFLETGAENKIQELNAIYKEYESILNQDLMEHVRKVFQKQASMEEVFHRRQASLKKLAARQTRPVQPVAPRPEALAKSPCPSPGIRRGSENSSSEGGALRRGPYRRAKSEMSESRQGRGSAGEEEESLAILRRHVMSELLDTERAYVEELLCVLEGYAAEMDNPLMAHLLSTGLHNKKDVLFGNMEEIYHFHNRIFLRELENYTDCPELVGRCFLERMEDFQIYEKYCQNKPRSESLWRQCSDCPFFQECQRKLDHKLSLDSYLLKPVQRITKYQLLLKEMLKYSRNCEGAEDLQEALSSILGILKAVNDSMHLIAITGYDGNLGDLGKLLMQGSFSVWTDHKRGHTKVKELARFKPMQRHLFLHEKAVLFCKKREENGEGYEKAPSYSYKQSLNMAAVGITENVKGDAKKFEIWYNAREEVYIVQAPTPEIKAAWVNEIRKVLTSQLQACREASQHRALEQSQSLPLPAPTSTSPSRGNSRNIKKLEERKTDPLSLEGYVSSAPLTKPPEKGKGWSKTSHSLEAPEDDGGWSSAEEQINSSDAEEDGGLGPKKLVPGKYTVVADHEKGGPDALRVRSGDVVELVQEGDEGLWYVRDPTTGKEGWVPASSLSVRLGPSGSAQCLSSSESSPGSAVLSNSSSCSEGGQAPFSDLQEVARPRRRRPARCLGLRWRGEGAAPGRPEEGAPHRPDPERLAVRAAEDPSGAEAGSTEDPGPLGLPRRLQSPQRRGRREQPRAAGAGQRHLVLAPPCCFCLRTVLSGDARTVVELLPEKWRILWPTA

SEQ ID NO: 841963 - protein, 285 aa, Homo sapiens
MQTAAHHRGVPHGCLSLLGWSKTSHSLEAPEDDGGWSSAEEQINSSDAEEDGGLGPKKLVPGKYTVVADHEKGGPDALRVRSGDVVELVQEGDEGLWYVRDPTTGKEGWVPASSLSVRLGPSGSAQCLSSSESSPGSAVLSNSSSCSEGGQAPFSDLQEVARPRRRRPARCLGLRWRGEGAAPGRPEEGAPHRPDPERLAVRAAEDPSGAEAGSTEDPGPLGLPRRLQSPQRRGRREQPRAAGAGQRHLVLAPPCCFCLRTVLSGDARTVVELLPEKWRILWPTA

SEQ ID NO: 841964 - protein, 509 aa, Homo sapiens
WGGGGGLATLPRLKLLGSNDPPASASASASASGVAGTTGLKYCFFKEGHVTYNTKPQKDSCGFGRGELREFLAYGPVMAAMALHRHELESAGGSQDAACVECTVWLGANHGEGGEPRACSARFPHWVLRPWAGDAPAGRGWSIPGQPRTHAWTQRPTDLLTWARRGWHAATRKGRAGLLRPLQLYTCHGAAGDEIMHQDIVPLCAADIQDQLKKRFAYLSGGRGQDGSPVITFPDYPAFSEIPDKEFQNVMTYLTSIPSLQDAGIGFILVIDRRRDKWTSVKASVLRIAASFPANLQLVLVLRPTGFFQRTLSDIAFKFNRDDFKMKVPVIMLSSVPDLHGYIDKSQLTEDLGGTLDYCHSRWLCQRTAIESFALMVKQTAQMLQSFGTELAETELPNDVQSTSSVLCAHTEKKDKAKEDLRLALKEGHSVLESLRELQAEGSEPSVNQDQLDNQATVQRLLAQLNETEAAFDEFWAKHQQKLEQCLQLRHFEQGFREVSGPGWSRQPP

SEQ ID NO: 841965 - protein, 333 aa, Homo sapiens
WGGGGGLATLPRLKLLGSNDPPASASASASASGVAGTTGLKYCFFKEGHVTYNTKPQKDSCGFGRGELREFLAYGPVMAAMALHRHELESAGGSQDAACVECTVWLGANHGEGGEPRACSARFPHWVLRPWAGDAPAGRGWSIPGQPRTHAWTQRPTDLLTWARRGWHAATRKGRAGLLRPLQLYTCHGAAGDEIMHQDIVPLCAADIQDQLKKRFAYLSGGRGQDGSPVITFPDYPAFSEIPDKEFQNVMTYLTSIPSILFMESAASEHWGHVAEALPFLPPGSAHTAVTTSPEVLSPHLPKTCSPGPFLLLLLNSTATDHLWPFKCKMKAK

SEQ ID NO: 841966 - protein, 1708 aa, Homo sapiens
WEREFNTWTEMNTIVYHGSLASRQMIQQYEMYCKDSRGRLIPGAYKFDALITTFEMILSDCPELREIEWRCVIIDEAHRLKNRNCKLLDSLKHMDLEHKVLLTGTPLQNTVEELFSLLHFLEPSQFPSESEFLKDFGDLKTEEQVQKLQAILKPMMLRRLKEDVEKNLAPKQETIIEVELTNIQKKYYRAILEKNFSFLSKGAGHTNMPNLLNTMMELRKCCNHPYLINGAEEKILTEFREACHIIPHDFHLQAMVRSAGKLVLIDKLLPKLKAGGHKVLIFSQMVRCLDILEDYLIQRRYLYERIDGRVRGNLRQAAIDRFSKPDSDRFVFLLCTRAGGLGINLTAADTCIIFDSDWNPQNDLQAQARCHRIGQSKAVKVYRLITRNSYEREMFDKASLKLGLDKAVLQSMSGRDGNITGIQQFSKKEIEDLLRKGAYAAIMEEDDEGSKFCEEDIDQILLRRTTTITIESEGKGSTFAKASFVASENRTDISLDDPNFWQKWAKKADLDMDLLNSKNNLVIDTPRVRKQTRHFSTLKDDDLVEFSDLESEDDERPRSRRHDRHHAYGRTDCFRVEKHLLVYGWGRWRDILSHGRFKRRMTERDVETICRAILVYCLLHYRGDENIKGFIWDLISPAENGKTKELQNHSGLSIPVPRGRKGKKVKSQSTFDIHKADWIRKYNPDTLFQDESYKKHLKHQCNKVLLRVRMLYYLRQEVIGDQAEKVLGGAIASEIDIWFPVVDQLEVPTTWWDSEADKSLLIGVFKHGYEKYNTMRADPALCFLEKAGRPDDKAIAAEHRVLDNFSDIVEGVDFDKDCEDPEYKPLQGPPKDQDDEGDPLMMMDEEISVIDGDEAQVTQQPGHLFWPPGSALTARLRRLVTAYQRSYKREQMKIEAAERGDRRRRRCEAAFKLKEIARREKQQRWTRREQTDFYRVVSTFGVEYDPDTMQFHWDRFRTFARLDKKTDESLTKYFHGFVAMCRQVCRLPPAAGDEPPDPNLFIEPITEERASRTLYRIELLRRLREQVLCHPLLEDRLALCQPPGPELPKWWEPVRHDGELLRGAARHGVSQTDCNIMQDPDFSFLAARMNYMQNHQAGAPAPSLSRCSTPLLHQQYTSRTASPLPLRPDAPVEKSPEETATQVPSLESLTLKLEHEVVARSRPTPQDYEMRVSPSDTTPLVSRSVPPVKLEDEDDSDSELDLSKLSPSSSSSSSSSSSSSSTDESEDEKEEKLTDQSRSKLYDEESLLSLTMSQDGFPNEDGEQMTPELLLLQERQRASEWPKDRVLINRIDLVCQAVLSGKWPSSRRSQEMVTGGILGPGNHLLDSPSLTPGEYGDSPVPTPRSSSAASMAEEEASAVSTAAAQFTKLRRGMDEKEFTVQIKDEEGLKLTFQKHKLMANGVMGDGHPLFHKKKGNRKKLVELEVECMEEPNHLDVDLETRIPVINKVDGTLLVGEDAPRRAELEMWLQGHPEFAVDPRFLAYMEDRRKQKWQRCKKNNKAELNCLGMEPVQTANSRNGKKGHHTETVFNRVLPGPIAPESSKKRARRMRPDLSKMMALMQGGSTGSLSLHNTFQHSSSGLQSVSSLGHSSATSASLPFMPFVMGGAPSSPHVDSSTMLHHHHHHPHPHHHHHHHPGLRAPGYPSSPVTTASGTTLRLPPLQPEEDDDEDEEDDDDLSQGYDSSERDFSLIDDPMMPANSDSSEDADD

SEQ ID NO: 841967 - protein, 1087 aa, Homo sapiens
MQLGDRRRRRCKAAFKLKEIARREKQQRWTRREQTDFYRVVSTFGVEYDPDTMQFHWDRFRTFARLDKKTDESLTKYFHGFVAMAAKYAAFPQQQEVIGDQAEKVLGGAIASEIDIWFPVVDQLEVPTTWWDSEADKSLLIGVFKHGYEKYNTMRADPALCFLEKAGRPDDKAIAAEHRVLDNFSDIVEGVDFDKDCEDPEYKPLQGPPKDQDDEGDPLMMMDEEISVIDGDEAQVTQQPGHLFWPPGSALTARLRRLVTAYQRSYKREQMKIEAAERGDRRRRRCEAAFKLKEIARREKQQRWTRREQTDFYRVVSTFGVEYDPDTMQFHWDRFRTFARLDKKTDESLTKYFHGFVAMCRQVCRLPPAAGDEPPDPNLFIEPITEERASRTLYRIELLRRLREQVLCHPLLEDRLALCQPPGPELPKWWEPVRHDGELLRGAARHGVSQTDCNIMQDPDFSFLAARMNYMQNHQAGAPAPSLSRCSTPLLHQQYTSRTASPLPLRPDAPVEKSPEETATQVPSLESLTLKLEHEVVARSRPTPQDYEMRVSPSDTTPLVSRSVPPVKLEDEDDSDSELDLSKLSPSSSSSSSSSSSSSSTDESEDEKEEKLTDQSRSKLYDEESLLSLTMSQDGFPNEDGEQMTPELLLLQERQRASEWPKDRVLINRIDLVCQAVLSGKWPSSRRSQEMVTGGILGPGNHLLDSPSLTPGEYGDSPVPTPRSSSAASMAEEEASAVSTAAAQFTKLRRGMDEKEFTVQIKDEEGLKLTFQKHKLMANGVMGDGHPLFHKKKGNRKKLVELEVECMEEPNHLDVDLETRIPVINKVDGTLLVGEDAPRRAELEMWLQGHPEFAVDPRFLAYMEDRRKQKWQRCKKNNKAELNCLGMEPVQTANSRNGKKGHHTETVFNRVLPGPIAPESSKKRARRMRPDLSKMMALMQGGSTGSLSLHNTFQHSSSGLQSVSSLGHSSATSASLPFMPFVMGGAPSSPHVDSSTMLHHHHHHPHPHHHHHHHPGLRAPGYPSSPVTTASGTTLRLPPLQPEEDDDEDEEDDDDLSQGYDSSERDFSLIDDPMMPANSDSSEDADD

SEQ ID NO: 841968 - protein, 1650 aa, Homo sapiens
WEREFNTWTEMNTIVYHGSLASRQMIQQYEMYCKDSRGRLIPGAYKFDALITTFEMILSDCPELREIEWRCVIIDEAHRLKNRNCKLLDSLKHMDLEHKVLLTGTPLQNTVEELFSLLHFLEPSQFPSESEFLKDFGDLKTEEQVQKLQAILKPMMLRRLKEDVEKNLAPKQETIIEVELTNIQKKYYRAILEKNFSFLSKGAGHTNMPNLLNTMMELRKCCNHPYLINGAEEKILTEFREACHIIPHDFHLQAMVRSAGKLVLIDKLLPKLKAGGHKVLIFSQMVRCLDILEDYLIQRRYLYERIDGRVRGNLRQAAIDRFSKPDSDRFVFLLCTRAGGLGINLTAADTCIIFDSDWNPQNDLQAQARCHRIGQSKAVKVYRLITRNSYEREMFDKASLKLGLDKAVLQSMSGRDGNITGIQQFSKKEIEDLLRKGAYAAIMEEDDEGSKFCEEDIDQILLRRTTTITIESEGKGSTFAKASFVASENRTDISLDDPNFWQKWAKKADLDMDLLNSKNNLVIDTPRVRKQTRHFSTLKDDDLVEFSDLESEDDERPRSRRHDRHHAYGRTDCFRVEKHLLVYGWGRWRDILSHGRFKRRMTERDVETICRAILVYCLLHYRGDENIKGFIWDLISPAENGKTKELQNHSGLSIPVPRGRKGKKVKSQSTFDIHKADWIRKYNPDTLFQDESYKKHLKHQCNKVLLRVRMLYYLRQEVIGDQAEKVLGGAIASEIDIWFPVVDQLEVPTTWWDSEADKSLLIGVFKHGYEKYNTMRADPALCFLEKAGRPDDKAIAAEHRVLDNFSDIVEGVDFDKDCEDPEYKPLQGPPKDQDDEGDPLMMMDEEISVIDGDEAQVTQQPGHLFWPPGSALTARLRRLVTAYQRSYKREQMKIEAAERGDRRRRRCEAAFKLKEIARREKQQRWTRREQTDFYRVVSTFGVEYDPDTMQFHWDRFRTFARLDKKTDESLTKYFHGFVAMCRQVCRLPPAAGDEPPDPNLFIEPITEERASRTLYRIELLRRLREQVLCHPLLEDRLALCQPPGPELPKWWEPVRHDGELLRGAARHGVSQTDCNIMQDPDFSFLAARMNYMQNHQAGAPAPSLSRCSTPLLHQQYTSRTASPLPLRPDAPVEKSPEETATQVPSLESLTLKLEHEVVARSRPTPQDYEMRVSPSDTTPLVSRSVPPVKLEDEDDSDSELDLSKLSPSSSSSSSSSSSSSSTDESEDEKEEKLTDQSRSKLYDEESLLSLTMSQDGFPNEDGEQMTPELLLLQERQRASEWPKDRVLINRIDLVCQAVLSGKWPSSRRSQEMVTGGILGPGNHLLDSPSLTPGEYGDSPVPTPRSSSAASMAEEEASAVSTAAAQFTKLRRGMDEKEFTVQIKDEEGLKLTFQKHKLMANGVMGDGHPLFHKKKGNRKKLVELEVECMEEPNHLDVDLETRIPVINKVDGTLLVGEDAPRRAELEMWLQGHPEFAVDPRFLAYMEDRRKQKWQRCKKNNKAELNCLGMEPVQTANSRNGKKGHHTETVFNRVLPGPIAPESSKKRARRMRPDLSKMMALMQGGSTGSLSLHNTFQHSSSGLQSVSSLGHSSATSASLPFMPFVMGGAPSSPHVDSSTMLHHHHHHPHPHHHHHHHPGLQEVKRKKKKKCT

SEQ ID NO: 841969 - protein, 1519 aa, Homo sapiens
WEREFNTWTEMNTIVYHGSLASRQMIQQYEMYCKDSRGRLIPGAYKFDALITTFEMILSDCPELREIEWRCVIIDEAHRLKNRNCKLLDSLKHMDLEHKVLLTGTPLQNTVEELFSLLHFLEPSQFPSESEFLKDFGDLKTEEQVQKLQAILKPMMLRRLKEDVEKNLAPKQETIIEVELTNIQKKYYRAILEKNFSFLSKGAGHTNMPNLLNTMMELRKCCNHPYLINGAEEKILTEFREACHIIPHDFHLQAMVRSAGKLVLIDKLLPKLKAGGHKVLIFSQMVRCLDILEDYLIQRRYLYERIDGRVRGNLRQAAIDRFSKPDSDRFVFLLCTRAGGLGINLTAADTCIIFDSDWNPQNDLQAQARCHRIGQSKAVKVYRLITRNSYEREMFDKASLKLGLDKAVLQSMSGRDGNITGIQQFSKKEIEDLLRKGAYAAIMEEDDEGSKFCEEDIDQILLRRTTTITIESEGKGSTFAKASFVASENRTDISLDDPNFWQKWAKKADLDMDLLNSKNNLVIDTPRVRKQTRHFSTLKDDDLVEFSDLESEDDERPRSRRHDRHHAYGRTDCFRVEKHLLVYGWGRWRDILSHGRFKRRMTERDVETICRAILVYCLLHYRGDENIKGFIWDLISPAENGKTKELQNHSGLSIPVPRGRKGKKVKSQSTFDIHKADWIRKYNPDTLFQDESYKKHLKHQCNKVLLRVRMLYYLRQEVIGDQAEKVLGGAIASEIDIWFPVVDQLEVPTTWWDSEADKSLLIGVFKHGYEKYNTMRADPALCFLEKAGRPDDKAIAAEHRVLDNFSDIVEGVDFDKDCEDPEYKPLQGPPKDQDDEGDPLMMMDEEISVIDGDEAQVTQQPGHLFWPPGSALTARLRRLVTAYQRSYKREQMKIEAAERGDRRRRRCEAAFKLKEIARREKQQRWTRREQTDFYRVVSTFGVEYDPDTMQFHWDRFRTFARLDKKTDESLTKYFHGFVAMCRQVCRLPPAAGDEPPDPNLFIEPITEERASRTLYRIELLRRLREQVLCHPLLEDRLALCQPPGPELPKWWEPVRHDGELLRGAARHGVSQTDCNIMQDPDFSFLAARMNYMQNHQAGAPAPSLSRCSTPLLHQQYTSRTASPLPLRPDAPVEKSPEETATQVPSLESLTLKLEHEVVARSRPTPQDYEMRVSPSDTTPLVSRSVPPVKLEDEDDSDSELDLSKLSPSSSSSSSSSSSSSSTDESEDEKEEKLTDQSRSKLYDEESLLSLTMSQDGFPNEDGEQMTPELLLLQERQRASEWPKDRVLINRIDLVCQAVLSGKWPSSRRSQEMVTGGILGPGNHLLDSPSLTPGEYGDSPVPTPRSSSAASMAEEEASAVSTAAAQFTKLRRGMDEKEFTVQIKDEEGLKLTFQKHKLMANGVMGDGHPLFHKKKGNRKKLVELEVECMEEPNHLDVDLETRIPVINKVDGTLLVGEDAPRRAELENMVTLQSPHHEVVVQLPWQRRKHLQSAQRQPSSPNFAEAWMKRSLQFKSKMRKD

SEQ ID NO: 841970 - protein, 160 aa, Homo sapiens [sequence omitted]

SEQ ID NO: 841971 - protein, 1369 aa, Homo sapiens
WEREFNTWTEMNTIVYHGSLASRQMIQQYEMYCKDSRGRLIPGAYKFDALITTFEMILSDCPELREIEWRCVIIDEAHRLKNRNCKLLDSLKHMDLEHKVLLTGTPLQNTVEELFSLLHFLEPSQFPSESEFLKDFGDLKTEEQVQKLQAILKPMMLRRLKEDVEKNLAPKQETIIEVELTNIQKKYYRAILEKNFSFLSKGAGHTNMPNLLNTMMELRKCCNHPYLINGAEEKILTEFREACHIIPHDFHLQAMVRSAGKLVLIDKLLPKLKAGGHKVLIFSQMVRCLDILEDYLIQRRYLYERIDGRVRGNLRQAAIDRFSKPDSDRFVFLLCTRAGGLGINLTAADTCIIFDSDWNPQNDLQAQARCHRIGQSKAVKVYRLITRNSYEREMFDKASLKLGLDKAVLQSMSGRDGNITGIQQFSKKEIEDLLRKGAYAAIMEEDDEGSKFCEEDIDQILLRRTTTITIESEGKGSTFAKASFVASENRTDISLDDPNFWQKWAKKADLDMDLLNSKNNLVIDTPRVRKQTRHFSTLKDDDLVEFSDLESEDDERPRSRRHDRHHAYGRTDCFRVEKHLLVYGWGRWRDILSHGRFKRRMTERDVETICRAILVYCLLHYRGDENIKGFIWDLISPAENGKTKELQNHSGLSIPVPRGRKGKKVKSQSTFDIHKADWIRKYNPDTLFQDESYKKHLKHQCNKVLLRVRMLYYLRQEVIGDQAEKVLGGAIASEIDIWFPVVDQLEVPTTWWDSEADKSLLIGVFKHGYEKYNTMRADPALCFLEKAGRPDDKAIAAEHRVLDNFSDIVEGVDFDKDCEDPEYKPLQGPPKDQDDEGDPLMMMDEEISVIDGDEAQVTQQPGHLFWPPGSALTARLRRLVTAYQRSYKREQMKIEAAERGDRRRRRCEAAFKLKEIARREKQQRWTRREQTDFYRVVSTFGVEYDPDTMQFHWDRFRTFARLDKKTDESLTKYFHGFVAMCRQVCRLPPAAGDEPPDPNLFIEPITEERASRTLYRIELLRRLREQVLCHPLLEDRLALCQPPGPELPKWWEPVRHDGELLRGAARHGVSQTDCNIMQDPDFSFLAARMNYMQNHQAGAPAPSLSRCSTPLLHQQYTSRTASPLPLRPDAPVEKSPEETATQVPSLESLTLKLEHEVVARSRPTPQDYEMRVSPSDTTPLVSRSVPPVKLEDEDDSDSELDLSKLSPSSSSSSSSSSSSSSTDESEDEKEEKLTDQSRSKLYDEESLLSLTMSQDGHPLFHKKKGNRKKLVELEVECMEEPNHLDVDLETRIPVINKVDGTLLVGEDAPRRAELENMVTLQSPHHEVVVQLPWQRRKHLQSAQRQPSSPNFAEAWMKRSLQFKSKMRKD

SEQ ID NO: 841972 - protein, 1025 aa, Homo sapiens
WEREFNTWTEMNTIVYHGSLASRQMIQQYEMYCKDSRGRLIPGAYKFDALITTFEMILSDCPELREIEWRCVIIDEAHRLKNRNCKLLDSLKHMDLEHKVLLTGTPLQNTVEELFSLLHFLEPSQFPSESEFLKDFGDLKTEEQVQKLQAILKPMMLRRLKEDVEKNLAPKQETIIEVELTNIQKKYYRAILEKNFSFLSKGAGHTNMPNLLNTMMELRKCCNHPYLINGAEEKILTEFREACHIIPHDFHLQAMVRSAGKLVLIDKLLPKLKAGGHKVLIFSQMVRCLDILEDYLIQRRYLYERIDGRVRGNLRQAAIDRFSKPDSDRFVFLLCTRAGGLGINLTAADTCIIFDSDWNPQNDLQAQARCHRIGQSKAVKVYRLITRNSYEREMFDKASLKLGLDKAVLQSMSGRDGNITGIQQFSKKEIEDLLRKGAYAAIMEEDDEGSKFCEEDIDQILLRRTTTITIESEGKGSTFAKASFVASENRTDISLDDPNFWQKWAKKADLDMDLLNSKNNLVIDTPRVRKQTRHFSTLKDDDLVEFSDLESEDDERPRSRRHDRHHAYGRTDCFRVEKHLLVYGWGRWRDILSHGRFKRRMTERDVETICRAILVYCLLHYRGDENIKGFIWDLISPAENGKTKELQNHSGLSIPVPRGRKGKKVKSQSTFDIHKADWIRKYNPDTLFQDESYKKHLKHQCNKVLLRVRMLYYLRQEVIGDQAEKVLGGAIASEIDIWFPVVDQLEVPTTWWDSEADKSLLIGVFKHGYEKYNTMRADPALCFLEKAGRPDDKAIAAEHRVLDNFSDIVEGVDFDKDCEDPEYKPLQGPPKDQDDEGDPLMMMDEEISVIDGDEAQVTQQPGHLFWPPGSALTARLRRLVTAYQRSYKREQMKIEAAERGDRRRRRCEAAFKLKEIARREKQQRWTRRETNLIAIEGVSNVGRGTMTHETQGQDHKEIRYTHYRNDKDNRRKMKRPDQVNRKGIRGAMEPDTVRRHNPSKMEMNTAEAKLVTGDNTLKKKRHKDS

SEQ ID NO: 841973 - protein, 88 aa, Homo sapiens
TLKLEHEVVARSRPTPQDYEMRVSPSDTTPLVSRSVPPVKLEDEDDSDSELDLSKLSPSSSSSSSSSSSSSSTDESEDEKEEKLSECM

SEQ ID NO: 841974 - protein, 1077 aa, Homo sapiens
MGEAGVNRPRQTKELQNHSGLSIPVPRGRKGKKVKSQSTFDIHKADWIRKYNPDTLFQDESYKKHLKHQCNKVLLRVRMLYYLRQEVIGDQAEKVLGGAIASEIDIWFPVVDQLEVPTTWWDSEADKSLLIGVFKHGYEKYNTMRADPALCFLEKAGRPDDKAIAAEHRVLDNFSDIVEGVDFDKDCEDPEYKPLQGPPKDQDDEGDPLMMMDEEISVIDGDEAQVTQQPGHLFWPPGSALTARLRRLVTAYQRSYKREQMKIEAAERGDRRRRRCEAAFKLKEIARREKQQRWTRREQTDFYRVVSTFGVEYDPDTMQFHWDRFRTFARLDKKTDESLTKYFHGFVAMCRQVCRLPPAAGDEPPDPNLFIEPITEERASRTLYRIELLRRLREQVLCHPLLEDRLALCQPPGPELPKWWEPVRHDGELLRGAARHGVSQTDCNIMQDPDFSFLAARMNYMQNHQAGAPAPSLSRCSTPLLHQQYTSRTASPLPLRPDAPVEKSPEETATQVPSLESLTLKLEHEVVARSRPTPQDYEMRVSPSDTTPLVSRSVPPVKLEDEDDSDSELDLSKLSPSSSSSSSSSSSSSSTDESEDEKEEKLTDQSRSKLYDEESLLSLTMSQDGFPNEDGEQMTPELLLLQERQRASEWPKDRVLINRIDLVCQAVLSGKWPSSRRSQEMVTGGILGPGNHLLDSPSLTPGEYGDSPVPTPRSSSAASMAEEEASAVSTAAAQFTKLRRGMDEKEFTVQIKDEEGLKLTFQKHKLMANGVMGDGHPLFHKKKGNRKKLVELEVECMEEPNHLDVDLETRIPVINKVDGTLLVGEDAPRRAELEMWLQGHPEFAVDPRFLAYMEDRRKQKWQRCKKNNKAELNCLGMEPVQTANSRNGKKGHHTETVFNRVLPGPIAPESSKKRARRMRPDLSKMMALMQGGSTGSLSLHNTFQHSSSGLQSVSSLGHSSATSASLPFMPFVMGGAPSSPHVDSSTMLHHHHHHPHPHHHHHHHPGLRAPGYPSSPVTTASGTTLRLPPLQPEEDDDEDEEDDDDLSQGYDSSERDFSLIDDPMMPANSDSSEDADD

SEQ ID NO: 841975 - protein, 1540 aa, Homo sapiens
WEREFNTWTEMNTIVYHGSLASRQMIQQYEMYCKDSRGRLIPGAYKFDALITTFEMILSDCPELREIEWRCVIIDEAHRLKNRNCKLLDSLKHMDLEHKVLLTGTPLQNTVEELFSLLHFLEPSQFPSESEFLKDFGDLKTEEQVQKLQAILKPMMLRRLKEDVEKNLAPKQETIIEVELTNIQKKYYRAILEKNFSFLSKGAGHTNMPNLLNTMMELRKCCNHPYLINGAEEKILTEFREACHIIPHDFHLQAMVRSAGKLVLIDKLLPKLKAGGHKVLIFSQMVRCLDILEDYLIQRRYLYERIDGRVRGNLRQAAIDRFSKPDSDRFVFLLCTRAGGLGINLTAADTCIIFDSDWNPQNDLQAQARCHRIGQSKAVKVYRLITRNSYEREMFDKASLKLGLDKAVLQSMSGRDGNITGIQQFSKKEIEDLLRKGAYAAIMEEDDEGSKFCEEDIDQILLRRTTTITIESEGKGSTFAKASFVASENRTDISLDDPNFWQKWAKKADLDMDLLNSKNNLVIDTPRVRKQTRHFSTLKDDDLVEFSDLESEDDERPRSRRHDRHHAYGRTDCFRVEKHLLVYGWGRWRDILSHGRFKRRMTERDVETICRAILVYCLLHYRGDENIKGFIWDLISPAENGKTKELQNHSGLSIPVPRGRKGKKVKSQSTFDIHKADWIRKYNPDTLFQDESYKKHLKHQCNKVLLRVRMLYYLRQEVIGDQAEKVLGGAIASEIDIWFPVVDQLEVPTTWWDSEADKSLLIGVFKHGYEKYNTMRADPALCFLEKAGRPDDKAIAAEHRVLDNFSDIVEGVDFDKDCEDPEYKPLQGPPKDQDDEGDPLMMMDEEISVIDGDEAQVTQQPGHLFWPPGSALTARLRRLVTAYQRSYKREQMKIEAAERGDRRRRRCEAAFKLKEIARREKQQRWTRREQTDFYRVVSTFGVEYDPDTMQFHWDRFRTFARLDKKTDESLTKYFHGFVAMCRQVCRLPPAAGDEPPDPNLFIEPITEERASRTLYRIELLRRLREQVLCHPLLEDRLALCQPPGPELPKWWEPVRHDGELLRGAARHGVSQTDCNIMQDPDFSFLAARMNYMQNHQAGAPAPSLSRCSTPLLHQQYTSRTASPLPLRPDAPVEKSPEETATQVPSLESLTLKLEHEVVARSRPTPQDYEMRVSPSDTTPLVSRSVPPVKLEDEDDSDSELDLSKLSPSSSSSSSSSSSSSSTDESEDEKEEKLTDQSRSKLYDEESLLSLTMSQDGFPNEDGEQMTPELLLLQERQRASEWPKDRVLINRIDLVCQAVLSGKWPSSRRSQEMVTGGILGPGNHLLDSPSLTPGEYGDSPVPTPRSSSAASMAEEEASAVSTAAAQFTKLRRGMDEKEFTVQIKDEEGLKLTFQKHKLMANGVMGDGHPLFHKKKGNRKKLVELEVECMEEPNHLDVDLETRIPVINKVDGTLLVGEDAPRRAELEMWLQGHPEFAVDPRFLAVSGSPIQQDLKSFLWYLSCMRKRKHDILCHRFCICKIRVIINNTQSSNLTIVVMPKIK

SEQ ID NO: 841976 - protein, 1513 aa, Homo sapiens
WEREFNTWTEMNTIVYHGSLASRQMIQQYEMYCKDSRGRLIPGAYKFDALITTFEMILSDCPELREIEWRCVIIDEAHRLKNRNCKLLDSLKHMDLEHKVLLTGTPLQNTVEELFSLLHFLEPSQFPSESEFLKDFGDLKTEEQVQKLQAILKPMMLRRLKEDVEKNLAPKQETIIEVELTNIQKKYYRAILEKNFSFLSKGAGHTNMPNLLNTMMELRKCCNHPYLINGAEEKILTEFREACHIIPHDFHLQAMVRSAGKLVLIDKLLPKLKAGGHKVLIFSQMVRCLDILEDYLIQRRYLYERIDGRVRGNLRQAAIDRFSKPDSDRFVFLLCTRAGGLGINLTAADTCIIFDSDWNPQNDLQAQARCHRIGQSKAVKVYRLITRNSYEREMFDKASLKLGLDKAVLQSMSGRDGNITGIQQFSKKEIEDLLRKGAYAAIMEEDDEGSKFCEEDIDQILLRRTTTITIESEGKGSTFAKASFVASENRTDISLDDPNFWQKWAKKADLDMDLLNSKNNLVIDTPRVRKQTRHFSTLKDDDLVEFSDLESEDDERPRSRRHDRHHAYGRTDCFRVEKHLLVYGWGRWRDILSHGRFKRRMTERDVETICRAILVYCLLHYRGDENIKGFIWDLISPAENGKTKELQNHSGLSIPVPRGRKGKKVKSQSTFDIHKADWIRKYNPDTLFQDESYKKHLKHQCNKVLLRVRMLYYLRQEVIGDQAEKVLGGAIASEIDIWFPVVDQLEVPTTWWDSEADKSLLIGVFKHGYEKYNTMRADPALCFLEKAGRPDDKAIAAEHRVLDNFSDIVEGVDFDKDCEDPEYKPLQGPPKDQDDEGDPLMMMDEEISVIDGDEAQVTQQPGHLFWPPGSALTARLRRLVTAYQRSYKREQMKIEAAERGDRRRRRCEAAFKLKEIARREKQQRWTRREQTDFYRVVSTFGVEYDPDTMQFHWDRFRTFARLDKKTDESLTKYFHGFVAMCRQVCRLPPAAGDEPPDPNLFIEPITEERASRTLYRIELLRRLREQVLCHPLLEDRLALCQPPGPELPKWWEPVRHDGELLRGAARHGVSQTDCNIMQDPDFSFLAARMNYMQNHQAGAPAPSLSRCSTPLLHQQYTSRTASPLPLRPDAPVEKSPEETATQVPSLESLTLKLEHEVVARSRPTPQDYEMRVSPSDTTPLVSRSVPPVKLEDEDDSDSELDLSKLSPSSSSSSSSSSSSSSTDESEDEKEEKLTDQSRSKLYDEESLLSLTMSQDGFPNEDGEQMTPELLLLQERQRASEWPKDRVLINRIDLVCQAVLSGKWPSSRRSQEMVTGGILGPGNHLLDSPSLTPGEYGDSPVPTPRSSSAASMAEEEASAVSTAAAQFTKLRRGMDEKEFTVQIKDEEGLKLTFQKHKLMANGVMGDGHPLFHKKKGNRKKLVELEVECMEEPNHLDVDLETRIPVINKVDGTLLVGEDAPRRAELEMWLQGHPEFAVDPRFLAYMEDRRKQKWQRCTLEMGGSSHCGVQPGFCQ

SEQ ID NO: 841977 - protein, 161 aa, Homo sapiens [sequence omitted]

SEQ ID NO: 841978 - protein, 258 aa, Homo sapiens
WEREFNTWTEMNTIVYHGSLASRQMIQQYEMYCKDSRGRLIPGAYKFDALITTFEMILSDCPELREIEWRCVIIDEAHRLKNRNCKLLDSLKHMDLEHKVLLTGTPLQNTVEELFSLLHFLEPSQFPSESEFLKDFGDLKTEEQVQKLQAILKPMMLRRLKEDVEKNLAPKQETIIEVELTNIQKKYYRAILEKNFSFLSKGAGHTNMPNLLNTMMELRKCCNHPYLINGEGMLGIYLNFCSTCVYFPDDSPWGQWMH

SEQ ID NO: 841979 - protein, 629 aa, Homo sapiens
RPRRGGAGTGPRGESAGLLLLLLQVLPPGATAGPGRRGTRGAGAGGGGVCWPGAAPAFPRDARLLLLLPPLPPLSPPPPSSAPAASASRMDALPRSGLNLKEEPLLPAGLGSVRSWMQGAGILDASTAAQSGVGLARAHFEKQPPSNLRKSNFFHFVLAMYDRQGQPVEVERTAFIDFVEKDREPGAEKTNNGIHYRLRLVYNNGLRTEQDLYVRLIDSMSKQAIIYEGQDKNPEMCRVLLTHEIMCSRCCDRKSCGNRNETPSDPVIIDRFFLKFFLKCNQNCLKNAGNPRDMRRFQVVVSTTVSVDGHVLAVSDNMFVHNNSKHGRRARRLDPSEAATPCIKAISPGEGWTTGGATVIVIGDNFFDGLQVVFGNVLVWSELITPHAIRVQTPPRHIPGVVEVTLSYKSKQFCKGCPGRFVYTALNEPTIDYGFQRLQKVIPRHPGDPERLPKEVLLKRAADLAEALYGVPGSNQELLLKRAADVAEALYSTPRAPGPLAPLAPSHPHPAVVGINAFSSPLAIAVGDATPGPEPGYARSCSSASPRGFAPSPGSQQSGYGGGLGAGLGGYGAPGVAGLGVPGSPSFLNGSTATSPFAKERLRPRAAPPKLPTPGLPQSPRRGASRPVF

SEQ ID NO: 841980 - protein, 165 aa, Homo sapiens
MREAESNKLVLICRLLCDPLSLARPSSPENGTDVAGHNQRTLVVGLDTSLTQEGWAPPAKHRPQCYAPPGYNMAEGCAAELLTSSVIQTSENKITEGGASQNNTQEQTTKNTQKKTNSNTTQEQQNTEKPDDKKTTRERRQRTKHKAEKPQATDHQRHEHRSAQT

SEQ ID NO: 841981 - protein, 621 aa, Homo sapiens
RPRRGGAGTGPRGESAGLLLLLLQDALPRSGLNLKEEPLLPAGLGSVRSWMQGAGILDASTAAQSGVGLARAHFEKQPPSNLRKSNFFHFVLAMYDRQGQPVEVERTAFIDFVEKDREPGAEKTNNGIHYRLRLVYNNGLRTEQDLYVRLIDSMSKQAIIYEGQDKNPEMCRVLLTHEIMCSRCCDRKSCGNRNETPSDPVIIDRFFLKFFLKCNQNCLKNAGNPRDMRRFQVVVSTTVSVDGHVLAVSDNMFVHNNSKHGRRARRLDPSEAATPCIKAISPGEGWTTGGATVIVIGDNFFDGLQVVFGNVLVWSELITPHAIRVQTPPRHIPGVVEVTLSYKSKQFCKGCPGRFVYTALNEPTIDYGFQRLQKVIPRHPGDPERLPKEVLLKRAADLAEALYGVPGSNQELLLKRAADVAEALYSTPRAPGPLAPLAPSHPHPAVVGINAFSSPLAIAVGDATPGPEPGYARSCSSASPRGFAPSPGSQQSGYGGGLGAGLGGYGAPGVAGLGVPGSPSFLNGSTATSPFAIMPSSPPLAAASSMSLPAAAPTTSVFSFSPVNMISAVKQRSAFAPVLRPPSSPPQACPRAHGEGLPDQSFEDSDKFHSPARGLQGLAYS

SEQ ID NO: 841982 - protein, 568 aa, Homo sapiens
RPRRGGAGTGPRGESAGLLLLLLQDALPRSGLNLKEEPLLPAGLGSVRSWMQGAGILDASTAAQSGVGLARAHFEKQPPSNLRKSNFFHFVLAMYDRQGQPVEVERTAFIDFVEKDREPGAEKTNNGIHYRLRLVYNNGLRTEQDLYVRLIDSMSKQAIIYEGQDKNPEMCRVLLTHEIMCSRCCDRKSCGNRNETPSDPVIIDRFFLKFFLKCNQNCLKNAGNPRDMRRFQVVVSTTVSVDGHVLAVSDNMFVHNNSKHGRRARRLDPSEAATPCIKAISPGEGWTTGGATVIVIGDNFFDGLQVVFGNVLVWSELITPHAIRVQTPPRHIPGVVEVTLSYKSKQFCKGCPGRFVYTALNEPTIDYGFQRLQKVIPRHPGDPERLPKEVLLKRAADLAEALYGVPGSNQELLLKRAADVAEALYSTPRAPGPLAPLAPSHPHPAVVGINAFSSPLAIAVGDATPGPEPGYARSCSSASPRGFAPSPGSQQSGYGGGLGAGLGGYGAPGVAGLGVPGSPSFLNGSTATSPFAIMPSSPPLAEEGVPGLLYLGSSPSGCLMDSGPTHSQ

SEQ ID NO: 841983 - protein, 322 aa, Homo sapiens
LTGLAGIAEKDNTHQQKQRSVRTWRMHTGGCWGRGGAWCWVGTGVCLPHQPPDLCPGTLRNPLPQAEPALERATYRQTESADFIPFLPAGGGPVWEEGLSPAWAAQSKAEGVLFPGAVVSLGLGLGDARSVCAATCTSEEPPSPPACAPPSPQAIIYEGQDKNPEMCRVLLTHEIMCSRCCDRKSCGNRNETPSDPVIIDRFFLKFFLKCNQNCLKNAGNPRDMRRFQVVVSTTVSVDGHVLAVSDNMFVHNNSKHGRRARRLDPSEAAPTSFETCTLMLAASCLPVGALGMEEAEEGVPGLLYLGSSPSGCLMDSGPTHSQ

SEQ ID NO: 841984 - protein, 598 aa, Homo sapiens
RPRRGGAGTGPRGESAGLLLLLLQDALPRSGLNLKEEPLLPAGLGSVRSWMQGAGILDASTAAQSGVGLARAHFEKQPPSNLRKSNFFHFVLAMYDRQGQPVEVERTAFIDFVEKDREPGAEKTNNGIHYRLRLVYNNGLRTEQDLYVRLIDSMSKQAIIYEGQDKNPEMCRVLLTHEIMCRFFLKFFLKCNQNCLKNAGNPRDMRRFQVVVSTTVSVDGHVLAVSDNMFVHNNSKHGRRARRLDPSEAATPCIKAISPGEGWTTGGATVIVIGDNFFDGLQVVFGNVLVWSELITPHAIRVQTPPRHIPGVVEVTLSYKSKQFCKGCPGRFVYTALNEPTIDYGFQRLQKVIPRHPGDPERLPKEVLLKRAADLAEALYGVPGSNQELLLKRAADVAEALYSTPRAPGPLAPLAPSHPHPAVVGINAFSSPLAIAVGDATPGPEPGYARSCSSASPRGFAPSPGSQQSGYGGGLGAGLGGYGAPGVAGLGVPGSPSFLNGSTATSPFAIMPSSPPLAAASSMSLPAAAPTTSVFSFSPVNMISAVKQRSAFAPVLRPPSSPPQACPRAHGEGLPDQSFEDSDKFHSPARGLQGLAYS

SEQ ID NO: 841985 - protein, 617 aa, Homo sapiens
LTGLAGIAEKDNTHQQKQRSVRTWRMHTGGCWGRGGAWCWVGTGVCLPHQPPDLCPGTLRNPLPQAEPALERATYRQTESADFIPFLPAGGGPVWEEGLSPAWAAQSKAEGVLFPGAVVSLGLGLGDARSVCAATCTSEEPPSPPACAPPSPQAIIYEGQDKNPEMCRVLLTHEIMCSRCCDRKSCGNRNETPSDPVIIDRFFLKFFLKCNQNCLKNAGNPRDMRRFQVVVSTTVSVDGHVLAVSDNMFVHNNSKHGRRARRLDPSEAATPCIKAISPGEGWTTGGATVIVIGDNFFDGLQVVFGNVLVWSELITPHAIRVQTPPRHIPGVVEVTLSYKSKQFCKGCPGRFVYTALNEPTIDYGFQRLQKVIPRHPGDPERLPKEVLLKRAADLAEALYGVPGSNQELLLKRAADVAEALYSTPRAPGPLAPLAPSHPHPAVVGINAFSSPLAIAVGDATPGPEPGYARSCSSASPRGFAPSPGSQQSGYGGGLGAGLGGYGAPGVAGLGVPGSPSFLNGSTATSPFAIMPSSPPLAAASSMSLPAAAPTTSVFSFSPVNMISAVKQRSAFAPVLRPPSSPPQACPRAHGEGLPDQSFEDSDKFHSPARGLQGLAYS

SEQ ID NO: 841986 - protein, 43 aa, Homo sapiens
MRFGGDQHPNHNKTEVIERGLQKYHPTLLLPPIGQNLVTWPQL

SEQ ID NO: 841987 - protein, 102 aa, Homo sapiens
APISLVHPAQIPSVPFCFLCLHSQTSMNDLALLSTKCDLVSGKQNRQFDDSVFRSKSPGNFGVIGEGQKKVPRLLWFSFAKGVTTGTGPVVSGSPWEGEVGF

SEQ ID NO: 841988 - protein, 155 aa, Homo sapiens
MLKAKILFVGPCESGKTVLANFLTESSDITEYSPTQGVRFESCWPALMKDAHGVVIVFNADIPSHRKEMEMWYSCFVQQPSLQDTQCMLIAHHKPGSGDDKGSLSLSPPLNKLKLVHSNLEDDPEEIRMEFIKYLKSIINSMSESRDREEMSIMT

SEQ ID NO: 841989 - protein, 108 aa, Homo sapiens
MKDAHGVVIVFNADIPSHRKEMEMWYSCFVQQPSLQDTQCMLIAHHKPGSGDDKGSLSLSPPLNKLKLVHSNLEDDPEEIRMEFIKYLKSIINSMSESRDREEMSIMT

SEQ ID NO: 841990 - protein, 79 aa, Homo sapiens
GRYYYYYYKFAAASTHHKPGSGDDKGSLSLSPPLNKLKLVHSNLEDDPEEIRMEFIKYLKSIINSMSESRDREEMSIMT

SEQ ID NO: 841991 - protein, 148 aa, Homo sapiens
MLKAKILFVGPCESGKTVLANFLTESSDITEYSPTQGVRILEFENPHVTSNNKGTGCEFELWDCGGDAKFESCWPALMKDAHGVVIVFNADIPSHRKEMEMWYSCFVQQPSLQDTQCMLIAHHKPGSGDDKGSLSLCKETGISLPLLS

SEQ ID NO: 841992 - protein, 185 aa, Homo sapiens
MLKAKILFVGPCESGKTVLANFLTESSDITEYSPTQGVRILEFENPHVTSNNKGTGCEFELWDCGGDAKFESCWPALMKDAHGVVIVFNADIPSHRKEMEMWYSCFVQQPSLQDTQCMLIAHHKPGSGDDKGSLSLSPPLNKLKLVHSNLEDDPEEIRMEFIKYLKSIINSMSESRDREEMSIMT

SEQ ID NO: 841993 - protein, 108 aa, Homo sapiens; identical to SEQ ID NO: 841989

SEQ ID NO: 841994 - protein, 108 aa, Homo sapiens; identical to SEQ ID NO: 841989

SEQ ID NO: 841995 - protein, 108 aa, Homo sapiens; identical to SEQ ID NO: 841989

SEQ ID NO: 841996 - protein, 116 aa, Homo sapiens
MIKEACLCVRKLEFLFLFCLECFGHLHIVPCPRNQQLCPVTEHLLYPRQLLPSPCESTTSLLKIQKLARHDGRRLYSQLLRGLRQENCLSPGGGDCSELRSHHYTPVCVTGRDTIS

SEQ ID NO: 841997 - protein, 317 aa, Homo sapiens
VNTAMHEAKLMEECDELVEIIQQRKQMIAVKIKETKVMKLRKLAQQVANCRQCLERSTVLINQAEHILKENDQARFLQSAKNIAERVAMATASSQVLIPDINFNDAFENFALDFSREKKLLEGLDYLTAPNPPSIREELCTASHDTITVHWISDDEFSISSYELQYTIFTGQANFISLYNSVDSWMIVPNIKQNHYTVHGLQSGTRYIFIVKAINQAGSEQCTYPTKKQTATFNWIPNDSQKVEDLHDGSRWRKMKVSKKSQPEKLVARAMGAGNSDELALGGRAHMVMVRNIQEWKPGPKTRHRGGPTARKVTRGD

SEQ ID NO: 841998 - protein, 219 aa, Homo sapiens
VIRLGFLSMDSTIPVLGTELTPINGREETPCYKQTLSFTGLTCIVSLVALTGNAVVLWLLGCRMRRNAVSIYILNLVAADFLFLSGHIICSPLRLINIRHPISKILSPVMTFPYFIGLSMLSAISTERCLSILWPIWYHCRRPRYLSSVMCVLLWALSLLRSILEWMFCDFLFSGANSVWCETSDFITIAWLVFLCVVLCGSSLVLLVRILCGSRKMPL

SEQ ID NO: 841999 - protein, 136 aa, Homo sapiens
FSLLLLFSDSMPEPAKSAPAPKKGSKKAVTKAQKKDGKKRKRSRKESYSVYVYKVLKQVHPDTGISSKAMGIMNSFVNDIFERIAGEASRLAHYNKRSTITSREIQTAVRLLLPGELAKHAVSEGTKAVTKYTSSK

SEQ ID NO: 842000 - protein, 72 aa, Homo sapiens
SVKSTGFGIRQNWIIILAPWHTSHVTWFKLLTFSEPQFPYHKNWIVTPINTWAFREDDICKPGTAGYSVSDT

SEQ ID NO: 842001 - protein, 100 aa, Homo sapiens
WSSEKLWPKMEEQVCGRRGPRTRSPDASVENTFYFTTWSPSYPRAYEQPGNYFGGYQQGDLEILEIGKNKTICLGRQRELVSSRTLIPALGHWYSWFSGL

SEQ ID NO: 842002 - protein, 366 aa, Homo sapiens
SKLEKGHLRGPEIRDWRGPQLEGEKDWGLEGYVWRGSQLEDQALRGLEGYTWRVAQLEDRRSTTDLRGTQFDYERVRSLEGSPWRGAQLHDERAGGLRTAEWKGPQSEVEKGRGLEVRNLRGIPLEKSLELAPENGDQRGPQWEDERRRGPEIAEERGARVGVKRRRGLEDIVLVQLGDTRVTGMENGDGGGARSVGPKSRAGRGMEWGDAGGRCLGLGNGVVSGTPVGTVLEGSPEWAAARSEHLAAGDGLQEGGEDGPREPKRLCRPPGEEEVDWEPLAKFRAACGPELADLVAEELAFARQHGTRGFHWTGAGFALKDGTSDFFLDGALTRCSCSIHAARRLPCRHLFAARLLTGAALFHMDL

SEQ ID NO: 842003 - protein, 229 aa, Homo sapiens
EKPDVLSQELGMEGEKSSAEDQMRMKWESLHQEFSTKQKLLQNVLEQEQEQVLYSRPNRLLSGVPLYKGDVPTQDKSAVTSLLDGLNQAFEEVSSQSGGAKRQSIHLEQKLYDGVSATSTWLDDVEERLFVATALLPEETETCLFNQEILAKDIKEMSEEMDKNKNLFSQAFPENGDNRDVIEDTLGCLLGRLSLLDSVVNQRCHQMKERLQQILNFQNDLKVLFASPS

SEQ ID NO: 842004 - protein, 62 aa, Homo sapiens
RLGRGLDRVRLQSVRALQEGSLHWNRTGYWLWSLLGDCCVEKEGRVQPSDWDSPDPGHKSLE

SEQ ID NO: 842005 - protein, 66 aa, Homo sapiens
RYPLWTLPPAIESVLLLEGEEIPIHKDTKVPNASLFTINKEGHTLGYIINQVHCFPFAFCRDCQFH

SEQ ID NO: 842006 - protein, 84 aa, Homo sapiens
GRLVPSLPSLSSVCCSVGHLPGGPAARHQSDRSYDSLIGDSGWVWILTPGLCLLSQTLICHPHAEPSCHPQKPIRLPPAHGMDF

SEQ ID NO: 842007 - protein, 538 aa, Homo sapiens
MPRGWAAPLLLLLLQGGWGCPDLVCYTDYLQTVICILEMWNLHPSTLTLTWQDQYEELKDEATSCSLHRSAHNATHATYTCHMDVFHFMADDIFSVNITDQSGNYSQECGSFLLAESIKPAPPFNVTVTFSGQYNISWRSDYEDPAFYMLKGKLQYELQYRNRGDPWAVSPRRKLISVDSRSVSLLPLEFRKDSSYELQVRAGPMPGSSYQGTWSEWSDPVIFQTQSEELKEGWNPHLLLLLLLVIVFIPAFWSLKTHPLWRLWKKIWAVPSPERFFMPLYKGCSGDFKKWVGAPFTGSSLELGPWSPEVPSTLEVYSCHPPRSPAKRLQLTELQEPAELVESDGVPKPSFWPTAQNSGGSAYSEERDRPYGLVSIDTVTVLDAEGPCTWPCSCEDDGYPALDLDAGLEPSPGLEDPLLDAGTTVLSCGCVSAGSPGLGGPLGSLLDRLKPPLADGEDWAGGLPWGGRSPGGVSESEAGSPLAGLDMDTFDSGFVGSDCSSPVECDFTSPGDEGPPRSYLRQWVVIPPPLSSPGPQAS

SEQ ID NO: 842008 - protein, 538 aa, Homo sapiens; identical to SEQ ID NO: 842007

SEQ ID NO: 842009 - protein, 84 aa, Homo sapiens
MVRGQPSSLCMWRRGGWGGQWRLSLEGWERKNIPGGGALGSGNLGLAAGMTSLLSEGRRPGAGHSKPGGCCEEDICDSLGGEWG

SEQ ID NO: 842010 - protein, 538 aa, Homo sapiens; identical to SEQ ID NO: 842007

SEQ ID NO: 842011 - protein, 538 aa, Homo sapiens; identical to SEQ ID NO: 842007

SEQ ID NO: 842012 - protein, 258 aa, Homo sapiens [sequence omitted]

SEQ ID NO: 842013 - protein, 365 aa, Homo sapiens
MPRGWAAPLLLLLLQGGWGCPDLVCYTDYLQTVICILEMWNLHPSTLTLTWQDQYEELKDEATSCSLHRSAHNATHATYTCHMDVFHFMADDIFSVNITDQSGNYSQECGSFLLAESIKPAPPFNVTVTFSGQYNISWRSDYEDPAFYMLKGKLQYELQYRNRGDPWAVSPRRKLISVDSRSVSLLPLEFRKDSSYELQVRAGPMPGSSYQGTWSEWSDPVIFQTQSEELKEGWNPHLLLLLLLVIVFIPAFWSLKTHPLWRLWKKIWAVPSPERFFMPLYKGCSGDFKVSSRPCDELLGAPPPLQEPHLPSPQAPQPHPTGLEHPGLSQATSQASVSPCAKCRQSFLWCRIGRRIKQDLTRCGG

SEQ ID NO: 842014 - protein, 330 aa, Homo sapiens
MNASGSGYPLASLYVGDLHPDVTEAMLYEKFSPAGPILSIRVCRDVATRRSLGYAYINFQQPADAERALDTMNFEMLKGQPIRIMWSQRDPGLRKSGVGNIFIKNLEDSIDNKALYDTFSTFGNILSCKVACDEHGSRGFGFVHFETHEAAQQAINTMNGMLLNDRKVFVGHFKSRREREAELGARALEFTNIYVKNLPVDVDEQGLQDLFSQFGKMLSVKVMRDNSGHSRCFGFVNFEKHEEAQKAVVHMNGKEVSGRLLYAGRAQKRVERQNELKRRFEQMKQDRLRRYQGVNLYVKNLDDSIDDDKLRKEFSPYGVITSAKKRRQRP

SEQ ID NO: 842015 - protein, 259 aa, Homo sapiens [sequence omitted]

SEQ ID NO: 842016 - protein, 296 aa, Homo sapiens
MNASGSGYPLASLYVGDLHPDVTEAMLYEKFSPAGPILSIRVCRDVATRRSLGYAYINFQQPADAERALDTMNFEMLKGQPIRIMWSQRDPGLRKSGVGNIFIKNLEDSIDNKALYDTFSTFGNILSCKVACDEHGSRGFGFVHFETHEAAQQAINTMNGMLLNDRKVFVGHFKSRREREAELGARALEFTNIYVKNLPVDVDEQGLQDLFSQFGKMLSVKVSGRLLYAGRAQKRVERQNELKRRFEQMKQDRLRRYQGVNLYVKNLDDSIDDDKLRKEFSPYGVITSAKKRRQRP

SEQ ID NO: 842017 - protein, 114 aa, Homo sapiens [sequence omitted]

SEQ ID NO: 842018 - protein, 186 aa, Homo sapiens
MVTVRTRIAVLSLRPPVWWNSRKVFVGHFKSRREREAELGARALEFTNIYVKNLPVDVDEQGLQDLFSQFGKMLSVKVMRDNSGHSRCFGFVNFEKHEEAQKAVVHMNGKEVSGRLLYAGRAQKRVERQNELKRRFEQMKQDRLRRYQGVNLYVKNLDDSIDDDKLRKEFSPYGVITSAKKRRQRP

SEQ ID NO: 842019 - protein, 83 aa, Homo sapiens
RSLHGCVLHLSWYIPRSGIAVSLPAPALPSTINKSSLRPPRKWKDDGAMLVFPAEPMMKKYLLWNYFVQKKKVENCQRNQNKD

SEQ ID NO: 842020 - protein, 54 aa, Homo sapiens
HPTCLGSGVNTGLVMGKLFSPGNQDEQLKSSRKRSENRKQLLSEASSWPRSQGG

SEQ ID NO: 842021 - protein, 107 aa, Homo sapiens
AVSIGWEGGVYVQTCGHTLHIDCHKSYMESLRNDQVLQGFSVDKGEFTCPLCRQFANSVLPCYPGSNVENNPWQRPSNKSIQDLIKEVEELQGRPGAFPVSISVRHK

SEQ ID NO: 842022 - protein, 42 aa, Homo sapiens
RERPLPESATYAGVFSGKERLCKAQRAEQRDGSKSAQAWQIP

SEQ ID NO: 842023 - protein, 60 aa, Homo sapiens
TFLLLPCFCCFCFCPRGSVPLLTPYREGLVTRLFSVLPSSLTLSRACLLLPASALAGAGG

SEQ ID NO: 842024 - protein, 108 aa, Homo sapiens
SKQNIFKHKLHRTYKTKIQVKKQKQKTKNQSTQTTKNMMNVTIPHISILTLNVKGLNAPLKRYRTAEWVRTHQPIICCLQKTHLAHKDSNKLKVKGWKKAFHANGHQK

SEQ ID NO: 842025 - protein, 178 aa, Homo sapiens
NRRVGKQELSIGANCDRIATVQHEFLHALGFWHEQSRSDRDDYVRIMWDRILSGREHNFNTYSDDISDSLNVPYDYTSVMHYSKTAFQNGTEPTIVTRISDFEDVIGQRMDFSDSDLLKLNQLYNCSSSLSFMDSCSFELENVCGMIQSSGDNADWQRVSQVPRGPESDHSNMGQCQG

SEQ ID NO: 842026 - protein, 61 aa, Homo sapiens
LLGVDKASWVCGFIAFVTFGNLWPLFSQIPRLPSGLQLLARGIPCCRPQVTEVVFVSCRLL

SEQ ID NO: 842027 - protein, 105 aa, Homo sapiens
IHPSKVKHNSVYQDISMVPRYTYLQVSFLGGVCYNQLEISSFKNLLSNLGFPIHILEMTLTNLLPRLECSGTIMAHCSLNFLASNNPPTSASRIVGLRAQANTPG

SEQ ID NO: 842028 - protein, 102 aa, Homo sapiens
MFLITPQLSTKWLLTFQHRMLASVCQTCNVLLPCSSLLLAQEKWPLSALKFLSPLSMAYLGHTSQAAFVFHWFCHFPLEDCKLPKGRGRAPGISQGSLAPFS

SEQ ID NO: 842029 - protein, 122 aa, Homo sapiens
MNHCIQFSPQSLQRWLILPCYDLKLPIWANTTEFCPHGPRRASQDPQLLAWLPDQSLEVSLELYDWNSMTFTLFLETVEPVAVESEGSGIFSFVWQQLIFPAEARWCFSWAQDCGLDGSFPG

SEQ ID NO: 842030 - protein, 345 aa, Homo sapiens
PSRRPGVNGTRHFQSPPPVPGEVLKLDDVIDNIMRLDDVLGYINPEMQMPNTLPLSSSHLNVYSSDPQVTASLVGVTSSSCPADLTQKRELTDAESRALAKERQKKDNHNLIERRRRFNINDRIKELGMLIPKANDLDVRWNKGTILKASVDYIRRMQKDLQKSRELENHSRRLEMTNKQLWLRIQELEMQARVHGLPTTSPSGMNMAELAQQVVKQELPSEEGPGEALMLGAEVPDPEPLPALPPQAPLPLPTQPPSPFHHLDFSHSLSFGGREDEGPPGYPEPLAPGHGSPFPSLSKKDLDLMLLDDSLLPLASDPLLSTMSPEASKASSRRSSFSMEEGDVL

SEQ ID NO: 842031 - protein, 476 aa, Homo sapiens
MASRIGLRMQLMREQAQQEEQRERMQQQAVMHYMQQQQQQQQQQLGGPPTPAINTPVHFQSPPPVPGEVLKVQSYLENPTSYHLQQSQHQKVREYLSETYGNKFAAHISPAQGSPKPPPAASPGVRAGHVLSSSAGNSAPNSPMAMLHIGSNPERELDDVIDNIMRLDDVLGYINPEMQMPNTLPLSSSHLNVYSSDPQVTASLVGVTSSSCPADLTQKRELTDAESRALAKERQKKDNHNLIERRRRFNINDRIKELGMLIPKANDLDVRWNKGTILKASVDYIRRMQKDLQKSRELENHSRRLEMTNKQLWLRIQELEMQARVHGLPTTSPSGMNMAELAQQVVKQELPSEEGPGEALMLGAEVPDPEPLPALPPQAPLPLPTQPPSPFHHLDFSHSLSFGGREDEGPPGYPEPLAPGHGSPFPSLSKKDLDLMLLDDSLLPLASDPLLSTMSPEASKASSRRSSFSMEEGDVL

SEQ ID NO: 842032 - protein, 476 aa, Homo sapiens; identical to SEQ ID NO: 842031

SEQ ID NO: 842033 - protein, 217 aa, Homo sapiens [sequence omitted]

SEQ ID NO: 842034 - protein, 141 aa, Homo sapiens
  misc_feature (15)..(15): Xaa can be any naturally occurring amino acid
TGGDSQINGLVRGLXVCEEGPGEALMLGAEVPDPEPLPALPPQAPLPLPTQPPSPFHHLDFSHSLSFGGREDEGPPGYPEPLAPGHGSPFPSLSKKDLDLMLLDDSLLPLASDPLLSTMSPEASKASSRRSSFSMEEGDVL

SEQ ID NO: 842035 - protein, 476 aa, Homo sapiens; identical to SEQ ID NO: 842031

SEQ ID NO: 842036 - protein, 512 aa, Homo sapiens
LGLGCGPGLRPLEELSIPGASFQGLPSRREPAPAATMASRIGLRMQLMREQAQQEEQRERMQQQAVMHYMQQQQQQQQQQLGGPPTPAINTPVHFQSPPPVPGEVLKVQSYLENPTSYHLQQSQHQKVREYLSETYGNKFAAHISPAQGSPKPPPAASPGVRAGHVLSSSAGNSAPNSPMAMLHIGSNPERELDDVIDNIMRLDDVLGYINPEMQMPNTLPLSSSHLNVYSSDPQVTASLVGVTSSSCPADLTQKRELTDAESRALAKERQKKDNHNLIERRRRFNINDRIKELGMLIPKANDLDVRWNKGTILKASVDYIRRMQKDLQKSRELENHSRRLEMTNKQLWLRIQELEMQARVHGLPTTSPSGMNMAELAQQVVKQELPSEEGPGEALMLGAEVPDPEPLPALPPQAPLPLPTQPPSPFHHLDFSHSLSFGGREDEGPPGYPEPLAPGHGSPFPSLSKKDLDLMLLDDSLLPLASDPLLSTMSPEASKASSRRSSFSMEEGDVL

SEQ ID NO: 842037 - protein, 477 aa, Homo sapiens
LGLGCGPGLRPLEELSIPGASFQGAALSKGASAGSHHGVTHRVAHAAHAGAGAAGGAAGAHAATGCHALHAAAAAAATAAARRAAHPGHQYPRPLPVATTCAWGGVEGAVLPGESHILPSAAVAASEGAGVLSSSAGNSAPNSPMAMLHIGSNPERELDDVIDNIMRLDDVLGYINPEMQMPNTLPLSSSHLNVYSSDPQVTASLVGVTSSSCPADLTQKRELTDAESRALAKERQKKDNHNLIERRRRFNINDRIKELGMLIPKANDLDVRWNKGTILKASVDYIRRMQKDLQKSRELENHSRRLEMTNKQLWLRIQELEMQARVHGLPTTSPSGMNMAELAQQVVKQELPSEEGPGEALMLGAEVPDPEPLPALPPQAPLPLPTQPPSPFHHLDFSHSLSFGGREDEGPPGYPEPLAPGHGSPFPSLSKKDLDLMLLDDSLLPLASDPLLSTMSPEASKASSRRSSFSMEEGDVL

SEQ ID NO: 842038 - protein, 102 aa, Homo sapiens
PLIRAVWCAIHKLITGSKTERPMSALLSNFHTEALSRDVVSFVTSALASRSQSKLVRELHYFFFPLPVTSLKDSKLSARKTSLSSSENCQFNEGKAEECIGG

SEQ ID NO: 842039 - protein, 77 aa, Homo sapiens
ENMLLLQRLQFQMAKCMEAEMDLLEFSINHCSSVRGPIMMIPTQPGPPTAYIQSSEEAEWHCLYSPQMLQNQQEGRL

SEQ ID NO: 842040 - protein, 320 aa, Homo sapiens
MSSCNFTHATFVLIGIPGLEKAHFWVGFPLLSMYVVAMFGNCIVVFIVRTERSLHAPMYLFLCMLAAIDLALSTSTMPKILALFWFDSREISFEACLTQMFFIHALSAIESTILLAMAFDRYVAICHPLRHAAVLNNTVTAQIGIVAVVRGSLFFFPLPLLIKRLAFCHSNVLSHSYCVHQDVMKLAYADTLPNVVYGLTAILLVMGVDVMFISLSYFLIIRTVLQLPSKSERAKAFGTCVSHIGVVLAFYVPLIGLSVVHRFGNSLHPIVRVVMGDIYLLLPPVINPIIYGAKTKQIRTRVLAMFKISCDKDLQAVGGK

SEQ ID NO: 842041 - protein, 176 aa, Homo sapiens
QLLTRCHFHLAVQLLWEVDTGKEDHHGGDGCMCVEEVLVVELKILPAFCVQHSCYMYYNYLICVKIQGSAFCYFHQAELEMLRNMARSWGSKSDAKASNPRNKTADHQLPTQAQPPFRAPRLPTQGPSPLVFPVNALLAIQPSGSIRVSCFYMIIFPPGKTALSVKVPPTRRLINA

SEQ ID NO: 842042 - protein, 69 aa, Homo sapiens
LCERRNQSYSPHPYWGPRFEDAPLLKTQKRHPSRTLPLRQPRNLDLRAPSSSEDPGTQNAQIFELMNEN

SEQ ID NO: 842043 - protein, 129 aa, Homo sapiens
MLCEEAAQKRKGKEPGMALPQGRLTFRDVAIEFSLAEWKCLNPSQRALYREVMLENYRNLEAVDISSKRMMKEVLSTGQGNTEVIHTGTLQRYQSYHIGDFCFQEIEKEIHDIEFQCQEDERNGHEAPM

SEQ ID NO: 842044 - protein, 418 aa, Homo sapiens
AALRDEGEEEAEVELAESGRRLRLPRDQIQRMNPPKFSKAEDMAELTCLNEASVLHNLRERYYSGLIYTYSGLFCVVINPYKQLPIYTEAIVEMYRGKKRHEVPPHVYAVTEGAYRSMLQDREDQSILCTGESGAGKTENTKKVIQYLAHVASSPKGRKEPGVPASVSTVSYGELERQLLQANPILEAFGNAKTVKNDNSSRFGKFIRINFDVAGYIVGANIETYLLEKSRAIRQAKDECSFHIFYQLLGGAGEQLKADLLLEPCSHYRFLTNGPSSSPGQERELFQETLESLRVLGFSHEEIISMLRMVSAVLQFGNIALKRERNTDQATMPDNTAAQKLCRLLGLGVTDFSRALLTPRIKVGRDYVQKAQTKEQADFALEALAKATYERLFRWLVLRLNRALDRSPRQGASFLGIL

SEQ ID NO: 842045 - protein, 410 aa, Homo sapiens
AALRDEGEEEAEVELAESGRRLRLPRDQIQRMNPPKFSKAEDMAELTCLNEASVLHNLRERYYSGLIYTYSGLFCVVINPYKQLPIYTEAIVEMYRGKKRHEVPPHVYAVTEGAYRSMLQDREDQSILCTGESGAGKTENTKKVIQYLAHVASSPKGRKEPGVPGELERQLLQANPILEAFGNAKTVKNDNSSRFGKFIRINFDVAGYIVGANIETYLLEKSRAIRQAKDECSFHIFYQLLGGAGEQLKADLLLEPCSHYRFLTNGPSSSPGQERELFQETLESLRVLGFSHEEIISMLRMVSAVLQFGNIALKRERNTDQATMPDNTAAQKLCRLLGLGVTDFSRALLTPRIKVGRDYVQKAQTKEQADFALEALAKATYERLFRWLVLRLNRALDRSPRQGASFLGIL

SEQ ID NO: 842046 - protein, 35 aa, Homo sapiens
MLGIQERQMSPCFTELTVLWGRQKLKLLHACTQTH

SEQ ID NO: 842047 - protein, 936 aa, Homo sapiens
MLRPEISSTSPSAPAVSPSSGETRSPQGPRYNFGLQETPQSRPSVQVVSASTCPGTSGAAGDRSSSSSSLPCPAPNSRPAQGSYFGNKRAYAENTVASNFTFGASSSSARDTNYPQTLKTPLSTGNPQRSGYKSWTPQVGYSASSSSAISAHSPSVIVAVVEGRGLARGEIGMASIDLKNPQIILSQFADNTTYAKVITKLKILSPLEIIMSNTACAVGNSTKLFTLITENFKNVNFTTIQRKYFNETKGLEYIEQLCIAEFSTVLMEVQSKYYCLAAVAALLKYVEFIQNSVYAPKSLKICFQGSEQTAMIDSSSAQNLELLINNQDYRNNHTLFGVLNYTKTPGGSRRLRSNILEPLVDIETINMRLDCVQELLQDEELFFGLQSVISRFLDTEQLLSVLVQIPKQDTVNAAESKITNLIYLKHTLELVDPLKIAMKNCNTPLLRAYYGSLEDKRFGIILEKIKTVINDDARYMKGCLNMRTQKCYAVRSNINEFLDIARRTYTEIVDDIAGMISQLGEKYSLPLRTSFSSARGFFIQMTTDCIALPSDQLPSEFIKISKVKNSYSFTSADLIKMNERCQESLREIYHMTYMIVCKLLSEIYEHIHCLYKLSDTVSMLDMLLSFAHACTLSDYVRPEFTDTLAIKQGWHPILEKISAEKPIANNTYVTEGSNFLIITGPNMSGKSTYLKQIALCQIMAQIGSYVPAEYSSFRIAKQIFTRISTDDDIETNSSTFMKEMKEIAYILHNANDKSLILIDELGRGTNTEEGIGICYAVCEYLLSLKAFTLFATHFLELCHIDALYPNVENMHFEVQHVKNTSRNKEAILYTYKLSKGLTEEKNYGLKAAEVSSLPPSIVLDAKEITTQITRQILQNQRSTPEMERQRAVYHLATRLVQTARNSQLDPDSLRIYLSNLKKKYKEDFPRTEQVPEKTEE

SEQ ID NO: 842048 - protein, 936 aa, Homo sapiens; identical to SEQ ID NO: 842047

SEQ ID NO: 842049 - protein, 105 aa, Homo sapiens
MLIAPRVVLRTSGGGPWGSLEALPPPLSPAPECGCAPEVCPHPLPTFSPVSSPDPTASAPASKWQLTDFLISSSVVTPKLWQPVAASPWTCSSSGFPTCCPCPNF

SEQ ID NO: 842050 - protein, 75 aa, Homo sapiens
APPLSAAPALSLLGPFFLCKGAYKANGICKSRCSQGLFDGGLCIQTVPPWYLVHWKALGVQGACMGKMLRPLSSL

SEQ ID NO: 842051 - protein, 231 aa, Homo sapiens
VLPVGLKQCLLDRISHHANKSHLSQRQSQSAAWSKEELKAYWQRKSPGIPAGANRKKKINGSSPDTFTSGGYHSPGDVSLGGPGSWGQGAQGAERVRTSKEEKKHEIHLVQKLGRSLFKLKNQTAEPLAPQPPAGPSKVEQLQDETNHLRKELESVGRQLQAEVENNQMLSLLNRRQEERLREQEERLREQEERLCEQEERLCEQEERLREQEERLCEQEKLPGQERLLEE

SEQ ID NO: 842052 - protein, 243 aa, Homo sapiens
SFDLTTQSPKFSHPISGSSGCSTNFQLEGEWRLWDLGATELKAYWQRKSPGIPAGANRKKKINGSSPDTFTSGGYHSPGDSQYQELAVALDSSSAIISQLTENINSLVRTSKEEKKHEIHLVQKLGRSLFKLKNQTAEPLAPQPPAGPSKVEQLQDETNHLRKELESVGRQLQAEVENNQMLSLLNRRQEERLREQEERLREQEERLCEQEERLCEQEERLREQEERLCEQEKLPGQERLLEE

SEQ ID NO: 842053 - protein, 258 aa, Homo sapiens
VLPVGLKQCLLDRISHHANKSHLSQRQSQSAAWSKEELKAYWQRKSPGIPAGANRKKKINGSSPDTFTSGGYHSPGDQQGIYGEGRASSTTLQDLESQYQELAVALDSSSAIISQLTENINSLVRTSKEEKKHEIHLVQKLGRSLFKLKNQTAEPLAPQPPAGPSKVEQLQDETNHLRKELESVGRQLQAEVENNQMLSLLNRRQEERLREQEERLREQEERLCEQEERLCEQEERLREQEERLCEQEKLPGQERLLE

SEQ ID NO: 842054 - protein, 111 aa, Homo sapiens
MSTNLTSFFLLLPSLDIACTLGNGAVHSSRSVSCPELYLRLRPLTQPQGMGWSFVQRQKKARQRYSIPGAARPQQSAQLLAEGLCDLPRDAELSQTRWPPTKGPRPGKLRP

SEQ ID NO: 842055 - protein, 305 aa, Homo sapiens
RKDRPLPPPSSLKASSRELTAGAPELDVLLMVHLQVCKALLQKLASPNLSRLVQECLLEEVAQQKHVLETLSVLDFEKVGKATSIEESPSGGKPFGVLVMCSPRVTIQVSELGLSVIPQASRTKGCLKLWRGCTGPGRVLSCPATTLLNQLKKTFQHRVRGKYPGQLEIACRRLLEQVVSCGGLLPGAGLPEEQIITWFQFHSYLQRQSVSDLEKHFTQLTKEVTLIEELHCAGLRPLTQPQGMGWSFVQRQKKARQRYSIPGAARPQQSAQLLAEGLCDLPRDAELSQTRWPPTKGPRPGKLRP

SEQ ID NO: 842056 - protein, 111 aa, Homo sapiens; identical to SEQ ID NO: 842054

SEQ ID NO: 842057 - protein, 305 aa, Homo sapiens; identical to SEQ ID NO: 842055

SEQ ID NO: 842058 - protein, 116 aa, Homo sapiens
SVCPSPLRRQVPIVSRPGESRGVRAVEPARSPETGPRSLCRMRRIETSRFRDVRGVRLRATLATPLSAPNGARCPPGGTREAAGAHFLSRGCEHVSTGEGRRGVRSAESRRPSHGG

SEQ ID NO: 842059 - protein, 121 aa, Homo sapiens [sequence omitted]

SEQ ID NO: 842060 - protein, 492 aa, Homo sapiens
MDFLLGNPFSSPVGQRIEKATDGSLQSEDWALNMEICDIINETEEGPKDALRAVKKRIVGNKNFHEVMLALTVLETCVKNCGHRFHVLVASQDFVESVLVRTILPKNNPPTIVHDKVLNLIQSWADAFRSSPDLTGVVTIYEDLRRKGLEFPMTDLDMLSPIHTPQRTVFNSETQSGQDSVGTDSSQQEDSGQHAAPLPAPPILSGDTPIAPTPEQIGKLRSELEMVSGNVRVMSEMLTELVPTQAEPADLELLQELNRTCRAMQQRVLELIPQIANEQLTEELLIVNDNLNNVFLRHERFERFRTGQTTKAPSEAEPAADLIDMGPDPAATGNLSSQLAGMNLGSSSVRAGLQSLEASGRLEDEFDMFALTRGSSLADQRKEVKYEAPQATDGLAGALDARQQSTGAIPVTQACLMEDIEQWLSTDVGNDAEEPKGVTSEEFDKFLEERAKAADRLPNLSSPSAEGPPGPPSGPAPRKKTQEKDDDMLFAL

SEQ ID NO: 842061 - protein, 492 aa, Homo sapiens
CVTRRVGGAGGCCQLIPGVGGSGGSSNGLSPGEPVQLSSGTAHRESHRWLPAERGLGPQHGDLRHHQRDGGRVLETCVKNCGHRFHVLVASQDFVESVLVRTILPKNNPPTIVHDKVLNLIQSWADAFRSSPDLTGVVTIYEDLRRKGLEFPMTDLDMLSPIHTPQRTVFNSETQSGQDSVGTDSSQQEDSGQHAAPLPAPPILSGDTPIAPTPEQIGKLRSELEMVSGNVRVMSEMLTELVPTQAEPADLELLQELNRTCRAMQQRVLELIPQIANEQLTEELLIVNDNLNNVFLRHERFERFRTGQTTKAPSEAEPAADLIDMGPDPAATGNLSSQLAGMNLGSSSVRAGLQSLEASGRLEDEFDMFALTRGSSLADQRKEVKYEAPQATDGLAGALDARQQSTGAIPVTQACLMEDIEQWLSTDVGNDAEEPKGVTSEEFDKFLEERAKAADRLPNLSSPSAEGPPGPPSGPAPRKKTQEKDDDMLFAL

SEQ ID NO: 842062 - protein, 492 aa, Homo sapiens; identical to SEQ ID NO: 842060

SEQ ID NO: 842063 - protein, 412 aa, Homo sapiens
MDFLLGNPFSSPVGQRIEKATDGSLQSEDWALNMEICDIINETEEGPKDALRAVKKRIVGNKNFHEVMLALTVLETCVKNCGHRFHVLVASQDFVESVLVRTILPKNNPPTIVHDKVLNLIQSWADAFRSSPDLTGVVTIYEDLRRKGLEFPMTDLDMLSPIHTPQRTVFNSETQSGQDSVGTDSSQQEDSGQHAAPLPAPPILSGDTPIAPTPEQIGKLRSELEMVSGNVRVMSEMLTELVPTQAEPADLELLQELNRTCRAMQQRVLELIPQIANEQLTEELLIVNDNLNNVFLRHERFERFRTGQTTKAPSEAEPAADLIDMGPDPAATGNLSSQLAGMNLGSSSVRAGLQSLEASGRLEDEFDMFALTRGSSLADQRKEVKYEAPQATDGLAGALDARQQSTGASPLG

SEQ ID NO: 842064 - protein, 123 aa, Homo sapiens
LEDPPEYTATSEGYLTNSWKNGPKPRTDCPTSPAPQLRGPRVPHLAQRPGRRPRRKMMTCCLPYECGVWHPAAQVPTALTPLGWDLPPSSGVKAALGVACYPLFLLFEDGAAPAVAGGVEAVG

SEQ ID NO: 842065 - protein, 392 aa, Homo sapiens
MDFLLGNPFSSPVGQRIEKATDGSLQSEDWALNMEICDIINETEEGPKDALRAVKKRIVGNKNFHEVMLALTVLETCVKNCGHRFHVLVASQDFVESVLVRTILPKNNPPTIVHDKVLNLIQSWADAFRSSPDLTGVVTIYEDLRRKGLEFPMTDLDMLSPIHTPQRTVFNSETQSGQDSVGTDSSQQEDSGQHAAPLPAPPILSGDTPIAPTPEQIGKLRSELEMVSGNVRVMSEMLTELVPTQAEPADLELLQELNRTCRAMQQRVLELIPQIANEQLTEELLIVNDNLNNVFLRHERFERFRTGQTTKAPWLWLATEGRVWRCGGPLRSCGGPGTKLQLCAQWARSHQPQAAGEASGDAGAPLPLRCLALHPSSVPSGRAPQHWGSPLG

SEQ ID NO: 842066 - protein, 189 aa, Homo sapiens
MDFLLGNPFSSPVGQRIEKATDGSLQSEDWALNMEICDIINETEEGPKDALRAVKKRIVGNKNFHEVMLALTVLETCVKNCGHRFHVLVASQDFVESVLVRTILPKNNPPTIVHDKVLNLIQVSARTGQGTARKSCQCRSFLPSGESRPSCLSQAPLLISGRLGCRLVGCSVGREACQLRALLWSGQGR

SEQ ID NO: 842067 - protein, 492 aa, Homo sapiens; identical to SEQ ID NO: 842060

SEQ ID NO: 842068 - protein, 559 aa, Homo sapiens
MDFLLGNPFSSPVGQRIEKATDGSLQSEDWALNMEICDIINETEEGPKDALRAVKKRIVGNKNFHEVMLALTVLETCVKNCGHRFHVLVASQDFVESVLVRTILPKNNPPTIVHDKVLNLIQSWADAFRSSPDLTGVVTIYEDLRRKGLEFPMTDLDMLSPIHTPQRTVFNSETQSGQDSVGTDSSQQEDSGQHAAPLPAPPILSGDTPIAPTPEQIGKLRSELEMVSGNVRVMSEMLTELVPTQAEPADLELLQELNRTCRAMQQRVLELIPQIANEQLTEELLIVNDNLNNVFLRHERDRGLTVLPRLVSNSWPQAVLPPWPPESIGITGMSHHTHLPTLYHSVQESHPQERLGLAELHCAYQLGFERFRTGQTTKAPSEAEPAADLIDMGPDPAATGNLSSQLAGMNLGSSSVRAGLQSLEASGRLEDEFDMFALTRGSSLADQRKEVKYEAPQATDGLAGALDARQQSTGAIPVTQACLMEDIEQWLSTDVGNDAEEPKGVTSEEFDKFLEERAKAADRLPNLSSPSAEGPPGPPSGPAPRKKTQEKDDDMLFAL

SEQ ID NO: 842069 - protein, 414 aa, Homo sapiens
EVPKGVTSEEFDKVPGTNGPKPRTELPNLSSPQLRGPRVPHLAQSWADAFRSSPDLTGVVTIYEDLRRKGLEFPMTDLDMLSPIHTPQRTVFNSETQSGQDSVGTDSSQQEDSGQHAAPLPAPPILSGDTPIAPTPEQIGKLRSELEMVSGNVRVMSEMLTELVPTQAEPADLELLQELNRTCRAMQQRVLELIPQIANEQLTEELLIVNDNLNNVFLRHERFERFRTGQTTKAPSEAEPAADLIDMGPDPAATGNLSSQLAGMNLGSSSVRAGLQSLEASGRLEDEFDMFALTRGSSLADQRKEVKYEAPQATDGLAGALDARQQSTGAIPVTQACLMEDIEQWLSTDVGNDAEEPKGVTSEEFDKFLEERAKAADRLPNLSSPSAEGPPGPPSGPAPRKKTQEKDDDMLFAL

SEQ ID NO: 842070 - protein, 472 aa, Homo sapiens
MDFLLGNPFSSPVGQRIEKATDGSLQSEDWALNMEICDIINETEEGPKDALRAVKKRIVGNKNFHEVMLALTVLETCVKNCGHRFHVLVASQDFVESVLVRTILPKNNPPTIVHDKVLNLIQSWADAFRSSPDLTGVVTIYEDLRRKGLEFPMTDLDMLSPIHTPQRTVFNSETQSGQDSVGTDSSQQEDSGQHAAPLPAPPILSGDTPIAPTPEQIGKLRSELEMVSGNVRVMSEMLTELVPTQAEPADLELLQELNRTCRAMQQRVLELIPQIANEQLTEELLIVNDNLNNVFLRHERFERFRTGQTTKAPSEAEPAADLIDMGPDPAATGNLSSQLAGMNLGSSSVRAGLQSLEASGRLEDEFDMFALTRGSSLADQRKEVKYEAPQATDGLAGALDARQQSTGRSQSPRPASWRTSSSGCPLTWVMMRKSLRGSPAKNLTNSWKNGRPRYEAATLRAVGEISSAPGCR

SEQ ID NO: 842071 - protein, 383 aa, Homo sapiens
MDFLLGNPFSSPVGQRIEKATDGSLQSEDWALNMEICDIINETEEGPKDALRAVKKRIVGNKNFHEVMLALTVLETCVKNCGHRFHVLVASQDFVESVLVRTILPKNNPPTIVHDKVLNLIQSWADAFRSSPDLTGVVTIYEDLRRKGLEFPMTDLDMLSPIHTPQRTVFNSETQSGQDSVGTDSSQQEDSGQHAAPLPAPPILSGDTPIAPTPEQIGKLRSELEMVSGNVRVMSEMLTELVPTQAEPADLELLQELNRTCRAMQQRVLELIPQIANEQLTEELLIVNDNLNNVFLRHERFERFRTGQTTKAPSEAEPAADLIDMGPDPAATGNLSSQLAGMNLGSSSVRAGLQSLEASGRLEDEFDMFALTRGSSLADQRKE

SEQ ID NO: 842072 - protein, 325 aa, Homo sapiens
MDFLLGNPFSSPVGQRIEKATDGSLQSEDWALNMEICDIINETEEGPKDALRAVKSWADAFRSSPDLTGVVTIYEDLRRKGLEFPMTDLDMLSPIHTPQRTVFNSETQSGQDSVGTDSSQQEDSGQHAAPLPAPPILSGDTPIAPTPEQIGKLRSELEMVSGNVRVMSEMLTELVPTQAEPADLELLQELNRTCRAMQQRVLELIPQIANEQLTEELLIVNDNLNNVFLRHERFERFRTGQTTKAPWLWLATEGRVWRCGGPLRSCGGPGTKLQLCAQWARSHQPQAAGEASGDAGAPLPLRCLALHPSSVPSGRAPQHWGSPLG

SEQ ID NO: 842073 - protein, 73 aa, Homo sapiens
MQNGKRPFGKVLPNPPAWEQTLTSLQNHWQGEPGPKDLWVTLKLSKPRPPRGQGGRLTELGAARHFGALANEC

SEQ ID NO: 842074 - protein, 180 aa, Homo sapiens
TLHRAYTGFAAVEIRSRAKIEKIRASLFNNNDLIGLSSLDGEDELMEMSTEEILTVSVVNQSLFDTQGSPGLEDYFNDKSIKGEKLVPGAREVLTEIFKSCAHSEQTLSLTPAKPIRVSDIYLSKEQINSQTPGNLLHLFFTNVRPPKKVLEDQLTQILRKYGVPKPKFEPAVRREVPSS

SEQ ID NO: 842075 - protein, 934 aa, Homo sapiens
MRIPPKWNCSATDLFYQGNSQTVREWLNVAITRTLHQGEESLLELTKQICSFLQTAPEQFPSEEFPISESKVNMDVNFPGAAFVVVSCKESQSGFRKDSSLYKAPWARVLVYGLGHKVKRNGQLNLIEAACYPRDASPANTGLAPPPTADQYPSVVLSTDRVHIKLGVSPPPGAVLVLHSLPLEFPLAMAFAEQLLSWKSEDSEGKSEDEPDTIPTSVLLQVVELLGNFLWTTDMAACVKELVFHLLAELLRTVHTLEQRRHPAGLSSSIALQLNPCLAMLMALQSELHKLYDEETQNWVSGGACGGSGGAAAGDQGRFSTYFHALMEGCLAVAEVTLPTNMSVTASGVTSATAPNLSDSSSSSSSSPGQTPQSPSLLSKRKKVKMKREKASSSGKRQSSRTVDSDPTVLSIGGSKPEDMLWFHRALTLLIILRHLTRKDPQGLGVTSDAIADACQALVGPTAHSRLLVISGIPTHLDEGVVRGAIRKACNAHGGVFKDEIYIPLQEEDTKKPKDKAEGGDGKVEPEKTLAFPGTDSMEVSTSSSLTPAMSISASASTSQASICSSQGISQTVSDLSVDPLPAGLELPIPPGLLEPHAVSSQESLDISLCSTGSLGSLGSLGEPLDNAETASVSDMGSMYTVTSLDNQPLAARPIKGFAVVEIRSRAKIEKIRASLFNNNDLIGLSSLDGEDELMEMSTEEILTVSVVNQSLFDTQGSPGLEDYFNDKSIKGEKLVPGAREVLTEIFKSCAHSEQTLSLTPAKPIRVSDIYLSKEQINSQTPGNLLHLFFTNVRPPKKVLEDQLTQILRKYGVPKPKFDKSKYSKAGKEQHPVKVVSTKRPITKPPAKDKAVLNSVSRTALSEKKPTVKPKSPEKSKPDEKDPEKSPTKKQEVPEEKYLTLEGFHKFVIDRARQDIRSVWRAILSCGYDLHFER

SEQ ID NO: 842076 - protein, 829 aa, Homo sapiens
MRIPPKWNCSATDLFYQGNSQTVREWLNVAITRTLHQGEESLLELTKQICSFLQTAPEQFPSEEFPISESKVNMDVNFPGAAFVVVSCKESQSGFRKDSSLYKAPWARVLVYGLGHKVKRNGQLNLIEAACYPRDASPANTGLAPPPTADQYPSVVLSTDRVHIKLGVSPPPGAVLVLHSLPLEFPLAMAFAEQLLSWKSEDSEGKSEDEPDTIPTSVLLQVVELLGNFLWTTDMAACVKELVFHLLAELLRTVHTLEQRRHPAGLSSSIALQLNPCLAMLMALQSELHKLYDEETQNWVSGGACGGSGGAAAGDQGRFSTYFHALMEGCLAVAEVTLPTNMSVTASGVTSATAPNLSDSSSSSSSSPGQTPQSPSLLSKRKKVKMKREKASSSGKRQSSRTVDSDPTVLSIGGSKPEDMLWFHRALTLLIILRHLTRKDPQGLGVTSDAIADACQALVGPTAHSRLLVISGIPTHLDEGVVRGAIRKACNAHGGVFKDEIYIPLQEEDTKKPKDKAEGGDGKVEPEKTLAFPGTDSMEVSTSSSLTPAMSISASASTSQASICSSQGISQTVSDLSVDPLPAGLELPIPPGLLEPHAVSSQESLDISLCSTGSLGSLGSLGEPLDNAETASVSDMGSMYTVTSLDNQPLAARPIKGFAVVEIRSRAKIEKIRASLFNNNDLIGLSSLDGEDELMEMSTEEILTVSVVNQSLFDTQGSPGLEDYFNDKSIKGEKLVPGAREVLTEIFKSCAHSEQTLSLTPAKPIRVSDIYLSKEQINSQTPGNLLHLFFTNVRPPKKVLEDQLTQILRKYGVPKPKFEPAVRREVPSS

SEQ ID NO: 842077 - protein, 112 aa, Homo sapiens
  misc_feature (1)..(1): Xaa can be any naturally occurring amino acid
XTLPGECQAEVEADGLEMFTQEELCKFIKFACNQERIPFTCPCKDGGPDTAHVPPYPMKIAPPDGTAGSPDSRYIRVETCMFMIKLPQYSSLEIMLEKLRCAIHYREDPLSG

SEQ ID NO: 842078 - protein, 873 aa, Homo sapiens
MRIPPKWNCSATDLFYQGNSQTVREWLNVAITRTLHQGEESLLELTKQICSFLQTAPEQFPSEEFPISESKVNMDVNFPGAAFVVVSCKESQSGFRKDSSLYKAPWARVLVYGLGHKVKRNGQLNLIEAACYPRDASPANTGLAPPPTADQYPSVVLSTDRVHIKLGVSPPPGAVLVLHSLPLEFPLAMAFAEQLLSWKSEDSEGKSEDEPDTIPTSVLLQVVELLGNFLWTTDMAACVKELVFHLLAELLRTVHTLEQRRHPAGLSSSIALQLNPCLAMLMALQSELHKLYDEETQNWVSGGACGGSGGAAAGDQGRFSTYFHALMEGCLAVAEVTLPTNMSVTASGVTSATAPNLSDSSSSSSSSPGQTPQSPSLLSKRKKVKMKREKASSSGKRQSSRTVDSDPTVLSIGGSKPEDMLWFHRALTLLIILRHLTRKDPQGLGVTSDAIADACQALVGPTAHSRLLVISGIPTHLDEGVVRGAIRKACNAHGGVFKDEIYIPLQEEDTKKPKDKAEGGDGKVEPEKTLAFPGTDSMEVSTSSSLTPAMSISASASTSQASICSSQGISQTVSDLSVDPLPAGLELPIPPGLLEPHAVSSQESLDISLCSTGSLGSLGSLGEPLDNAETASVSDMGSMYTVTSLDNQPLAARPIKGFAVVEIRSRAKIEKIRASLFNNNDLIGLSSLDGEDELMEMSTEEILTVSVVNQSLFDTQGSPGLEDYFNDKSIKGEKLVPGAREVLTEIFKSCAHSEQTLSLTPAKPIRVSDIYLSKEQINSQTPGNLLHLFFTNVRPPKKVLEDQLTQILRKYGVPKPKFDKSKYSKAGKEQHPVKVVSTKRPITKPPAKDKAVLNSVRTALSEKKHLQNQIRAE

SEQ ID NO: 842079 - protein, 181 aa, Homo sapiens
MRIPPKWNCSATDLFYQGNSQTVREWLNVAITRTLHQGEESLLELTKQICSFLQTAPEQFPSEEFPISESKVNMDVNFPGAAFVVVSCKESQSGFRKDSSLYKAPWARVLVYGLGHKVKRNGQLNLIEAACYPRDASPANTGLAPPPTADQYPSVVLSTDRVHIKLGVSPPPGSSTIGGIL

SEQ ID NO: 842080 - protein, 151 aa, Homo sapiens
MDATALERDAVQFARLAVQRDHEGRYSEAVFYYKEAAQALIYAEMAGSSLENIQEKITEYLERVQALHSAVQSKSADPLKSKHQLDLERAHFLVTQAFDEDEKENVEDAIELYTEAVDLCLKTSYETADKVLQNKLKQLARQALDRARSAG

SEQ ID NO: 842081 - protein, 390 aa, Homo sapiens
RSPASLASAAPASKELVRARLRLRRAAGGRGEGRWGREVGRPGGLQAGSGLRGAASRWTPARQREGELSSTVQSKLCRSFRGAPESSPPPGRRSPRRAVLRQGLLPCPGAGPLRHGRHSTGAGRCAVRPSGGSARPRRPLLRGGVLLQVQSKSADPLKSKHQLDLERAHFLVTQAFDEDEKENVEDAIELYTEAVDLCLKTSYETADKVLQNKLKQLARQALDRAEALSEPLTKPVGKISSTSVKPKPPPVRAHFPLGANPFLERPQSFISPQSCDAQGQRYTAEEIEVLRTTSKINGIEYVPFMNVDLRERFAYPMPFCDRWGKLPLSPKQKTTFSKWVRPEDLTNNPTMIYTVSSFSIKQTIVSDCSFVASLAISAAYERRFNKKLIT

SEQ ID NO: 842082 - protein, 467 aa, Homo sapiens
RSPASLASAAPASKELVRARLRLRRAAGGRGEGRWGREVGRPGGLQAGSGLRGAASRWTPARQREGELSSTVQSKLCRSFRGAPESSPPPGRRSPRRAVLRQGLLPCPGAGPLRHGRHSTGAGRCAVRPSGGSARPRRPLLRGGVLLQGSVKQLLLKQLDSKSDVQEMASLETGMMTHEVYTLGLLQEKEAAQALIYAEMAGSSLENIQEKITEYLERVQALHSAVQSKSADPLKSKHQLDLERAHFLVTQAFDEDEKENVEDAIELYTEAVDLCLKTSYETADKVLQNKLKQLARQALDRAEALSEPLTKPVGKISSTSVKPKPPPVRAHFPLGANPFLERPQSFISPQSCDAQGQRYTAEEIEVLRTTSKINGIEYVPFMNVDLRERFAYPMPFCDRWGKLPLSPKQKTTFSKWVRPEDLTNNPTMIYTVSSFSIKQTIVSDCSFVASLAISAAYERRFNKKLIT

SEQ ID NO: 842083 - protein, 312 aa, Homo sapiens
MDATALERDAVQFARLAVQRDHEGRYSEAVFYYKEAAQALIYAEMAGSSLENIQEKITEYLERVQALHSAVQSKSADPLKSKHQLDLERAHFLVTQAFDEDEKENVEDAIELYTEAVDLCLKTSYETADKVLQNKLKQLARQALDRAEALSEPLTKPVGKISSTSVKPKPPPVRAHFPLGANPFLERPQSFISPQSCDAQGQRYTAEEIEVLRTTSKINGIEYVPFMNVDLRERFAYPMPFCDRWGKLPLSPKQKTTFSKWVRPEDLTNNPTMIYTVSSFSIKQTIVSDCSFVASLAISAAYERRFNKKLIT

SEQ ID NO: 842084 - protein, 39 aa, Homo sapiens
GGYLRPSQRGLLLELTFGNGWGIPAEDKCWRKHKAWGAS

SEQ ID NO: 842085 - protein, 169 aa, Homo sapiens
PGVDPSPPCRSLGWKRKKEWSDESEEEPEKELAPEPEETWVVEMLCGLKMKLKQQRVSPILPEHHKDFNSQLEDPVIKRFLAWDKDLRVSDKYLLAMVIAYFSRAGLPSWQYQRIHFFLALYLANDMEEDDEDPKQNIFYFLYGKTRSRIPLVRNRRFQLCRCLNPRAR

SEQ ID NO: 842086 - protein, 93 aa, Homo sapiens
PGVDPSPPCRSLGWKRKKEWSDESEEEPEKELAPEPEETWVVEMLCGLKMKLKQQRVSPILPEHHKDFNSQLGRRTPQRAPPILFFLKRGNFQ

SEQ ID NO: 842087 - protein, 281 aa, Homo sapiens
MEWLLEDLLGAKGDMGLLWGQLTHALACRHCGSSCFQSPGNLVTLFLFVVWQIQRWWQLGRLRQLHPWCSGNMVQGKELPLLHRVAFLDHLCKQKSEVEEEGEEEEEGEDEASLDPLKPCSPTKEAPTGEQATPAPPQPSCGSEGLLKAIGIPEQTVMQPVSPSRSFPIFQILTSFPVRHKIASGNRQQQRKSQLFWGLPSLHSESLEAIFLSSGGPSPLKLSVCSSVFFNKLAFLPRSNLLLPQYHSSAQFSTHGAHTMEDLEGMAPILSCFHLHLLLLL

SEQ ID NO: 842088 - protein, 252 aa, Homo sapiens
MEWLLEDLLGAKGDMGLLWGQLTHALACRHCGSSCFQSPGNLELPLLHRVAFLDHLCKQKSEVEEEGEEEEEGEDEASLDPLKPCSPTKEAPTGEQATPAPPQPSCGSEGLLKAIGIPEQTVMQPVSPSRSFPIFQILTSFPVRHKIASGNRQQQRKSQLFWGLPSLHSESLEAIFLSSGGPSPLKLSVCSSVFFNKLAFLPRSNLLLPQYHSSAQFSTHGAHTMEDLEGMAPILSCFHLHLLLLSHHYSSI

SEQ ID NO: 842089 - protein, 287 aa, Homo sapiens
MEWLLEDLLGAKGDMGLLWGQLTHALACRHCGSSCFQSPGNLVTLFLFVVWQIQRWWQLGRLRQLHPWCSGNMVQGKELPLLHRVAFLDHLCKQKSEVEEEGEEEEEGEDEASLDPLKPCSPTKEAPTGEQATPAPPQPSCGSEGLLKAIGIPEQTVMQPVSPSRSFPIFQILTSFPVRHKIASGNRQQQRKSQLFWGLPSLHSESLEAIFLSSGGPSPLKLSVCSSVFFNKLAFLPRSNLLLPQYHSSAQFSTHGAHTMEDLEGMAPILSCFHLHLLLLSHHYSSI

SEQ ID NO: 842090 - protein, 58 aa, Homo sapiens
MPVEYNLPVEYNLPVEYNLPVEYNLPVEYNLPVEYNLPVGYNLPVEYNLPVEYNLPVE

SEQ ID NO: 842091 - protein, 202 aa, Homo sapiens
LGTLCPFVWCFPLSLEPDSIIEKASHSGMINPSRQWQTLKQNTGVAHFEYQIRVTCDDYYYGFGCNKFCRPRDDFFGHYACDQNGNKTCMEGWMGPECNRGMCVCVHVHVCLLLLVSIYHPTSRQVACGYLRWGGILAVILGLQYEDAECRRCCWCPIQIPFTGIPIPQVLCWLPTAHSCSLLRRLVLGQNSACPIPPAHSQ

SEQ ID NO: 842092 - protein, 994 aa, Homo sapiens
MRSPRTRGRSGRPLSLLLALLCALRAKVCGASGQFELEILSMQNVNGELQNGNCCGGARNPGDRKCTRDECDTYFKVCLKEYQSRVTAGGPCSFGSGSTPVIGGNTFNLKASRGNDRNRIVLPFSFAWPRSYTLLVEAWDSSNDTVQPDSIIEKASHSGMINPSRQWQTLKQNTGVAHFEYQIRVTCDDYYYGFGCNKFCRPRDDFFGHYACDQNGNKTCMEGWMGPECNRAICRQGCSPKHGSCKLPGDCRCQYGWQGLYCDKCIPHPGCVHGICNEPWQCLCETNWGGQLCDKDLNYCGTHQPCLNGGTCSNTGPDKYQCSCPEGYSGPNCEIGKWSKMNESPLSNFSVTQLLKNILKDLFKEKKVKIASKDRPYPNHSISLCNFQVSKVFWVMLIRIGGSGRRNDPSSEMSWNVVQRQLSEKDDFLSFLDTAGFYHTLAFGFGNMLALVAVVWDSVGGGCGEVTVCRHPSLTAILVFAAEHACLSDPCHNRGSCKETSLGFECECSPGWTGPTCSTNIDDCSPNNCSHGGTCQDLVNGFKCVCPPQWTGKTCQLDANECEAKTFYNSGTCVDGDNWYRCECAPGFAGPDCRININECQSSPCAFGATCVDEINGYRCVCPPGHSGAKCQEVSGRPCITMGSVIPDGAKWDDDCNTCQCLNGRIACSKVWCGPRPCLLHKGHSECPSGQSCIPILDDQCFVHPCTGVGECRSSSLQPVKTKCTSDSYYQDNCANITFTFNKEMMSPGLTTEHICSELRNLNILKNVSAEYSIYIACEPSPSANNEIHVAISAEDIRDDGNPIKEITDKIIDLVSKRDGNSSLIAAVAEVRVQRRPLKNRTDFLVPLLSSVLTVAWICCLVTAFYWCLRKRRKPGSHTHSASEDNTTNNVREQLNQIKNPIEKHGANTVPIKDYENKNSKMSKIRTHNSEVEEDDMDKHQQKARFAKQPAYTLVDREEKPPNGTPTKHPNWTNKQDNRDLESAQSLNRMEYIV

SEQ ID NO: 842093 - protein, 1234 aa, Homo sapiens
YRRPTLFVWIPSNDTVQPDSIIEKASHSGMINPSRQWQTLKQNTGVAHFEYQIRVTCDDYYYGFGCNKFCRPRDDFFGHYACDQNGNKTCMEGWMGPECNRAICRQGCSPKHGSCKLPGDCRCQYGWQGLYCDKCIPHPGCVHGICNEPWQCLCETNWGGQLCDKDLNYCGTHQPCLNGGTCSNTGPDKYQCSCPEGYSGPNCEIGKWSKMNESPLSNFSVTQLLKNILKDLFKEKKVKIASKDRPYPNHSISLCNFQVSKVFWVMLIRIGGSGRRNDPSSEMSWNVVQRQLSEKDDFLSFLDTAGFYHTLAFGFGNMLALVAVVWDSVGGGCGEVTVCRHPSLTAILVFAAEHACLSDPCHNRGSCKETSLGFECECSPGWTGPTCSTNIDDCSPNNCSHGGTCQDLVNGFKCVCPPQWTGKTCQLDANECEAKPCVNAKSCKNLIASYYCDCLPGWMGQNCDININDCLGQCQNDASCRDLVNGYRCICPPGYAGDHCERDIDECASNPCLNGGHCQNEINRFQCLCPTGFSGNLCQLDIDYCEPNPCQNGAQCYNRASDYFCKCPEDYEGKNCSHLKDHCRTTPCEVIDSCTVAMASNDTPEGVRYISSNVCGPHGKCKSQSGGKFTCDCNKGFTGTYCHENINDCESNPCRNGGTCIDGVNSYKCICSDGWEGAYCETNINDCSQNPCHNGGTCRDLVNDFYCDCKNGWKGKTCHSRDSQCDEATCNNGGTCYDEGDAFKCMCPGGWEGTTCNIARNSSCLPNPCHNGGTCVVNGESFTCVCKEGWEGPICAQNTNDCSPHPCYNSGTCVDGDNWYRCECAPGFAGPDCRININECQSSPCAFGATCVDEINGYRCVCPPGHSGAKCQEVSGRPCITMGSVIPDGAKWDDDCNTCQCLNGRIACSKVWCGPRPCLLHKGHSECPSGQSCIPILDDQCFVHPCTGVGECRSSSLQPVKTKCTSDSYYQDNCANITFTFNKEMMSPGLTTEHICSELRNLNILKNVSAEYSIYIACEPSPSANNEIHVAISAEDIRDDGNPIKEITDKIIDLVSKRDGNSSLIAAVAEVRVQRRPLKNRTDFLVPLLSSVLTVAWICCLVTAFYWCLRKRRKPGSHTHSASEDNTTNNVREQLNQIKNPIEKHGANTVPIKDYENKNSKMSKIRTHNSEVEEDDMDKHQQKARFAKQPAYTLVDREEKPPNGTPTKHPNWTNKQDNRDLESAQSLNRMEYIV

SEQ ID NO: 842094 - protein, 917 aa, Homo sapiens
MLALVAVVWDSVGGGCGEVTVCRHPSLTAILVFAAEHACLSDPCHNRGSCKETSLGFECECSPGWTGPTCSTNIDDCSPNNCSHGGTCQDLVNGFKCVCPPQWTGKTCQLDANECEAKPCVNAKSCKNLIASYYCDCLPGWMGQNCDININDCLGQCQNDASCRDLVNGYRCICPPGYAGDHCERDIDECASNPCLNGGHCQNEINRFQCLCPTGFSGNLCQLDIDYCEPNPCQNGAQCYNRASDYFCKCPEDYEGKNCSHLKDHCRTTPCEVIDSCTVAMASNDTPEGVRYISSNVCGPHGKCKSQSGGKFTCDCNKGFTGTYCHENINDCESNPCRNGGTCIDGVNSYKCICSDGWEGAYCETNINDCSQNPCHNGGTCRDLVNDFYCDCKNGWKGKTCHSRDSQCDEATCNNGGTCYDEGDAFKCMCPGGWEGTTCNIARNSSCLPNPCHNGGTCVVNGESFTCVCKEGWEGPICAQNTNDCSPHPCYNSGTCVDGDNWYRCECAPGFAGPDCRININECQSSPCAFGATCVDEINGYRCVCPPGHSGAKCQEVSGRPCITMGSVIPDGAKWDDDCNTCQCLNGRIACSKVWCGPRPCLLHKGHSECPSGQSCIPILDDQCFVHPCTGVGECRSSSLQPVKTKCTSDSYYQDNCANITFTFNKEMMSPGLTTEHICSELRNLNILKNVSAEYSIYIACEPSPSANNEIHVAISAEDIRDDGNPIKEITDKIIDLVSKRDGNSSLIAAVAEVRVQRRPLKNRTDFLVPLLSSVLTVAWICCLVTAFYWCLRKRRKPGSHTHSASEDNTTNNVREQLNQIKNPIEKHGANTVPIKDYENKNSKMSKIRTHNSEVEEDDMDKHQQKARFAKQPAYTLVDREEKPPNGTPTKHPNWTNKQDNRDLESAQSLNRMEYIV

SEQ ID NO: 842095 - protein, 591 aa, Homo sapiens
MDINDCESNPCRNGGTCIDGVNSYKCICSDGWEGAYCETNINDCSQNPCHNGGTCRDLVNDFYCDCKNGWKGKTCHSRDSQCDEATCNNGGTCYDEGDAFKCMCPGGWEGTTCNIARNSSCLPNPCHNGGTCVVNGESFTCVCKEGWEGPICAQNTNDCSPHPCYNSGTCVDGDNWYRCECAPGFAGPDCRININECQSSPCAFGATCVDEINGYRCVCPPGHSGAKCQEVSGRPCITMGSVIPDGAKWDDDCNTCQCLNGRIACSKVWCGPRPCLLHKGHSECPSGQSCIPILDDQCFVHPCTGVGECRSSSLQPVKTKCTSDSYYQDNCANITFTFNKEMMSPGLTTEHICSELRNLNILKNVSAEYSIYIACEPSPSANNEIHVAISAEDIRDDGNPIKEITDKIIDLVSKRDGNSSLIAAVAEVRVQRRPLKNRTDFLVPLLSSVLTVAWICCLVTAFYWCLRKRRKPGSHTHSASEDNTTNNVREQLNQIKNPIEKHGANTVPIKDYENKNSKMSKIRTHNSEVEEDDMDKHQQKARFAKQPAYTLVDREEKPPNGTPTKHPNWTNKQDNRDLESAQSLNRMEYIV

SEQ ID NO: 842096 - protein, 443 aa, Homo sapiens
AGDSPGSLHIQRFHPCYNSGTCVDGDNWYRCECAPGFAGPDCRININECQSSPCAFGATCVDEINGYRCVCPPGHSGAKCQEVSGRPCITMGSVIPDGAKWDDDCNTCQCLNGRIACSKVWCGPRPCLLHKGHSECPSGQSCIPILDDQCFVHPCTGVGECRSSSLQPVKTKCTSDSYYQDNCANITFTFNKEMMSPGLTTEHICSELRNLNILKNVSAEYSIYIACEPSPSANNEIHVAISAEDIRDDGNPIKEITDKIIDLVSKRDGNSSLIAAVAEVRVQRRPLKNRTDFLVPLLSSVLTVAWICCLVTAFYWCLRKRRKPGSHTHSASEDNTTNNVREQLNQIKNPIEKHGANTVPIKDYENKNSKMSKIRTHNSEVEEDDMDKHQQKARFAKQPAYTLVDREEKPPNGTPTKHPNWTNKQDNRDLESAQSLNRMEYIV

SEQ ID NO: 842097 - protein, 170 aa, Homo sapiens
MLFSFFLGELIGFVPAFTDFLVPLLSSVLTVAWICCLVTAFYWCLRKRRKPGSHTHSASEDNTTNNVREQLNQIKNPIEKHGANTVPIKDYENKNSKMSKIRTHNSEVEEDDMDKHQQKARFAKQPAYTLVDREEKPPNGTPTKHPNWTNKQDNRDLESAQSLNRMEYIV

SEQ ID NO: 842098 - protein, 1364 aa, Homo sapiens
MRSPRTRGRSGRPLSLLLALLCALRAKVCGASGQFELEILSMQNVNGELQNGNCCGGARNPGDRKCTRDECDTYFKVCLKEYQSRVTAGGPCSFGSGSTPVIGGNTFNLKASRGNDRNRIVLPFSFAWPRSYTLLVEAWDSSNDTVQPDSIIEKASHSGMINPSRQWQTLKQNTGVAHFEYQIRVTCDDYYYGFGCNKFCRPRDDFFGHYACDQNGNKTCMEGWMGPECNRAICRQGCSPKHGSCKLPGDCRCQYGWQGLYCDKCIPHPGCVHGICNEPWQCLCETNWGGQLCDKDLNYCGTHQPCLNGGTCSNTGPDKYQCSCPEGYSGPNCEIGKWSKMNESPLSNFSVTQLLKNILKDLFKEKKVKIASKDRPYPNHSISLCNFQVSKVFWVMLIRIGGSGRRNDPSSEMSWNVVQRQLSEKDDFLSFLDTAGFYHTLAFGFGNMLALVAVVWDSVGGGCGEVTVCRHPSLTAILVFAAEHACLSDPCHNRGSCKETSLGFECECSPGWTGPTCSTNIDDCSPNNCSHGGTCQDLVNGFKCVCPPQWTGKTCQLDANECEAKPCVNAKSCKNLIASYYCDCLPGWMGQNCDININDCLGQCQNDASCRDLVNGYRCICPPGYAGDHCERDIDECASNPCLNGGHCQNEINRFQCLCPTGFSGNLCQLDIDYCEPNPCQNGAQCYNRASDYFCKCPEDYEGKNCSHLKDHCRTTPCEVIDSCTVAMASNDTPEGVRYISSNVCGPHGKCKSQSGGKFTCDCNKGFTGTYCHENINDCESNPCRNGGTCIDGVNSYKCICSDGWEGAYCETNINDCSQNPCHNGGTCRDLVNDFYCDCKNGWKGKTCHSRDSQCDEATCNNGGTCYDEGDAFKCMCPGGWEGTTCNIARNSSCLPNPCHNGGTCVVNGESFTCVCKEGWEGPICAQNTNDCSPHPCYNSGTCVDGDNWYRCECAPGFAGPDCRININECQSSPCAFGATCVDEINGYRCVCPPGHSGAKCQEVSGRPCITMGSVIPDGAKWDDDCNTCQCLNGRIACSKVWCGPRPCLLHKGHSECPSGQSCIPILDDQCFVHPCTGVGECRSSSLQPVKTKCTSDSYYQDNCANITFTFNKEMMSPGLTTEHICSELRNLNILKNVSAEYSIYIACEPSPSANNEIHVAISAEDIRDDGNPIKEITDKIIDLVSKRDGNSSLIAAVAEVRVQRRPLKNRTDFLVPLLSSVLTVAWICCLVTAFYWCLRKRRKPGSHTHSASEDNTTNNVREQLNQIKNPIEKHGANTVPIKDYENKNSKMSKIRTHNSEVEEDDMDKHQQKARFAKQPAYTLVDREEKPPNGTPTKHPNWTNKQDNRDLESAQSLNRMEYIV

SEQ ID NO: 842099 - protein, 1364 aa, Homo sapiens; identical to SEQ ID NO: 842098

SEQ ID NO: 842100 - protein, 868 aa, Homo sapiens
MRSPRTRGRSGRPLSLLLALLCALRAKVCGASGQFELEILSMQNVNGELQNGNCCGGARNPGDRKCTRDECDTYFKVCLKEYQSRVTAGGPCSFGSGSTPVIGGNTFNLKASRGNDRNRIVLPFSFAWPRSYTLLVEAWDSSNDTVQPDSIIEKASHSGMINPSRQWQTLKQNTGVAHFEYQIRVTCDDYYYGFGCNKFCRPRDDFFGHYACDQNGNKTCMEGWMGPECNRAICRQGCSPKHGSCKLPGDCRCQYGWQGLYCDKCIPHPGCVHGICNEPWQCLCETNWGGQLCDKDLNYCGTHQPCLNGGTCSNTGPDKYQCSCPEGYSGPNCEIGKWSKMNESPLSNFSVTQLLKNILKDLFKEKKVKIASKDRPYPNHSISLCNFQVSKVFWVMLIRIGGSGRRNDPSSEMSWNVVQRQLSEKDDFLSFLDTAGFYHTLAFGFGNMLALVAVVWDSVGGGCGEVTVCRHPSLTAILVFAAEHACLSDPCHNRGSCKETSLGFECECSPGWTGPTCSTNIDDCSPNNCSHGGTCQDLVNGFKCVCPPQWTGKTCQLDANECEAKPCVNAKSCKNLIASYYCDCLPGWMGQNCDININDCLGQCQNDASCRDLVNGYRCICPPGYAGDHCERDIDECASNPCLNGGHCQNEINRFQCLCPTGFSGNLCQLDIDYCEPNPCQNGAQCYNRASDYFCKCPEDYEGKNCSHLKDHCRTTPCEVIDSCTVAMASNDTPEGVRYISSNVCGPHGKCKSQSGGKFTCDCNKGFTGTYCHENINDCESNPCRNGGTCIDGVNSYKCICSDGWEGAYCETSESATLWGALGCMGHVGGIPLQRGKTFFVLEISGSKTAVISALGQYHLCLICIYES

SEQ ID NO: 842101 - protein, 988 aa, Homo sapiens
MRSPRTRGRSGRPLSLLLALLCALRAKVCGASGQFELEILSMQNVNGELQNGNCCGGARNPGDRKCTRDECDTYFKVCLKEYQSRVTAGGPCSFGSGSTPVIGGNTFNLKASRGNDRNRIVLPFSFAWPRSYTLLVEAWDSSNDTVQPDSIIEKASHSGMINPSRQWQTLKQNTGVAHFEYQIRVTCDDYYYGFGCNKFCRPRDDFFGHYACDQNGNKTCMEGWMGPECNRAICRQGCSPKHGSCKLPGDCRCQYGWQGLYCDKCIPHPGCVHGICNEPWQCLCETNWGGQLCDKDLNYCGTHQPCLNGGTCSNTGPDKYQCSCPEGYSGPNCEIGKWSKMNESPLSNFSVTQLLKNILKDLFKEKKVKIASKDRPYPNHSISLCNFQVSKVFWVMLIRIGGSGRRNDPSSEMSWNVVQRQLSEKDDFLSFLDTAGFYHTLAFGFGNMLALVAVVWDSVGGGCGEVTVCRHPSLTAILVFAAEHACLSDPCHNRGSCKETSLGFECECSPGWTGPTCSTNIDDCSPNNCSHGGTCQDLVNGFKCVCPPQWTGKTCQLDANECEAKPCVNAKSCKNLIASYYCDCLPGWMGQNCDININDCLGQCQNDASCRDLVNGYRCICPPGYAGDHCERDIDECASNPCLNGGHCQNEINRFQCLCPTGFSGNLCQLDIDYCEPNPCQNGAQCYNRASDYFCKCPEDYEGKNCSHLKDHCRTTPCEVIDSCTVAMASNDTPEGVRYISSNVCGPHGKCKSQSGGKFTCDCNKGFTGTYCHENINDCESNPCRNGGTCIDGVNSYKCICSDGWEGAYCETNINDCSQNPCHNGGTCRDLVNDFYCDCKNGWKGKTCHSRDSQCDEATCNNGGTCYDEGDAFKCMCPGGWEGTTCNIARNSSCLPNPCHNGGTCVVNGESFTCVCKEGWEGPICAQSECPPPLNSPRAVGADPDTLGDLQWKPEAELFDVCFCITWVCINDLMGYSPDLGMRKSPIR

SEQ ID NO: 842102 - protein, 414 aa, Homo sapiens
MRSPRTRGRSGRPLSLLLALLCALRAKVCGASGQFELEILSMQNVNGELQNGNCCGGARNPGDRKCTRDECDTYFKVCLKEYQSRVTAGGPCSFGSGSTPVIGGNTFNLKASRGNDRNRIVLPFSFAWPRSYTLLVEAWDSSNDTVQPDSIIEKASHSGMINPSRQWQTLKQNTGVAHFEYQIRVTCDDYYYGFGCNKFCRPRDDFFGHYACDQNGNKTCMEGWMGPECNRAICRQGCSPKHGSCKLPGDCRCQYGWQGLYCDKCIPHPGCVHGICNEPWQCLCETNWGGQLCDKDLNYCGTHQPCLNGGTCSNTGPDKYQCSCPEGYSGPNCEIAEHACLSDPCHNRGSCKETSLGFECECSPGWTGPTCSTSKSNFQPVSILRILVPRYHAGERYLGLSSVNVSVREGRVQA

SEQ ID NO: 842103 - protein, 1218 aa, Homo sapiens
MRSPRTRGRSGRPLSLLLALLCALRAKVCGASGQFELEILSMQNVNGELQNGNCCGGARNPGDRKCTRDECDTYFKVCLKEYQSRVTAGGPCSFGSGSTPVIGGNTFNLKASRGNDRNRIVLPFSFAWPRSYTLLVEAWDSSNDTVQPDSIIEKASHSGMINPSRQWQTLKQNTGVAHFEYQIRVTCDDYYYGFGCNKFCRPRDDFFGHYACDQNGNKTCMEGWMGPECNRAICRQGCSPKHGSCKLPGDCRCQYGWQGLYCDKCIPHPGCVHGICNEPWQCLCETNWGGQLCDKDLNYCGTHQPCLNGGTCSNTGPDKYQCSCPEGYSGPNCEIAEHACLSDPCHNRGSCKETSLGFECECSPGWTGPTCSTNIDDCSPNNCSHGGTCQDLVNGFKCVCPPQWTGKTCQLDANECEAKPCVNAKSCKNLIASYYCDCLPGWMGQNCDININDCLGQCQNDASCRDLVNGYRCICPPGYAGDHCERDIDECASNPCLNGGHCQNEINRFQCLCPTGFSGNLCQLDIDYCEPNPCQNGAQCYNRASDYFCKCPEDYEGKNCSHLKDHCRTTPCEVIDSCTVAMASNDTPEGVRYISSNVCGPHGKCKSQSGGKFTCDCNKGFTGTYCHENINDCESNPCRNGGTCIDGVNSYKCICSDGWEGAYCETNINDCSQNPCHNGGTCRDLVNDFYCDCKNGWKGKTCHSRDSQCDEATCNNGGTCYDEGDAFKCMCPGGWEGTTCNIARNSSCLPNPCHNGGTCVVNGESFTCVCKEGWEGPICAQNTNDCSPHPCYNSGTCVDGDNWYRCECAPGFAGPDCRININECQSSPCAFGATCVDEINGYRCVCPPGHSGAKCQEVSGRPCITMGSVIPDGAKWDDDCNTCQCLNGRIACSKVWCGPRPCLLHKGHSECPSGQSCIPILDDQCFVHPCTGVGECRSSSLQPVKTKCTSDSYYQDNCANITFTFNKEMMSPGLTTEHICSELRNLNILKNVSAEYSIYIACEPSPSANNEIHVAISAEDIRDDGNPIKEITDKIIDLVSKRDGNSSLIAAVAEVRVQRRPLKNRTDFLVPLLSSVLTVAWICCLVTAFYWCLRKRRKPGSHTHSASEDNTTNNVREQLNQIKNPIEKHGANTVPIKDYENKNSKMSKIRTHNSEVEEDDMDKHQQKARFAKQPAYTLVDREEKPPNGTPTKHPNWTNKQDNRDLESAQSLNRMEYIV

SEQ ID NO: 842104 - protein, 1364 aa, Homo sapiens; identical to SEQ ID NO: 842098

SEQ ID NO: 842105 - protein, 1027 aa, Homo sapiens
MRSPRTRGRSGRPLSLLLALLCALRAKVCGASGQFELEILSMQNVNGELQNGNCCGGARNPGDRKCTRDECDTYFKVCLKEYQSRVTAGGPCSFGSGSTPVIGGNTFNLKASRGNDRNRIVLPFSFAWPRSYTLLVEAWDSSNDTVQPDSIIEKASHSGMINPSRQWQTLKQNTGVAHFEYQIRVTCDDYYYGFGCNKFCRPRDDFFGHYACDQNGNKTCMEGWMGPECNRAICRQGCSPKHGSCKLPGDCRCQYGWQGLYCDKCIPHPGCVHGICNEPWQCLCETNWGGQLCDKDLNYCGTHQPCLNGGTCSNTGPDKYQCSCPEGYSGPNCEIGKWSKMNESPLSNFSVTQLLKNILKDLFKEKKVKIASKDRPYPNHSISLCNFQVSKVFWVMLIRIGGSGRRNDPSSEMSWNVVQRQLSEKDDFLSFLDTAGFYHTLAFGFGNMLALVAVVWDSVGGGCGEVTVCRHPSLTAILVFAAEHACLSDPCHNRGSCKETSLGFECECSPGWTGPTCSTNIDDCSPNNCSHGGTCQDLVNGFKCVCPPQWTGKTCQLDANECEAKPCVNAKSCKNLIASYYCDCLPGWMGQNCDININDCLGQCQNDASCRDLVNGYRCICPPGYAGDHCERDIDECASNPCLNGGHCQNEINRFQCLCPTGFSGNLCQLDIDYCEPNPCQNGAQCYNRASDYFCKCPEDYEGKNCSHLKDHCRTTPCEVIDSCTVAMASNDTPEGVRYISSNVCGPHGKCKSQSGGKFTCDCNKGFTGTYCHENINDCESNPCRNGGTCIDGVNSYKCICSDGWEGAYCETNINDCSQNPCHNGGTCRDLVNDFYCDCKNGWKGKTCHSRDSQCDEATCNNGGTCYDEGDAFKCMCPGGWEGTTCNIARNSSCLPNPCHNGGTCVVNGESFTCVCKEGWEGPICAQNTNDCSPHPCYNSGTCVDGDNWYRCECAPGFAGPDCRININECQSSPCAFGATCVDEINGYRCVCPPGHSGAKCQEGSRIRLPGACPAPWSLSSHFCQMS

SEQ ID NO: 842106 - protein, 917 aa, Homo sapiens; identical to SEQ ID NO: 842094

SEQ ID NO: 842107 - protein, 1218 aa, Homo sapiens; identical to SEQ ID NO: 842103

SEQ ID NO: 842108 - protein, 1268 aa, Homo sapiens
MRSPRTRGRSGRPLSLLLALLCALRAKVCGASGQFELEILSMQNVNGELQNGNCCGGARNPGDRKCTRDECDTYFKVCLKEYQSRVTAGGPCSFGSGSTPVIGGNTFNLKASRGNDRNRIVLPFSFAWPRSYTLLVEAWDSSNDTVQPDSIIEKASHSGMINPSRQWQTLKQNTGVAHFEYQIRVTCDDYYYGFGCNKFCRPRDDFFGHYACDQNGNKTCMEGWMGPECNRAICRQGCSPKHGSCKLPGDCRCQYGWQGLYCDKCIPHPGCVHGICNEPWQCLCETNWGGQLCDKDLNYCGTHQPCLNGGTCSNTGPDKYQCSCPEGYSGPNCEIGKWSKMNESPLSNFSVTQLLKNILKDLFKEKKVKIASKDRPYPNHSISLCNFQVSKVFWVMLIRIGGSGRRNDPSSEMSWNVVQRQLSEKDDFLSFLDTAGFYHTLAFGFGNMLALVAVVWDSVGGGCGEVTVCRHPSLTAILVFAAEHACLSDPCHNRGSCKETSLGFECECSPGWTGPTCSTNIDDCSPNNCSHGGTCQDLVNGFKCVCPPQWTGKTCQLDANECEAKPCVNAKSCKNLIASYYCDCLPGWMGQNCDININDCLGQCQNDASCRDLVNGYRCICPPGYAGDHCERDIDECASNPCLNGGHCQNEINRFQCLCPTGFSGNLCQLDIDYCEPNPCQNGAQCYNRASDYFCKCPEDYEGKNCSHLKDHCRTTPCEVIDSCTVAMASNDTPEGVRYISSNVCGPHGKCKSQSGGKFTCDCNKGFTGTYCHENINDCESNPCRNGGTCIDGVNSYKCICSDGWEGAYCETNINDCSQNPCHNGGTCRDLVNDFYCDCKNGWKGKTCHSRDSQCDEATCNNGGTCYDEGDAFKCMCPGGWEGTTCNIARNSSCLPNPCHNGGTCVVNGESFTCVCKEGWEGPICAQNTNDCSPHPCYNSGTCVDGDNWYRCECAPGFAGPDCRININECQSSPCAFGATCVDEINGYRCVCPPGHSGAKCQEVSGRPCITMGSVIPDGAKWDDDCNTCQCLNGRIACSKVWCGPRPCLLHKGHSECPSGQSCIPILDDQCFVHPCTGVGECRSSSLQPVKTKCTSDSYYQDNCANITFTFNKEMMSPGLTTEHICSELRNLNILKSAEDIRDDGNPIKEITDKIIDLVSKRDGNSSLIAAVAEVRVQRRPLKNRTDFLVPLLSSVLTVAWICCLVTAFYWCLRKRRKPGSHTHSASEDNTTNNVREQLNQIKNPIEKHGANTVPIKDYENKLSYDLT

SEQ ID NO: 842109 - protein, 106 aa, Homo sapiens
AGDSPGSLHIQRFHPCYNSGTCVDGDNWYRCECAPGFAGPDCRININECQSSPCAFGATCVDEINGYRCVCPPGHSGAKCQEGSRIRLPGACPAPWSLSSHFCQMS

SEQ ID NO: 842110 - protein, 354 aa, Homo sapiens
MRSPRTRGRSGRPLSLLLALLCALRAKVCGASGQFELEILSMQNVNGELQNGNCCGGARNPGDRKCTRDECDTYFKVCLKEYQSRVTAGGPCSFGSGSTPVIGGNTFNLKASRGNDRNRIVLPFSFAWPRSYTLLVEAWDSSNDTVQPDSIIEKASHSGMINPSRQWQTLKQNTGVAHFEYQIRVTCDDYYYGFGCNKFCRPRDDFFGHYACDQNGNKTCMEGWMGPECNRAICRQGCSPKHGSCKLPGDCRCQYGWQGLYCDKCIPHPGCVHGICNEPWQCLCETNWGGQLCDKDLNYCGTHQPCLNGGTCSNTGPDKYQCSCPEGYSGPNCEIGKWSKMNESPLSNFSVLSF

SEQ ID NO: 842111 - protein, 106 aa, Homo sapiens
GRRGSGDGSTGGSTSANSSGGVPSARGARRSDAFPTDARPVRAPPKPPARPALCPASQGRSPSPGLPPSRPLPPLAAPWAVEPREQARQPSSARLLAPAPERLHLG

SEQ ID NO: 842112 - protein, 109 aa, Homo sapiens
NTAEEEGEDEACASSCSSVHPGRASRAEGFLSNHPPRVESAPRNRPSRQSALPWALNAHSLGLGEATTKTAQSEASGCARTRACRTLAGNLISNEWLMALGKFSPVRQS

SEQ ID NO: 842113 - protein, 116 aa, Homo sapiens
SHATLLMTLATPLLKPPIPPCTTSFSAKDLASYSTEKNRVTRREHLQASSATSVYLLASAPVFVVFLSDMVDGLSSYLPGANSSGWALETQLSCHSCSRTFPAFLGLSVEQSSTTN

SEQ ID NO: 842114 - protein, 119 aa, Homo sapiens [sequence omitted]

SEQ ID NO: 842115 - protein, 143 aa, Homo sapiens
ATRVSLEAGPGCRLAMASEASVRLGVPPGRLWIQRPGIYEDEEGRTWVTVVVRFNPSRREWARASQGSRYEPSITVHLWQMAVHTRELLSSGQMPFSQLPAVWQLYPGRKYRAADSSFWEIADHGQIDSMEQLVLTYQPERKD

SEQ ID NO: 842116 - protein, 141 aa, Homo sapiens
MEPRVTQRKRPLDGCMGKITGITSDILKYDHKCFKLSLPAKFPEVCGSDEVFPDPDLLHVLPVAGSLQQSIDQCCLQLESLCRPGLLCAHPTLLFKLHSSMKNRPFFSLIYTYVKKTQQVRKRDRKPRGQVAAGPNPTSVM

SEQ ID NO: 842117 - protein, 105 aa, Homo sapiens [sequence omitted]

SEQ ID NO: 842118 - protein, 141 aa, Homo sapiens; identical to SEQ ID NO: 842116

SEQ ID NO: 842119 - protein, 141 aa, Homo sapiens; identical to SEQ ID NO: 842116

SEQ ID NO: 842120 - protein, 105 aa, Homo sapiens [sequence omitted]

SEQ ID NO: 842121 - protein, 141 aa, Homo sapiens; identical to SEQ ID NO: 842116

SEQ ID NO: 842122 - protein, 141 aa, Homo sapiens; identical to SEQ ID NO: 842116

SEQ ID NO: 842123 - protein, 141 aa, Homo sapiens; identical to SEQ ID NO: 842116

SEQ ID NO: 842124 - protein, 143 aa, Homo sapiens; identical to SEQ ID NO: 842115

SEQ ID NO: 842125 - protein, 141 aa, Homo sapiens; identical to SEQ ID NO: 842116

SEQ ID NO: 842126 - protein, 141 aa, Homo sapiens; identical to SEQ ID NO: 842116

SEQ ID NO: 842127 - protein, 105 aa, Homo sapiens [sequence omitted]

SEQ ID NO: 842128 - protein, 141 aa, Homo sapiens; identical to SEQ ID NO: 842116

SEQ ID NO: 842129 - protein, 141 aa, Homo sapiens; identical to SEQ ID NO: 842116

SEQ ID NO: 842130 - protein, 141 aa, Homo sapiens; identical to SEQ ID NO: 842116

SEQ ID NO: 842131 - protein, 163 aa, Homo sapiens [sequence omitted]

SEQ ID NO: 842132 - protein, 107 aa, Homo sapiens
STGRICSEKVLSKLLAVLLRIEVCCQVRTAKTSKQKEILRIEDSILESETHALGFKVKKKQNVKPHSDHHRSENRRIVITVSFTFMLWGGMNVMAVRQDREENTQNV

SEQ ID NO: 842133 - protein, 155 aa, Homo sapiens
TLGGLDTIVKIPPHVLREKCLLPLQLALESKNVKLAQHALAGMQKLLSEERFVSMETDSDEKQLLNQILNAVKVTPSLNEDLQVEVMKVLLCITYTPTFDLNGSAVLKIAEVCIETYISSCHQRSINTAVRATLSQMLSDLTLQLRQRQENTVSL

SEQ ID NO: 842134 - protein, 138 aa, Homo sapiens
PYYPRYLAQHALAGMQKLLSEERFVSMETDSDEKQLLNQILNAVKVTPSLNEDLQVEVMKVLLCITYTPTFDLNGSAVLKIAEVCIETYISSCHQRSINTAVRATLSQMLSDLTLQLRQRQENTIIENPDVPQDFGNQ

SEQ ID NO: 842135 - protein, 127 aa, Homo sapiens
PYYPRYLAQHALAGMQKLLSEERFVSMETDSDEKQLLNQILNAVKVTPSLNEDLQVEVMKVLLCITYTPTFDLNGSAVLKIAEVCIETYISSCHQRSINTAVRATLSQMLSDLTLQLRQRQENTVSL

SEQ ID NO: 842136 - protein, 465 aa, Homo sapiens
MASQLTQRGALFLLFFLTPAVTPTWYAGSGYYPDESYNEVYAEEVPQAPALDYRVPRWCYTLNIQDGEATCYSPKGGNYHSSLGTRCELSCDRGFRLIGRRSVQCLPSRRWSGTAYCRQMRCHALPFITSGTYTCTNGVLLDSRCDYSCSSGYHLEGDRSRICMEDGRWSGGEPVCVDIDPPKIRCPHSREKMAEPEKLTARVYWDPPLVKDSADGTITRVTLRGPEPGSHFPEGEHVIRYTAYDRAYNRASCKFIVKVQVRRCPTLKPPQHGYLTCTSAGDNYGATCEYHCDGGYDRQGTPSRVCQSSRQWSGSPPICAPMKINVNVNSAAGLLDQFYEKQRLLIISAPDPSNRYYKMQISMLQQSTCGLDLRHVTIIELVGQPPQEVGRIREQQLSANIIEELRQFQRLTRSYFNMVLIDKQGIDRDRYMEPVTPEEIFTFIDDYLLSNQELTQRREQRDICE

SEQ ID NO: 842137 - protein, 465 aa, Homo sapiens; identical to SEQ ID NO: 842136

SEQ ID NO: 842138 - protein, 473 aa, Homo sapiens
MASQLTQRGALFLLFFLTPAVTPTWYAGSGYYPDESYNEVYAEEVPQAPALDYRACLSSIATVPRWCYTLNIQDGEATCYSPKGGNYHSSLGTRCELSCDRGFRLIGRRSVQCLPSRRWSGTAYCRQMRCHALPFITSGTYTCTNGVLLDSRCDYSCSSGYHLEGDRSRICMEDGRWSGGEPVCVDIDPPKIRCPHSREKMAEPEKLTARVYWDPPLVKDSADGTITRVTLRGPEPGSHFPEGEHVIRYTAYDRAYNRASCKFIVKVQVRRCPTLKPPQHGYLTCTSAGDNYGATCEYHCDGGYDRQGTPSRVCQSSRQWSGSPPICAPMKINVNVNSAAGLLDQFYEKQRLLIISAPDPSNRYYKMQISMLQQSTCGLDLRHVTIIELVGQPPQEVGRIREQQLSANIIEELRQFQRLTRSYFNMVLIDKQGIDRDRYMEPVTPEEIFTFIDDYLLSNQELTQRREQRDICE

SEQ ID NO: 842139 - protein, 465 aa, Homo sapiens; identical to SEQ ID NO: 842136

SEQ ID NO: 842140 - protein, 132 aa, Homo sapiens
FCIWKYKCSSTVCLKAIFLPLNCFCTFVKNHFNTPVWVYFWALYFFPLTYLSFHQHHTVLITILLACLSSIATVPRWCYTLNIQDGEATCYSPKGGNYHSSLGTRCELSCDRGFRLIGRRSVQCLPSRRWSG

SEQ ID NO: 842141 - protein, 403 aa, Homo sapiens
MKLEVFVPRAAHGDKQGSDLEGAGGSDAPSPLSAAGDDSLGSDGDCAANSPAAGGGARDTQGDGEQSAGGGPGAEEAIPAAAAAAVVAEGAEAGAAGPGAGGAGSGEGARSKPYTRRPKPPYSYIALIAMAIRDSAGGRLTLAEINEYLMGKFPFFRGSYTGWRNSVRHNLSLNDCFVKVLRDPSRPWGKDNYWMLNPNSEYTFADGVFRRRRKRLSHRAPVPAPGLRPEEAPGLPAAPPPAPAAPASPRMRSPARQEERASPAGKFSSSFAIDSILRKPFRSRRLRDTAPGTTLQWGAAPCPPLPAFPALLPAAPCRALLPLCAYGAGEPARLGAREAEVPPTAPPLLLAPLPAAAPAKPLRGPAAGGAHLYCPLRLPAALQAASVRRPGPHLPYPVETLLA

SEQ ID NO: 842142 - protein, 403 aa, Homo sapiens; identical to SEQ ID NO: 842141

SEQ ID NO: 842143 - protein, 403 aa, Homo sapiens; identical to SEQ ID NO: 842141

SEQ ID NO: 842144 - protein, 403 aa, Homo sapiens; identical to SEQ ID NO: 842141

SEQ ID NO: 842145 - protein, 372 aa, Homo sapiens
MSKAFGLLRQICQSILAESSQSPADLEEKKEEDSNMKREQPRERPRAWDYPHGLVGLHNIGQTCCLNSLIQVFVMNVDFTRILKRITVPRGADEQRRSVPFQMLLLLEKMQDSRQKAVRPLELAYCLQKCNVPLFVQHDAAQLYLKLWNLIKDQITDVHLVERLQALYTIRVKDSLICVDCAMESSRNSSMLTLPLSLFDVDSKPLKTLEDALHCFFQPRELSSKSKCFCENCGKKTRGKQVLKLTHLPQTLTIHLMRFSIRNSQTRKICHSLYFPQSLDFSQILPMKRESCDAEEQSGGQYELFAVIAHVGMADSGHYCVYIRNAVDGKWFCFNDSNICLVSWEDIQCTYGNPNYHWQETAYLLVYMKMEC

SEQ ID NO: 842146 - protein, 372 aa, Homo sapiens; identical to SEQ ID NO: 842145

SEQ ID NO: 842147 - protein, 212 aa, Homo sapiens
MNKFPRRIPQKSCPRILCWSCQEVSPEVADAICQAIVLSAPGPHAVLLVTQLGRFTDEDQQVVRRLQEVFGVGVLGHTILVFTRKEDLAGGSLEDYVRETNNQALAWLDVTLARRHCGFNNRAQGEEQEAQLRELMEKVEAIMWENEGDYYSNKAYQYTQQNFRLKELQERQVSQGQGSEDVPGEESWLEGLSQIQKESEEAHRCLLGKADL

SEQ ID NO: 842148 - protein, 292 aa, Homo sapiens
MEEEEYEQIPQENPPEELSQDPVLELSGGLREKEQKTPRRLRLILMGKTGSGKSATGNSILGRDVFESKLSTRPVTKTSQRRSREWAGKELEVIDTPNILSPQVSPEVADAICQAIVLSAPGPHAVLLVTQLGRFTDEDQQVVRRLQEVFGVGVLGHTILVFTRKEDLAGGSLEDYVRETNNQALAWLDVTLARRHCGFNNRAQGEEQEAQLRELMEKVEAIMWENEGDYYSNKAYQYTQQNFRLKELQERQVSQGQGSEDVPGEESWLEGLSQIQKESEEAHRCLLGKADL

SEQ ID NO: 842149 - protein, 292 aa, Homo sapiens; identical to SEQ ID NO: 842148

SEQ ID NO: 842150 - protein, 292 aa, Homo sapiens; identical to SEQ ID NO: 842148

SEQ ID NO: 842151 - protein, 89 aa, Homo sapiens
LLSRLILIDEYIRGTGGDENYNNGNQVDSWIPPISIVVQGSLHSGHDPAFLMILLWQQKASSFFICLSSFFPYSHISPLDNTTQYQYFN

SEQ ID NO: 842152 - protein, 321 aa, Homo sapiens
PEFQSRCEQGHTASEGSRGGSFLPLWLLVAPGAPWLVVVPLPSLPPHRPCASVSALFFFFLRQSPALLPRLEYSGAISAHCNLCLLGLSDPPASASLVAGTTGVHHHTWLIFVFLVETGFHQVVQASLKLLTSGDPPTSASQSARITGVSHCLRPVSTLLVGTPVIGFRAHPPLRWPHLRSLNSICKGSIPNKILSTGSAWTWALGGDPVLPTLPLSLESHLWPCFWCPCVDPRCFSPGLLGPSHLGHTGPCPTSQGEGLQVSDQTVTSLGFLPPPQVPPSLPIFTQADRARGKPGTCPASSLSGSGRSRAIDGDVLRPLL

SEQ ID NO: 842153 - protein, 35 aa, Homo sapiens
IRGDEEVGGDGAQKGHIQSLEAESREFGMTESLCC

SEQ ID NO: 842154 - protein, 142 aa, Homo sapiens
HTYRHRDTPDTHTITHRHTPYIQRYTRHTHNHTDTPHTYRHRNTPQTHNQTHPIHTDTEIDHTHTITQTHPIYTDTPQTHNHRHTQTQRYTTDTQSHRHTPYIQTQIHHRHTQSYRHTPYIHRDTPQTHTQSHTDTPHTDTD

SEQ ID NO: 842155 - protein, 310 aa, Homo sapiens
MAEAVFHAPKRKRRVYETYESPLPIPFGQDHGPLKEFKIFRAEMINNNVIVRNAEDIEQLYGKGYFGKGILSRSRPSFTISDPKLVAKWKDMKTNMPIITSKRYQHSVEWAAELMRRQGQDESTVRRILKDYTKPLEHPPVKRNEEAQVHDKLNSGMVSNMEGTAGGERPSVVNGDSGKSGGVGDPREPLGCLQEGSGCHPTTESFEKSVREDASPLPHVCCCKQDALILQRGLHHEDGSQHIGLLHPGDRGPDHEYVLVEEAECAMSEREAAPNEELVQRNRLICRRNPYRIFEYLQLSLEEVCFQHII

SEQ ID NO: 842156 - protein, 402 aa, Homo sapiens
MAEAVFHAPKRKRRVYETYESPLPIPFGQDHGPLKEFKIFRAEMINNNVIVRNAEDIEQLYGKGYFGKGILSRSRPSFTISDPKLVAKWKDMKTNMPIITSKRYQHSVEWAAELMRRQGQDESTVRRILKDYTKPLEHPPVKRNEEAQVHDKLNSGMVSNMEGTAGGERPSVVNGDSGKSGGVGDPREPLGCLQEGSGCHPTTESFEKSVREDASPLPHVCCCKQDALILQRGLHHEDGSQHIGLLHPGDRGPDHEYVLVEEAECAMSEREAAPNEEAFFLVYALGCLSIYYEKEPLTIVKLWKAFTVVQPTFRTTYMAYHYFRSKGWVPKVGLKYGTDLLLYRKGPPFYHASYSVIIELVDDHFEGSLRRPLSWKSLAALSRVSVNVSKVTQHQLCHWSVT

SEQ ID NO: 842157 - protein, 465 aa, Homo sapiens
MAEAVFHAPKRKRRVYETYESPLPIPFGQDHGPLKEFKIFRAEMINNNVIVRNAEDIEQLYGKGYFGKGILSRSRPSFTISDPKLVAKWKDMKTNMPIITSKRYQHSVEWAAELMRRQGQDESTVRRILKDYTKPLEHPPVKRNEEAQVHDKLNSGMVSNMEGTAGGERPSVVNGDSGKSGGVGDPREPLGCLQEGSGCHPTTESFEKSVREDASPLPHVCCCKQDALILQRGLHHEDGSQHIGLLHPGDRGPDHEYVLVEEAECAMSEREAAPNEELVQRNRLICRRNPYRIFEYLQLSLEEAFFLVYALGCLSIYYEKEPLTIVKLWKAFTVVQPTFRTTYMAYHYFRSKGWVPKVGLKYGTDLLLYRKGPPFYHASYSVIIELVDDHFEGSLRRPLSWKSLAALSRVSVNVSKELMLCYLIKPSTMTDKEMESPECMKRIKVQEVILSRWVSSRERSDQDDL

SEQ ID NO: 842158 - protein, 406 aa, Homo sapiens
MAEAVFHAPKRKRRVYETYESPLPIPFGQDHGPLKEFKIFRAEMINNNVIVRNAEDIEQLYGKGYFGKGILSRSRPSFTISDPKLVAKWKDMKTNMPIITSKRYQHSVEWAAELMRRQGQDESTVRRILKDYTKPLEHPPVKRNEEAQVHDKLNSGMVSNMEGTAGGERPSVRGLHHEDGSQHIGLLHPGDRGPDHEYVLVEEAECAMSEREAAPNEELVQRNRLICRRNPYRIFEYLQLSLEEAFFLVYALGCLSIYYEKEPLTIVKLWKAFTVVQPTFRTTYMAYHYFRSKGWVPKVGLKYGTDLLLYRKGPPFYHASYSVIIELVDDHFEGSLRRPLSWKSLAALSRVSVNVSKELMLCYLIKPSTMTDKEMESPECMKRIKVQEVILSRWVSSRERSDQDDL

SEQ ID NO: 842159 - protein, 484 aa, Homo sapiens
MAEAVFHAPKRKRRVYETYESPLPIPFGQDHGPLKEFKIFRAEMINNNVIVRNAEDIEQLYGKGYFGKGILSRSRPSFTISDPKLVAKWKDMKTNMPIITSKRGHSKYMCCRIEHCSVFLTRYQHSVEWAAELMRRQGQDESTVRRILKDYTKPLEHPPVKRNEEAQVHDKLNSGMVSNMEGTAGGERPSVVNGDSGKSGGVGDPREPLGCLQEGSGCHPTTESFEKSVREDASPLPHVCCCKQDALILQRGLHHEDGSQHIGLLHPGDRGPDHEYVLVEEAECAMSEREAAPNEELVQRNRLICRRNPYRIFEYLQLSLEEAFFLVYALGCLSIYYEKEPLTIVKLWKAFTVVQPTFRTTYMAYHYFRSKGWVPKVGLKYGTDLLLYRKGPPFYHASYSVIIELVDDHFEGSLRRPLSWKSLAALSRVSVNVSKELMLCYLIKPSTMTDKEMESPECMKRIKVQEVILSRWVSSRERSDQDDL

SEQ ID NO: 842160 - protein, 465 aa, Homo sapiens; identical to SEQ ID NO: 842157

SEQ ID NO: 842161 - protein, 465 aa, Homo sapiens; identical to SEQ ID NO: 842157

SEQ ID NO: 842162 - protein, 465 aa, Homo sapiens; identical to SEQ ID NO: 842157

SEQ ID NO: 842163 - protein, 406 aa, Homo sapiens; identical to SEQ ID NO: 842158

SEQ ID NO: 842164 - protein, 428 aa, Homo sapiens
MAEAVFHAPKRKRRVYETYESPLPIPFGQDHGPLKEFKIFRAEMINNNVIVRNAEDIEQLYGKGYFGKGILSRSRPSFTISDPKLVAKWKDMKTNMPIITSKRYQHSVEWAAELMRRQGQDESTVRRILKDYTKPLEHPPVKRNEEAQVHDKLNSGMVSNMEGTAGGERPSVVNGDSGKSGGVGDPREPLGCLQEGSGCHPTTESFEKSVREDASPLPHVCCCKQDALILQRGLHHEDGSQHIGLLHPGDRGPDHEYVLVEEAECAMSEREAAPNEELVQRNRLICRRNPYRIFEYLQLSLEEAFFLVYALGCLSIYYEKEPLTIVKLWKAFTVVQPTFRTTYMAYHYFRSKGWVPKVGLKYGTDLLLYRKGPPFYHASYSVIIELVDDHFEGSLRRPLSWKSLAALSRVSVNVSKVTQHQLCHWSVT

SEQ ID NO: 842165 - protein, 428 aa, Homo sapiens; identical to SEQ ID NO: 842164

SEQ ID NO: 842166 - protein, 115 aa, Homo sapiens [sequence omitted]

SEQ ID NO: 842167 - protein, 136 aa, Homo sapiens
AASDSLSAKISFLHLKVIYHTATMLQVKIYDPTNKRYEVPVPLNTPPQPVGDPENRLYDVRIQNNPFGIQIQRKNSSTVIWDSQLPGFIFNDMFLSISTRLPSQYIYGFGETEHTTFRRNMNWNTWGMFAHDEPPA

SEQ ID NO: 842168 - protein, 171 aa, Homo sapiens
MTINNRYWMQLSTSHGILVLSEVKRTYEILSTKRRYLKYFFSKSHTHTHTLSLSLSLSLSLSLSPSLCLSLSLSLDTPSDPLSRALYTIYKRKNFFFHIHFLERHAVTPYTRLTHTLSLRGTPFPPDMGCLILTLFSPSMCVRVWGHVLPSKQSVCFLLTYRGWECRVHIS

SEQ ID NO: 842169 - protein, 101 aa, Homo sapiens
ASARQGGLRRAVLGVRFGEGALAWEERVCEGCAGAGETRSRVVSAQCVVWGGRPRPGFPCSFSSGRASWFPFQASPILGRCFIQRLGHLCRWRCFPLNYKL

SEQ ID NO: 842170 - protein, 111 aa, Homo sapiens
FPLCGSSKFPPTSGLGFQALSDKVDATLLLDCNAHCVEMFVFQCRQGVVTSGRTTGTMFVSLSSGQLGVSSLYITSCPGALRRQSIMSFGIPDGNFETLVHSKDWSCVILK

SEQ ID NO: 842171 - protein, 105 aa, Homo sapiens
FGGMLTATKEVGSPGKKTTNQPQRFLTLIWRTSRASGETFLIGAMTKLGTFEKHSFGVAWIPRYTTGVVVLDMPCIKCIVFWRLHRCNDKIGYSAIFAIHCTAYI

SEQ ID NO: 842172 - protein, 256 aa, Homo sapiens
MSWSPSLTTQTCGAWEMKERLGTGGFGNVIRWHNQETGEQIAIKQCRQELSPRNRERWCLEIQIMRRLTHPNVVAARDVPEGMQNLAPNDLPLLAMEYCQGGDLRKYLNQFENCCGLREGAILTLLSDIASALRYLHENRIIHRDLKPENIVLQQGEQRLIHKIIDLGYAKELDQGSLCTSFVGTLQYLAPELLEQQKYTVTVDYWSFGTLAFECITGFRPFLPNWQPVQCVRMWPGTVAHSCNPSTLGGRGRWIS

SEQ ID NO: 842173 - protein, 756 aa, Homo sapiens
MSWSPSLTTQTCGAWEMKERLGTGGFGNVIRWHNQETGEQIAIKQCRQELSPRNRERWCLEIQIMRRLTHPNVVAARDVPEGMQNLAPNDLPLLAMEYCQGGDLRKYLNQFENCCGLREGAILTLLSDIASALRYLHENRIIHRDLKPENIVLQQGEQRLIHKIIDLGYAKELDQGSLCTSFVGTLQYLAPELLEQQKYTVTVDYWSFGTLAFECITGFRPFLPNWQPVQWHSKVRQKSEVDIVVSEDLNGTVKFSSSLPYPNNLNSVLAERLEKWLQLMLMWHPRQRGTDPTYGPNGCFKALDDILNLKLVHILNMVTGTIHTYPVTEDESLQSLKARIQQDTGIPEEDQELLQEAGLALIPDKPATQCISDGKLNEGHTLDMDLVFLFDNSKITYETQISPRPQPESVSCILQEPKRNLAFFQLRKVWGQVWHSIQTLKEDCNRLQQGQRAAMMNLLRNNSCLSKMKNSMASMSQQLKAKLDFFKTSIQIDLEKYSEQTEFGITSDKLLLAWREMEQAVELCGRENEVKLLVERMMALQTDIVDLQRSPMGRKQGGTLDDLEEQARELYRRLREKPRDQRTEGDSQEMVRLLLQAIQSFEKKVRVIYTQLSKTVVCKQKALELLPKVEEVVSLMNEDEKTVVRLQEKRQKELWNLLKIACSKVRGPVSGSPDSMNASRLSQPGQLMSQPSTASNSLPEPAKKSEELVAEAHNLCTLLENAIQDTVREQDQSFTALDWSWLQTEEEEHSCLEQAS

SEQ ID NO: 842174 - protein, 756 aa, Homo sapiens; identical to SEQ ID NO: 842173

SEQ ID NO: 842175 - protein, 697 aa, Homo sapiens
MSSDGTIRLTHPNVVAARDVPEGMQNLAPNDLPLLAMEYCQGGDLRKYLNQFENCCGLREGAILTLLSDIASALRYLHENRIIHRDLKPENIVLQQGEQRLIHKIIDLGYAKELDQGSLCTSFVGTLQYLAPELLEQQKYTVTVDYWSFGTLAFECITGFRPFLPNWQPVQWHSKVRQKSEVDIVVSEDLNGTVKFSSSLPYPNNLNSVLAERLEKWLQLMLMWHPRQRGTDPTYGPNGCFKALDDILNLKLVHILNMVTGTIHTYPVTEDESLQSLKARIQQDTGIPEEDQELLQEAGLALIPDKPATQCISDGKLNEGHTLDMDLVFLFDNSKITYETQISPRPQPESVSCILQEPKRNLAFFQLRKVWGQVWHSIQTLKEDCNRLQQGQRAAMMNLLRNNSCLSKMKNSMASMSQQLKAKLDFFKTSIQIDLEKYSEQTEFGITSDKLLLAWREMEQAVELCGRENEVKLLVERMMALQTDIVDLQRSPMGRKQGGTLDDLEEQARELYRRLREKPRDQRTEGDSQEMVRLLLQAIQSFEKKVRVIYTQLSKTVVCKQKALELLPKVEEVVSLMNEDEKTVVRLQEKRQKELWNLLKIACSKVRGPVSGSPDSMNASRLSQPGQLMSQPSTASNSLPEPAKKSEELVAEAHNLCTLLENAIQDTVREQDQSFTALDWSWLQTEEEEHSCLEQAS

SEQ ID NO: 842176 - protein, 167 aa, Homo sapiens [sequence omitted]

SEQ ID NO: 842177 - protein, 149 aa, Homo sapiens [sequence omitted]

SEQ ID NO: 842178 - protein, 140 aa, Homo sapiens
MVVPAALMAQGSLVSRWSSRFLSSCDFHPGPRTQPSVGTAGALSAHWRSSITEAQRTSLAPQTFRGTAMAAPSSAVRKVLGVRFATHVTGQCPIQIFQGRVRAALGDSLSSPALQRPCSLSSLTLQLVFLLDSASPKQTV

SEQ ID NO: 842179 - protein, 82 aa, Homo sapiens
PGTGRSVGIAMAAPSSAVRKVLGVRFATHVTGQCPIQIFQGRVRAALGDSLSSPALQRPCSLSSLTLQLVFLLDSASPKQTV

SEQ ID NO: 842180 - protein, 769 aa, Homo sapiens
MSWSPSLTTQTCGAWEMKERLGTGGFGNVIRWHNQETGEQIAIKQCRQELSPRNRERWCLEIQIMRRLTHPNVVAARDVPEGMQNLAPNDLPLLAMEYCQGGDLRKYLNQFENCCGLREGAILTLLSDIASALRYLHENRIIHRDLKPENIVLQQGEQRLIHKIIDLGYAKELDQGSLCTSFVGTLQYLAPELLEQQKYTVTVDYWSFGTLAFECITGFRPFLPNWQPVQWHSKVRQKSEVDIVVSEDLNGTVKFSSSLPYPNNLNSVLAERLEKWLQLMLMWHPRQRGTDPTYGPNGCFKALDDILNLKLVHILNMVTGTIHTYPVTEDESLQSLKARIQQDTGIPEEDQELLQEAGLALIPDKPATQCISDGKLNEGHTLDMDLVFLFDNSKITYETQISPRPQPESVSCILQEPKRNLAFFQLRKVWGQVWHSIQTLKEDCNRLQQGQRAAMMNLLRNNSCLSKMKNSMASMSQQLKAKLDFFKTSIQIDLEKYSEQTEFGITSDKLLLAWREMEQAVELCGRENEVKLLVERMMALQTDIVDLQRSPMGRKQGGTLDDLEEQARELYRRLREKPRDQRTEGDSQEMVRLLLQAIQSFEKKVRVIYTQLSKTVVCKQKALELLPKVEEVVSLMNEDEKTVVRLQEKRQKELWNLLKIACSKVRGPVSGSPDSMNASRLSQPGQLMSQPSTASNSLPEPAKKSEELVAEAHNLCTLLENAIQDTVREQDQSFTVTACVRLLRFHVLSFYGKIEEKMEMQSGIILNLN

SEQ ID NO: 842181 - protein, 593 aa, Homo sapiens
MSWSPSLTTQTCGAWEMKERLGTGGFGNVIRWHNQETGEQIAIKQCRQELSPRNRERWCLEIQIMRRLTHPNVVAARDVPEGMQNLAPNDLPLLAMEYCQGGDLRKYLNQFENCCGLREGAILTLLSDIASALRYLHENRIIHRDLKPENIVLQQGEQRLIHKIIDLGYAKELDQGSLCTSFVGTLQYLAPELLEQQKYTVTVDYWSFGTLAFECITGFRPFLPNWQPVQWHSKVRQKSEVDIVVSEDLNGTVKFSSSLPYPNNLNSVLAERLEKWLQLMLMWHPRQRGTDPTYGPNGCFKALDDILNLKLVHILNMVTGTIHTYPVTEDESLQSLKARIQQDTGIPEEDQELLQEAGLALIPDKPATQCISDGKLNEGHTLDMDLVFLFDNSKITYETQISPRPQPESVSCILQEPKRNLAFFQLRKVWGQVWHSIQTLKEDCNRLQQGQRAAMMNLLRNNSCLSKMKNSMASMSQQLKAKLDFFKTSIQIDLEKYSEQTEFGITSDKLLLAWREMEQAVELCGRENEVKLLVERMMALQTDIVDLQRSPMGRKQGGTLDDLEEQARELYRRLREKPRACVLGRGVPVSHSI

SEQ ID NO: 842182 - protein, 753 aa, Homo sapiens
MSWSPSLTTQTCGAWEMKERLGTGGFGNVIRWHNQETGEQIAIKQCRQELSPRNRERWCLEIQIMRRLTHPNVVAARDVPEGMQNLAPNDLPLLAMEYCQGGDLRKYLNQFENCCGLREGAILTLLSDIASALRYLHENRIIHRDLKPENIVLQQGEQRLIHKIIDLGYAKELDQGSLCTSFVGTLQYLAPELLEQQKYTVTVDYWSFGTLAFECITGFRPFLPNWQPVQWHSKVRQKSEVDIVVSEDLNGTVKFSSSLPYPNNLNSVLAERLEKWLQLMLMWHPRQRGTDPTYGPNGCFKALDDILNLKLVHILNMVTGTIHTYPVTEDESLQSLKARIQQDTGIPEEDQELLQEAGLALIPDKPATQCISDGKLNEGHTLDMDLVFLFDNSKITYETQISPRPQPESVSCILQEPKRNLAFFQLRKVWGQVWHSIQTLKEDCNRLQQGQRAAMMNLLRNNSCLSKMKNSMASMSQQLKAKLDFFKTSIQIDLEKYSEQTEFGITSDKLLLAWREMEQAVELCGRENEVKLLVERMMALQTDIVDLQRSPMGRKQGGTLDDLEEQARELYRRLREKPRDQRTEGDSQEMVRLLLQAIQSFEKKVRVIYTQLSKTVVCKQKALELLPKVEEVVSLMNEDEKTVVRLQEKRQKELWNLLKIACSKVRGPVSGSPDSMNASRLSQPGQLMSQPSTASNSLPEPAKKSEELVAEAHNLCTLLENAIQDTVREQDQSFTALDWSWLQTPCAGDPTRV

SEQ ID NO: 842183 - protein, 705 aa, Homo sapiens
MSWSPSLTTQTCGAWEMKERLGTGGFGNVIRWHNQETGEQIAIKQCRQELSPRNRERWCLEIQIMRRLTHPNVVAARDVPEGMQNLAPNDLPLLAMEYCQGGDLRKYLNQFENCCGLREGAILTLLSDIASALRYLHENRIIHRDLKPENIVLQQGEQRLIHKIIDLGYAKELDQGSLCTSFVGTLQYLAPELLEQQKYTVTVDYWSFGTLAFECITGFRPFLPNWQPVQWHSKVRQKSEVDIVVSEDLNGTVKFSSSLPYPNNLNSVLAERLEKWLQLMLMWHPRQRGTDPTYGPNGCFKALDDILNLKLVHILNMVTGTIHTYPVTEDESLQSLKARIQQDTGIPEEDQELLQEAGLALIPDKPATQCISDGKLNEGHTLDMDLVFLFDNSKITYETQISPRPQPESVSCILQEPKRNLAFFQLRKVWGQVWHSIQTLKEDCNRLQQGQRAAMMNLLRNNSCLSKMKNSMASMSQQLKAKLDFFKTSIQIDLEKYSEQTEFGITSDKLLLAWREMEQAVELCGRENEVKLLVERMMALQTDIVDLQRSPMGRKQGGTLDDLEEQARELYRRLREKPRDQRTEGDSQEMVRLLLQAIQSFEKKVRVIYTQLSKTVVCKQKALELLPKVEEVVSLMNEDEKTVVRLQEKRQKELWNLLKIACSKVRGPVSGSPDSMNASRLSQPGQLMSQPSTASNSLPEPAKKR

SEQ ID NO: 842184 - protein, 473 aa, Homo sapiens
MSWSPSLTTQTCGAWEMKERLGTGGFGNVIRWHNQETGEQIAIKQCRQELSPRNRERWCLEIQIMRRLTHPNVVAARDVPEGMQNLAPNDLPLLAMEYCQGGDLRKYLNQFENCCGLREGAILTLLSDIASALRYLHENRIIHRDLKPENIVLQQGEQRLIHKIIDLGYAKELDQGSLCTSFVGTLQYLAPELLEQQKYTVTVDYWSFGTLAFECITGFRPFLPNWQPVQWHSKVRQKSEVDIVVSEDLNGTVKFSSSLPYPNNLNSVLAERLEKWLQLMLMWHPRQRGTDPTYGPNGCFKALDDILNLKLVHILNMVTGTIHTYPVTEDESLQSLKARIQQDTGIPEEDQELLQEAGLALIPDKPATQCISDGKVSPGFVHTILFTLAVPPGKLNTLSDFNSALSCSLLITQCGYPGWFLSWSMVSSVWPDRKHKSPCWTCYFQTLQDRSLAFIAKNDAITLESLKLPAWPS

SEQ ID NO: 842185 - protein, 102 aa, Homo sapiens
SHLGFGEVPLQAAGGSESLANLSTEKGRSARLELSRRCAAQNRVGQELGQGLAGREPGSAGAIPCHTFGPGQKHRRPMPGLSPGMVSREGAAGGPGTGGLGA

SEQ ID NO: 842186 - protein, 38 aa, Homo sapiens
MFILCSKTVVCKQKALELLPKVEEVVSLMNEDEKTVVR

SEQ ID NO: 842187 - protein, 219 aa, Homo sapiens
MALQTDIVDLQRSPMGRKQGGTLDDLEEQARELYRRLREKPRDQRTEGDSQEMVRLLLQAIQSFEKKVRVIYTQLSKTVVCKQKALELLPKVEEVVSLMNEDEKTVVRLQEKRQKELWNLLKIACSKVRGPVSGSPDSMNASRLSQPGQLMSQPSTASNSLPEPAKKSEELVAEAHNLCTLLENAIQDTVREQDQSFTALDWSWLQTEEEEHSCLEQAS

SEQ ID NO: 842188 - protein, 775 aa, Homo sapiens
MSWSPSLTTQTCGAWEMKERLGTGGFGNVIRWHNQETGEQIAIKQCRQELSPRNRERWCLEIQIMRRLTHPNVVAARDVPEGMQNLAPNDLPLLAMEYCQGGDLRKYLNQFENCCGLREGAILTLLSDIGKSQSRNSGRVLQGECGASSSALRYLHENRIIHRDLKPENIVLQQGEQRLIHKIIDLGYAKELDQGSLCTSFVGTLQYLAPELLEQQKYTVTVDYWSFGTLAFECITGFRPFLPNWQPVQWHSKVRQKSEVDIVVSEDLNGTVKFSSSLPYPNNLNSVLAERLEKWLQLMLMWHPRQRGTDPTYGPNGCFKALDDILNLKLVHILNMVTGTIHTYPVTEDESLQSLKARIQQDTGIPEEDQELLQEAGLALIPDKPATQCISDGKLNEGHTLDMDLVFLFDNSKITYETQISPRPQPESVSCILQEPKRNLAFFQLRKVWGQVWHSIQTLKEDCNRLQQGQRAAMMNLLRNNSCLSKMKNSMASMSQQLKAKLDFFKTSIQIDLEKYSEQTEFGITSDKLLLAWREMEQAVELCGRENEVKLLVERMMALQTDIVDLQRSPMGRKQGGTLDDLEEQARELYRRLREKPRDQRTEGDSQEMVRLLLQAIQSFEKKVRVIYTQLSKTVVCKQKALELLPKVEEVVSLMNEDEKTVVRLQEKRQKELWNLLKIACSKVRGPVSGSPDSMNASRLSQPGQLMSQPSTASNSLPEPAKKSEELVAEAHNLCTLLENAIQDTVREQDQSFTALDWSWLQTEEEEHSCLEQAS

SEQ ID NO: 842189 - protein, 477 aa, Homo sapiens
MLMWHPRQRGTDPTYGPNGCFKALDDILNLKLVHILNMVTGTIHTYPVTEDESLQSLKARIQQDTGIPEEDQELLQEAGLALIPDKPATQCISDGKLNEGHTLDMDLVFLFDNSKITYETQISPRPQPESVSCILQEPKRNLAFFQLRKVWGQVWHSIQTLKEDCNRLQQGQRAAMMNLLRNNSCLSKMKNSMASMSQQLKAKLDFFKTSIQIDLEKYSEQTEFGITSDKLLLAWREMEQAVELCGRENEVKLLVERMMALQTDIVDLQRSPMGRKQGGTLDDLEEQARELYRRLREKPRDQRTEGDSQEMVRLLLQAIQSFEKKVRVIYTQLSKTVVCKQKALELLPKVEEVVSLMNEDEKTVVRLQEKRQKELWNLLKIACSKVRGPVSGSPDSMNASRLSQPGQLMSQPSTASNSLPEPAKKSEELVAEAHNLCTLLENAIQDTVREQDQSFTALDWSWLQTEEEEHSCLEQAS

SEQ ID NO: 842190 - protein, 140 aa, Homo sapiens; identical to SEQ ID NO: 842178

SEQ ID NO: 842191 - protein, 109 aa, Homo sapiens
MSWSPSLTTQTCGAWEMKERLGTGGFGNVIRWHNQDAALRGHCRRLVCTLEVLHYRGPAHIAGPTNVQGYSHGSSFLCREKSAWSTVCHTRDWTVSNSNLSGQSPSSAW

SEQ ID NO: 842192 - protein, 752 aa, Homo sapiens
MSWSPSLTTQTCGAWEMKERLGTGGFGNVIRWHNQETGEQIAIKQCRQELSPRNRERWCLEIQIMRRLTHPNVVAARDVPEGMQNLAPNDLPLLAMEYCQGGDLRKYLNQFENCCGLREGAILTLLSDIASALRYLHENRIIHRDLKPENIVLQQGEQRLIHKIIDLGYAKELDQGSLCTSFVGTLQYLAPELLEQQKYTVTVDYWSFGTLAFECITGFRPFLPNWQPVQWHSKVRQKSEVDIVVSEDLNGTVKFSSSLPYPNNLNSVLAERLEKWLQLMLMWHPRQRGTDPTYGPNGCFKALDDILNLKLVHILNMVTGTIHTYPVTEDESLQSLKARIQQDTGIPEEDQELLQEAGLALIPDKPATQCISDGKLNEGHTLDMDLVFLFDNSKITYETQISPRPQPESVSCILQEPKRNLAFFQLRKVWGQVWHSIQTLKEDCNRLQQGQRAAMMNLLRNNSCLSKMKNSMASMSQQLKAKLDFFKTSIQIDLEKYSEQTEFGITSDKLLLAWREMEQAVELCGRENEVKLLVERMMALQTDIVDLQRSPMGRKQGGTLDDLEEQARELYRRLREKPRDQRTEGDSQEMVRLLLQAIQSFEKKVRVIYTQLSKTVVCKQKALELLPKVEEVVSLMNEDEKTVVRLQEKRQKELWNLLKIACSKVRGPVSGSPDSMNASRLSQPGQLMSQPSTASNSLPEPAKKSEELVAEAHNLCTLLENAIQDTVRGNQGPGSFNGPLKMGDLVYQNRKE

SEQ ID NO: 842193 - protein, 673 aa, Homo sapiens
MSWSPSLTTQTCGAWEMKERLGTGGFGNVIRWHNQETGEQIAIKQCRQELSPRNRERWCLEIQIMRRLTHPNVVAARDVPEGMQNLAPNDLPLLAMEYCQGGDLRKYLNQFENCCGLREGAILTLLSDIASALRYLHENRIIHRDLKPENIVLQQGEQRLIHKIIDLGYAKELDQGSLCTSFVGTLQYLAPELLEQQKYTVTVDYWSFGTLAFECITGFRPFLPNWQPVQWHSKVRQKSEVDIVVSEDLNGTVKFSSSLPYPNNLNSVLAERLEKWLQLMLMWHPRQRGTDPTYGPNGCFKALDDILNLKLVHILNMVTGTIHTYPVTEDESLQSLKARIQQDTGIPEEDQELLQEAGLALIPDKPATQCISDGKLNEGHTLDMDLVFLFDNSKITYETQISPRPQPESVSCILQEPKRNLAFFQLRKVWGQVWHSIQTLKEDCNRLQQGQRAAMMNLLRNNSCLSKMKNSMASMSQQLKAKLDFFKTSIQIDLEKYSEQTEFGITSDKLLLAWREMEQAVELCGRENEVKLLVERMMALQTDIVDLQRSPMGRKQGGTLDDLEEQARELYRRLREKPRDQRTEGDSQEMVRLLLQAIQSFEKKVRVIYTQLSKTVVCKQKALELLPKVEEVVSLMNEDEKTVVRLQEKRQKELWNLLKIACVSECCGPGPLA

SEQ ID NO: 842194 - protein, 563 aa, Homo sapiens
MSWSPSLTTQTCGAWEMKERLGTGGFGNVIRWHNQETGEQIAIKQCRQELSPRNRERWCLEIQIMRRLTHPNVVAARDVPEGMQNLAPNDLPLLAMEYCQGGDLRKYLNQFENCCGLREGAILTLLSDIASALRYLHENRIIHRDLKPENIVLQQGEQRLIHKIIDLGYAKELDQGSLCTSFVGTLQYLAPELLEQQKYTVTVDYWSFGTLAFECITGFRPFLPNWQPVQWHSKVRQKSEVDIVVSEDLNGTVKFSSSLPYPNNLNSVLAERLEKWLQLMLMWHPRQRGTDPTYGPNGCFKALDDILNLKLVHILNMVTGTIHTYPVTEDESLQSLKARIQQDTGIPEEDQELLQEAGLALIPDKPATQCISDGKLNEGHTLDMDLVFLFDNSKITYETQISPRPQPESVSCILQEPKRNLAFFQLRKVWGQVWHSIQTLKEDCNRLQQGQRAAMMNLLRNNSCLSKMKNSMASMSQQLKAKLDFFKTSIQIDLEKYSEQTEFGITSDKLLLAWREMEQAVELCGRENEVKLLVERMMALQTDIVDLQRSPMGRKQGGTLDDL

SEQ ID NO: 842195 - protein, 48 aa, Homo sapiens
MSPDLPALEEGLGDAGMRSPSSLLSDSLDLMKRVSAAADWMHSCHRFC

SEQ ID NO: 842196 - protein, 136 aa, Homo sapiens
VVIQVISSGHSLFDILFIYFFLRWSLTLSPRRECSGAISAHCNLCLLGSSNSPASASQVAGNTGVSHCARPTCANFLNLRDHLVYLLKNTAPWRGRIRICRGGPWESVIFKQVSQVVLMLRQVWEMCEPTLIQSSL

SEQ ID NO: 842197 - protein, 173 aa, Homo sapiens
SSPPSFPRRRASLAPQLPAKMAENSESLGTVPEHERILQEIESTDTACVGPTLRSVYDDQPNAHKKFMEKLDACIRNHDKEIEKMCNFHHQGFVDAITELLKVRTDAEKLKVQVTDTNRRFQDAGKEVIVHTEDIIRCRIQQRNITTVVEKLQLCLPVLEMYSKLKEQMSAKR

SEQ ID NO: 842198 - protein, 356 aa, Homo sapiens
  misc_feature (339)..(339): Xaa can be any naturally occurring amino acid
  misc_feature (356)..(356): Xaa can be any naturally occurring amino acid
MLYTYCFPNFILFCFKQRNTEGFLMLCLFHCCFTYFVRMFVENLPKLREDIKEISMSDLKDFLESIRKHSDKIGETAMKQAQHQKTFSVSLQKQNKMKFGKNMYINRDRIPEERNETVLKHSLEEEDENEEEILTVQDLVDFSPVYRCLHIYSVLGDEETFENYYRKQRKKQARLVLQPQSNMHETVDGYRRYFTQIVGFFVVEDHILHVTQGLVTRAYTDELWNMALSKIIAVLRAHSSYCTDPDLVLELKNLIVIFADTLQGYGFPVNRLFDLLFEIRDQYNETLLKKWAGVFRDIFEEDNYSPIPVVNEEEYKIVISKFPFQDPDLEKQVFPPKKXEKFPPMGPQGSKWPLQX

SEQ ID NO: 842199 - protein, 217 aa, Homo sapiens
SFPKKFPMSQSVPHIYIQVKEFIYASLKFSESLHRSSTEIDDMLRKSTNLLLTRTLSSCLLNLIRKPHIGLTELVQIIINTTHLEQACKYLEDFITNITNISQETVHTTRLYGLSTFKDARHAAEGEIYTKLNQKIDEFVQLADYDWTMSEPDGRASGYLMDLINFLRSIFQVFTHLPGKVAQTACMSACQHLSTSLMQMLLDSELKQISMGSCSAV

SEQ ID NO: 842200 - protein, 517 aa, Homo sapiens
  misc_feature (500)..(500): Xaa can be any naturally occurring amino acid
  misc_feature (517)..(517): Xaa can be any naturally occurring amino acid
SSPPSFPRRRASLAPQLPAKMAENSESLGTVPEHERILQEIESTDTACVGPTLRSVYDDQPNAHKKFMEKLDACIRNHDKEIEKMCNFHHQGFVDAITELLKVRTDAEKLKVQVTDTNRRFQDAGKEVIVHTEDIIRCRIQQRNITTVVEKLQLCLPVLEMYSKLKEQMSAKRYYSALKTMEQLENVYFPWVSQYRFCQLMIENLPKLREDIKEISMSDLKDFLESIRKHSDKIGETAMKQAQHQKTFSVSLQKQNKMKFGKNMYINRDRIPEERNETVLKHSLEEEDENEEEILTVQDLVDFSPVYRCLHIYSVLGDEETFENYYRKQRKKQARLVLQPQSNMHETVDGYRRYFTQIVGFFVVEDHILHVTQGLVTRAYTDELWNMALSKIIAVLRAHSSYCTDPDLVLELKNLIVIFADTLQGYGFPVNRLFDLLFEIRDQYNETLLKKWAGVFRDIFEEDNYSPIPVVNEEEYKIVISKFPFQDPDLEKQVFPPKKXEKFPPMGPQGSKWPLQX

SEQ ID NO: 842201 - protein, 173 aa, Homo sapiens; identical to SEQ ID NO: 842197

SEQ ID NO: 842202 - protein, 82 aa, Homo sapiens
SYGSGSKGTTGREDPIVSLPGMAEEQTAQQREGPEACVHRGKVEDGKCRASLSSQSQSSLNFSQHWVYCWQPCCQEQPQGPH

SEQ ID NO: 842203 - protein, 515 aa, Homo sapiens
EHLAPATALSPHLTRKAARAGIFQSQAVCSPAGQCDCASLPDWPRVAGCVRRRLPLLLRAGARRGRRCFVLSEARKFDRAAMPNRKASRNAYYFFVQEKIPELRRRGLPVARVADAIPYCSSDWALLREEEKEKYAEMAREWRAAQGKDPGPSEKQKPVFTPLRRPGMLVPKQNVSPPDMSALSLKGDQALLGGIFYFLNIFSHGELPPHCEQRFLPCEIGCVKYSLQEGIMADFHSFINPGEIPRGFRFHCQAASDSSHKIPISNFERGHNQATVLQNLYRFIHPNPGNWPPIYCKSDDRTRVNWCLKHMAKASEIRQDLQLLTVEDLVVGIYQQKFLKEPSKTWIRSLLDVAMWDYSSNTRCKWHEENDILFCALAVCKKIAYCISNSLATLFGIQLTEAHVPLQDYEASNSVTPKMVVLDAGRYQKLRVGSSGFSHFNSSNEEQRSNTPIGDYPSRAKISGQNSSVRGRGITRLLESISNSSSNIHKFSNCDTSLSPYMSQKDGYKSFSSLS

SEQ ID NO: 842204 - protein, 374 aa, Homo sapiens
EHLAPATALSPHLTRKAARAGIFQSQAVCSPAGQCDCASLPDWPRVAGCVRRRLPLLLRAGARRGRRCFVLSEARKFDRAAMPNRKASRNAYYFFVQEKIPELRRRGLPVARVADAIPYCSSDWALLREEEKEKYAEMAREWRAAQGKDPGPSEKQKPVFTPLRRPGMLVPKQNVSPPDMSALSLKGDQALLGGIFYFLNIFSHGELPPHCEQRFLPCEIGCVKYSLQEGIMADFHSFINPGEIPRGFRFHCQAASDSSHKIPISNFERGHNQATVLQNLYRFIHPNPGNWPPIYCKSDDRTRVNWCLKHMAKASEIRQDLQLLTVEDLVVGIYQQKFLKEPSKTWIRSLLDVAMWDYSSNTRESCSVTPAGIQ

SEQ ID NO: 842205 - protein, 515 aa, Homo sapiens; identical to SEQ ID NO: 842203

SEQ ID NO: 842206 - protein, 374 aa, Homo sapiens; identical to SEQ ID NO: 842204

SEQ ID NO: 842207 - protein, 484 aa, Homo sapiens
EHLAPATALSPHLTRKAARAGIFQSQAVCSPAGQCDCASLPDWPRVAGCVRRRLPLLLRAGARRGRRCFVLSEARKFDRAAMPNRKASRNAYYFFVQEKIPELRRRGLPVARVADAIPYCSSDWAKPVFTPLRRPGMLVPKQNVSPPDMSALSLKGDQALLGGIFYFLNIFSHGELPPHCEQRFLPCEIGCVKYSLQEGIMADFHSFINPGEIPRGFRFHCQAASDSSHKIPISNFERGHNQATVLQNLYRFIHPNPGNWPPIYCKSDDRTRVNWCLKHMAKASEIRQDLQLLTVEDLVVGIYQQKFLKEPSKTWIRSLLDVAMWDYSSNTRCKWHEENDILFCALAVCKKIAYCISNSLATLFGIQLTEAHVPLQDYEASNSVTPKMVVLDAGRYQKLRVGSSGFSHFNSSNEEQRSNTPIGDYPSRAKISGQNSSVRGRGITRLLESISNSSSNIHKFSNCDTSLSPYMSQKDGYKSFSSLS

SEQ ID NO: 842208 - protein, 69 aa, Homo sapiens
GPMISLQRKAHWEGTEEGPRAGGHAADLAWCREARDLCSSLSLGEASSPARMTAVFSQGQFCTVAAGCR

SEQ ID NO: 842209 - protein, 513 aa, Homo sapiens
MTLLPGDNSDYDYSALSCTSDASFHPAFLPQRQAIKGAFYRRAQRLRPQDEPRQGCQPEDRRRRIIINVGGIKYSLPWTTLDEFPLTRLGQLKACTNFDDILNVCDDYDVTCNEFFFDRNPGAFGTILTFLRAGKLRLLREMCALSFQEELLYWGIAEDHLDGCCKRRYLQKIEEFAEMVEREEEDDALDSEGRDSEGPAEGEGRLGRCMRRLRDMVERPHSGLPGKVFACLSVLFVTVTAVNLSVSTLPSLREEEEQGHCSQMCHNVFIVESVCVGWFSLEFLLRLIQAPSKFAFLRSPLTLIDLVAILPYYITLLVDGAAAGRRKPGAGNSYLDKVGLVLRVLRALRILYVMRLARHSLGLQTLGLTARRCTREFGLLLLFLCVAIALFAPLLYVIENEMADSPEFTSIPACYWWAVITMTTVGYGDMVPRSTPGQVVALSSILSGILLMAFPVTSIFHTFSRSYLELKQEQERVMFRRAQFLIKTKSQLSVSQDSDILFGSASSDTRDNN

SEQ ID NO: 842210 - protein, 513 aa, Homo sapiens; identical to SEQ ID NO: 842209

SEQ ID NO: 842211 - protein, 513 aa, Homo sapiens; identical to SEQ ID NO: 842209

SEQ ID NO: 842212 - protein, 275 aa, Homo sapiens
MTLLPGDNSDYDYSALSCTSDASFHPAFLPQRQAIKGAFYRRAQRLRPQDEPRQGCQPEDRRRRIIINVGGIKYSLPWTTLDEFPLTRLGQLKACTNFDDILNVCDDYDVTCNEFFFDRNPGAFGTILTFLRAGKLRLLREMCALSFQEELLYWGIAEDHLDGCCKRRYLQKIEEFAEMVEREEEDDALDSEGRDSEGPAEGEGRLGRCMRRLRDMVERPHSGLPGKVFACLSVLFVTVTAVNLSVSTLPSLREEEEQVRAHAPRGNAPPRGKGL

SEQ ID NO: 842213 - protein, 266 aa, Homo sapiens
LLRRAPGALGARRGPGGRDGAAVAPRAGAEPGPGTEVWRLIQAPSKFAFLRSPLTLIDLVAILPYYITLLVDGAAAGRRKPGAGNSYLDKVGLVLRVLRALRILYVMRLARHSLGLQTLGLTARRCTREFGLLLLFLCVAIALFAPLLYVIENEMADSPEFTSIPACYWWAVITMTTVGYGDMVPRSTPGQVVALSSILSGILLMAFPVTSIFHTFSRSYLELKQEQERVMFRRAQFLIKTKSQLSVSQDSDILFGSASSDTRDNN

SEQ ID NO: 842214 - protein, 275 aa, Homo sapiens; identical to SEQ ID NO: 842212

SEQ ID NO: 842215 - protein, 207 aa, Homo sapiens
MTLLPGDNSDYDYSALSCTSDASFHPAFLPQRQAIKGAFYRRAQRLRPQDEPRQGCQPEDRRRRIIINVGGIKYSLPWTTLDEFPLTRLGQLKACTNFDDILNVCDDYDVTCNEFFFDRNPGAFGTILTFLRAGKLRLLREMCALSFQEELLYGSSAQPRPPQPLCVFPSIRRCLVLFTMQITCPAKTCFMGLPGEKKKKYKQQKQH

SEQ ID NO: 842216 - protein, 513 aa, Homo sapiens; identical to SEQ ID NO: 842209

SEQ ID NO: 842217 - protein, 513 aa, Homo sapiens; identical to SEQ ID NO: 842209

SEQ ID NO: 842218 - protein, 488 aa, Homo sapiens
MTLLPGDNSDYDYSALSCTSDASFHPAFLPQRQAIKGAFYRRAQRLRPQDEPRQGCQPEDRRRRIIINVGGIKYSLPWTTLDEFPLTRLGQLKACTNFDDILNVCDDYDVTCNEFFFDRNPGAFGTILTFLRAGKLRLLREMCALSFQEELLYWGIAEDHLDGCCKRRYLQKIEEFAEMVEREEEDDALDSEGRDSEGPAEGEGRLGRCMRRLRDMVERPHSGLPSLREEEEQGHCSQMCHNVFIVESVCVGWFSLEFLLRLIQAPSKFAFLRSPLTLIDLVAILPYYITLLVDGAAAGRRKPGAGNSYLDKVGLVLRVLRALRILYVMRLARHSLGLQTLGLTARRCTREFGLLLLFLCVAIALFAPLLYVIENEMADSPEFTSIPACYWWAVITMTTVGYGDMVPRSTPGQVVALSSILSGILLMAFPVTSIFHTFSRSYLELKQEQERVMFRRAQFLIKTKSQLSVSQDSDILFGSASSDTRDNN

SEQ ID NO: 842219 - protein, 207 aa, Homo sapiens; identical to SEQ ID NO: 842215

SEQ ID NO: 842220 - protein, 119 aa, Homo sapiens
MGPVLPLSTCKHQEARGLRLSVHTWSLGDAIQAAGCKYQPWTDNSYITSFPRSPDWHAHCLLHVSSEATDPSNPAGLSSCCLEQFLLCLFPPPDPRGIPLSLPTSLAYPGSPHSCPHFP

SEQ ID NO: 842221 - protein, 108 aa, Homo sapiens
MPFLASSLSSYDFLLTTRFPLFMDTAIIPSTRPANIPPLHAKGRPLMFLPPNPGTPFSGYVGCHPINYTVASRFSALNELLTNFKSPTEMNLTCRSSTSTLGPGRHSS

SEQ ID NO: 842222 - protein, 449 aa, Homo sapiens
MPLRDKYCQTDHHHHGCCEPVYILEPGDPPLLQQPLQTSKSGIQQIIECFRSGTKQLKHILLKDVDTIFECKLCRSLFRGLPNLITHKKFYCPPSLQMDDNLPDVNDKQSQAINDLLEAIYPSVDKREYIIKLEPIETNQNAVFQYISRTDNPIEVTESSSTPEQTEVQIQETSTEQSKTVPVTDTEVETVEPPPVEIVTDEVAPTSDEQPQESQADLETSDNSDFGHQLICCLCRKEFNSRRGVRRHIRKVHKKKMEELKKYIETRKNPNQSSKGRSKNVLVPLSRSCPVCCKSFATKANVRRHFDEVHRGLRRDSITPDIATKPGQPLFLDSISPKKSFKTRKQKSSSKAEYNLTACKCLLCKRKYSSQIMLKRHMQIVHKITLSGTNSKREKGPNNTANSSEIKVKVEPADSVESSPPSITHSPQNELKGTNHSNEKKNITGSTEK

SEQ ID NO: 842223 - protein, 665 aa, Homo sapiens
MPLRDKYCQTDHHHHGCCEPVYILEPGDPPLLQQPLQTSKSGIQQIIECFRSGTKQLKHILLKDVDTIFECKLCRSLFRGLPNLITHKKFYCPPSLQMDDNLPDVNDKQSQAINDLLEAIYPSVDKREYIIKLEPIETNQNAVFQYISRTDNPIEVTESSSTPEQTEVQIQETSTEQSKTVPVTDTEVETVEPPPVEIVTDEVAPTSDEQPQESQADLETSDNSDFGHQLICCLCRKEFNSRRGVRRHIRKVHKKKMEELKKYIETRKNPNQSSKGRSKNVLVPLSRSCPVCCKSFATKANVRRHFDEVHRGLRRDSITPDIATKPGQPLFLDSISPKKSFKTRKQKSSSKAEYNLTACKCLLCKRKYSSQIMLKRHMQIVHKITLSGTNSKREKGPNNTANSSEIKVKVEPADSVESSPPSITHSPQNELKGTNHSNEKKNTPAAQKNKVKQDSESPKSTSPSAAGGQQKTRKPKLSAGFDFKQLYCKLCKRQFTSKQNLTKHIELHTDGNNIYVKFYKCPLCTYETRRKRDVIRHITVVHKKSSRYLGKITASLEIRAIKKPIDFVLNKVAKRGPSRDEAKHSDSKHDGTSNSPSKKYEVADVGIEVKVTKNFSLHRCNKCGKAFAKKTYLEHHKKTHKANASNSPEGNKTKGRSTRSKALVW

SEQ ID NO: 842224 - protein, 141 aa, Homo sapiens
LRPGSVSRSLSLPESLCFPLPTRSAAVARALRRRGRQRKREADLIKFPETTTTTEKAQGGGRPPFSSAPLLKPEGPLQVERRWWDPGCGGSRCPGEGSLRSCPLRFRLLRWWRRQLLPGGSSCQLPPPARLPPSHTARRTP

SEQ ID NO: 842225 - protein, 664 aa, Homo sapiens
MPLRDKYCQTDHHHHGCCEPVYILEPGDPPLLQQPLQTSKSGIQQIIECFRSGTKQLKHILLKDVDTIFECKLCRSLFRGLPNLITHKKFYCPPSLQMDDNLPDVNDKQSQAINDLLEAIYPSVDKREYIIKLEPIETNQNAVFQYISRTDNPIEVTESSSTPEQTEVQIQETSTEQSKTVPVTDTEVETVEPPPVEIVTDEVAPTSDEQPQESQADLETSDNSDFGHQLICCLCRKEFNSRRGVRRHIRKVHKKKMEELKKYIETRKNPNQSSKGRSKNVLVPLSRSCPVCCKSFATKANVRRHFDEVHRGLRRDSITPDIATKPGQPLFLDSISPKKSFKTRKQKSSSKAEYNLTACKCLLCKRKYSSQIMLKRHMQIVHKITLSGTNSKREKGPNNTANSSEIKVKVEPADSVESSPPSITHSPQNELKGTNHSNEKKNTPAAQKNKVKQDSESPKSTSPSAAGGQQKTRKPKLSAGFDFKQLYCKLCKRQFTSKQNLTKHIELHTDGNNIYVKFYKCPLCTYETRRKRDVIRHITVVHKKSSRYLGKITASLEIRAIKKPIDFVLNKVAKRGPSRDEAKHSDSKHDGTSNSPSKKYEVADVGIEVKVTKNFSLHRCNKCGKAFAKKTYLEHHKKTHKANASNSPEGNKTKGRSTRSKALV

SEQ ID NO: 842226 - protein, 493 aa, Homo sapiens
EYEADSVKSYGTGTDTMRGREPPPVEIVTDEVAPTSDEQPQESQADLETSDNSDFGHQLICCLCRKEFNSRRGVRRHIRKVHKKKMEELKKYIETRKNPNQSSKGRSKNVLVPLSRSCPVCCKSFATKANVRRHFDEVHRGLRRDSITPDIATKPGQPLFLDSISPKKSFKTRKQKSSSKAEYNLTACKCLLCKRKYSSQIMLKRHMQIVHKITLSGTNSKREKGPNNTANSSEIKVKVEPADSVESSPPSITHSPQNELKGTNHSNEKKNTPAAQKNKVKQDSESPKSTSPSAAGGQQKTRKPKLSAGFDFKQLYCKLCKRQFTSKQNLTKHIELHTDGNNIYVKFYKCPLCTYETRRKRDVIRHITVVHKKSSRYLGKITASLEIRAIKKPIDFVLNKVAKRGPSRDEAKHSDSKHDGTSNSPSKKYEVADVGIEVKVTKNFSLHRCNKCGKAFAKKTYLEHHKKTHKANASNSPEGNKTKGRSTRSKALV

SEQ ID NO: 842227 - protein, 215 aa, Homo sapiens
SGLYCTPLKKTLPLIYQYKKDPLRGGGHFCVMATSLLGEEPRLGSTPLAMLAATCNKIGSPSPSPSSLSDSSSSFGKGFHPWKRSSSSSSASCNVVGSSLSSFGVSGASRNGGSSSAAAAAAAAAAAAAALVSDSFSCGGSPGSSAFSLTSSGGSSAHSQDGSHQPVFISKVHTSVDGLQGIYPRVGMAHPYESWFKPSHPGLGAAGEVGSAGAS

SEQ ID NO: 842228 - protein, 189 aa, Homo sapiens
SPPPLLLLSSSQEEPRLGSTPLAMLAATCNKIGSPSPSPSSLSDSSSSFGKGFHPWKRSSSSSSASCNVVGSSLSSFGVSGASRNGGSSSAAAAAAAAAAAAAALVSDSFSCGGSPGSSAFSLTSSGGSSAHSQDGSHQPVFISKVHTSVDGLQGIYPRVGMAHPYESWFKPSHPGLGAAGEVGSAGAS

SEQ ID NO: 842229 - protein, 166 aa, Homo sapiens
MLAATCNKIGSPSPSPSSLSDSSSSFGKGFHPWKRSSSSSSASCNVVGSSLSSFGVSGASRNGGSSSAAAAAAAAAAAAAALVSDSFSCGGSPGSSAFSLTSSGGSSAHSQDGSHQPVFISKVHTSVDGLQGIYPRVGMAHPYESWFKPSHPGLGAAGEVGSAGAS

SEQ ID NO: 842230 - protein, 100 aa, Homo sapiens
QPVPLLTAPGLCTNPLTHTALSKPGLTHSDTHTGAHHTQAQPPKPRPRSWSVRVHVARKCRLERPPCRPDPQPRTSWCPESVSPKGIGRSCRFHLPGWVP

SEQ ID NO: 842231 - protein, 115 aa, Homo sapiens
RPQDDIYSPSSSSKIPVKWTAPEAANYRVFSQKSDVWSFGVLLHEVFTYGQCPYEGMTNHETLQQIMRGYRLPRPAACPAEVYVLMLECWRSSPEERPSFATLREKLHAIHRCHP

SEQ ID NO: 842232 - protein, 976 aa, Homo sapiens
MAAEEVLQTVDHYKTEIERLTKELTETTHEKIQAAEYGLVVLEEKLTLKQQYDELEAEYDSLKQELEQLKEVAFGQSFSIHRKVAEDGETREETLLQESASKEAYYLGKILEMQNELKQSRAVVTNVQAENERLTAVVQDLKENNEMVELQRIRMKDEIREYKFREARLLQDYTELEEENITLQKLVSTLKQNQVEYEGLKHEIKRFEEETVLLNSQLEDAIRLKEIAEHQLEEALETLKNEREQKNNLRKELSQYISLNDNHISISVDGLKFAEDGSEPNNDDKMNGHIHGPLVKLNGDYRTPTLRKGESLNPVSDLFSELNISEIQKLKQQLMQVEREKAILLANLQESQTQLEHTKGALTEQHERVHRLTEHVNAMRGLQSSKELKAELDGEKGRDSGEEAHDYEVDINGLEILECKYRVAVTEVIDLKAEIKALKEKYNKSVENYTDEKAKYESKIQMYDEQVTSLEKTTKESGEKMAHMEKELQKMTSIANENHSTLNTAQDELVTFSEELAQLYHHVCLCNNETPNRVMLDYYRQSRVTRSGSLKGPDDPRGLLSPRLARRGVSSPVETRTSSEPVAKESTEASKEPSPTKTPTISPVITAPPSSPVLDTSDIRKEPMNIYNLNAIIRDQIKHLQKAVDRSLQLSRQRAAARELAPMIDKDKEALMEEILKLKSLLSTKREQIATLRAVLKANKQTAEVALANLKNKYENEKAMVTETMTKLRNELKALKEDAATFSSLRAMFATRCDEYVTQLDEMQRQLAAAEDEKKTLNTLLRMAIQQKLALTQRLEDLEFDHEQSRRSKGKLGKSKIGSPKVSGEASVTVPTIDTYLLHSQGPQTPNIRVSSGTQRKRQFSPSLCDQSRPRTSGASYLQNLLRVPPDPTSTESFLLKGPPSMSEFIQGHRLSKEKRLTVAPPDCQQPAASVPPQCSQLAGRQDCPTVSPDTALPEEQPHSSSQCAPLHCLSKPPHP

SEQ ID NO: 842233 - protein, 244 aa, Homo sapiens
EPAPRLHHSAPAAAGPEGAGGARERESEPRAGARQTQGETAVTRPGRHGGRASLNKQNPEPLRYPRPPQPGPCRTAADRTQGPAPRTHAAAFAASPLTLCPVLHVAFLVSFSGGVAAAATRAGGASRCSFIRPHFLFRFHPSLPISFSLSPPASHPSPPPRNPLLPPSTGAMAAEEVLQTVDHYKTEIERLTKELTETTHEKIQAAEYGLVVLEEKLTLKQQYDELEAEYDSLKQELEQLKEVS

SEQ ID NO: 842234 - protein, 930 aa, Homo sapiens
MAAEEVLQTVDHYKTEIERLTKELTETTHEKIQAAEYGLVVLEEKLTLKQQYDELEAEYDSLKQELEQLKEVAFGQSFSIHRKVAEDGETREETLLQESASKEAYYLGKILEMQNELKQSRAVVTNVQAENERLTAVVQDLKENNEMVELQRIRMKDEIREYKFREARLLQDYTELEEENITLQKLVSTLKQNQVEYEGLKHEIKRFEEETVLLNSQLEDAIRLKEIAEHQLEEALETLKNEREQKNNLRKELSQYISLNDNHISISVDGLKFAEDGSEPNNDDKMNGHIHGPLVKLNGDYRTPTLRKGESLNPVSDLFSELNISEIQKLKQQLMQVEREKAILLANLQESQTQLEHTKGALTEQHERVHRLTEHVNAMRGLQSSKELKAELDGEKGRDSGEEAHDYEVDINGLEILECKYRVAVTEVIDLKAEIKALKEKYNKSVENYTDEKAKYESKIQMYDEQVTSLEKTTKESGEKMAHMEKELQKMTSIANENHSTLNTAQDELVTFSEELAQLYHHVCLCNNETPNRVMLDYYRQSRVTRSGSLKGPDDPRGLLSPRLARRGVSSPVETRTSSEPVAKESTEASKEPSPTKTPTISPVITAPPSSPVLDTSDIRKEPMNIYNLNAIIRDQIKHLQKAVDRSLQLSRQRAAARELAPMIDKDKEALMEEILKLKSLLSTKREQIATLRAVLKANKQTAEVALANLKNKYENEKAMVTETMTKLRNELKALKEDAATFSSLRAMFATRCDEYVTQLDEMQRQLAAAEDEKKTLNTLLRMAIQQKLALTQRLEDLEFDHEQSRRSKGKLGKSKIGSPKSRPRTSGASYLQNLLRVPPDPTSTESFLLKGPPSMSEFIQGHRLSKEKRLTVAPPDCQQPAASVPPQCSQLAGRQDCPTVSPDTALPEEQPHSSSQCAPLHCLSKPPHP

SEQ ID NO: 842235 - protein, 762 aa, Homo sapiens
MQNELKQSRAVVTNVQAENERLTAVVQDLKENNEMVELQRIRMKDEIREYKFREARLLQDYTELEEENITLQKLVSTLKQNQVEYEGLKHEIKRFEEETVLLNSQLEDAIRLKEIAEHQLEEALETLKNEREQKNNLRKELSQYISLNDNHISISVDGLKFAEDGSEPNNDDKMNGHIHGPLVKLNGDYRTPTLRKGESLNPVSDLFSELNISEIQKLKQQLMQVEREKAILLANLQESQTQLEHTKGALTEQHERVHRLTEHVNAMRGLQSSKELKAELDGEKGRDSGEEAHDYEVDINGLEILECKYRVAVTEVIDLKAEIKALKEKYNKSVENYTDEKAKYESKIQMYDEQVTSLEKTTKESGEKMAHMEKELQKMTSIANENHSTLNTAQDELVTFSEELAQLYHHVCLCNNETPNRVMLDYYRQSRVTRSGSLKGPDDPRGLLSPRLARRGVSSPVETRTSSEPVAKESTEASKEPSPTKTPTISPVITAPPSSPVLDTSDIRKEPMNIYNLNAIIRDQIKHLQKAVDRSLQLSRQRAAARELAPMIDKDKEALMEEILKLKSLLSTKREQIATLRAVLKANKQTAEVALANLKNKYENEKAMVTETMTKLRNELKALKEDAATFSSLRAMFATRCDEYVTQLDEMQRQLAAAEDEKKTLNTLLRMAIQQKLALTQRLEDLEFDHEQSRRSKGKLGKSKIGSPKVSGEASVTVPTIDTYLLHSQGPQTPNIRVSSGTQRKRYACSDLHSTVQWPDFS

SEQ ID NO: 842236 - protein, 718 aa, Homo sapiens
MAAEEVLQTVDHYKTEIERLTKELTETTHEKIQAAEYGLVVLEEKLTLKQQYDELEAEYDSLKQELEQLKEVAFGQSFSIHRKVAEDGETREETLLQESASKEAYYLGKILEMQNELKQSRAVVTNVQAENERLTAVVQDLKENNEMVELQRIRMKDEIREYKFREARLLQDYTELEEENITLQKLVSTLKQNQVEYEGLKHEIKRFEEETVLLNSQLEDAIRLKEIAEHQLEEALETLKNEREQKNNLRKELSQYISLNDNHISISVDGLKFAEDGSEPNNDDKMNGHIHGPLVKLNGDYRTPTLRKGESLNPVSDLFSELNISEIQKLKQQLMQVEREKAILLANLQESQTQLEHTKGALTEQHERVHRLTEHVNAMRGLQSSKELKAELDGEKGRDSGEEAHDYEVDINGLEILECKYRVAVTEVIDLKAEIKALKEKYNKSVENYTDEKAKYESKIQMYDEQVTSLEKTTKESGEKMAHMEKELQKMTSIANENHSTLNTAQDELVTFSEELAQLYHHVCLCNNETPNRVMLDYYRQSRVTRSGSLKGPDDPRGLLSPRLARRGVSSPVETRTSSEPVAKESTEASKEPSPTKTPTISPVITAPPSSPVLDTSDIRKEPMNIYNLNAIIRDQIKHLQKAVDRSLQLSRQRAAARELAPMIDKDKEALMEEILKLKSLLSTKREQIATLRAVLKANKQAQCLLMKSVNAYEAPSI

SEQ ID NO: 842237 - protein, 135 aa, Homo sapiens
MLKIQRRLTHGPCLPEDSASWGCQDRNTITVQRYTCCNPSYENNQKSANPVSYGYLKLLNSGKTLHSQWTNKSTNKTEALGYLSQTINDFVFLFQKKNDKEKGGGPFWGEGVLPTTTTPLCGNRAAGAITWHAAG

SEQ ID NO: 842238 - protein, 114 aa, Homo sapiens
MAAEEVLQTVDHYKTEIERLTKELTETTHEKIQAAEYGLVVLEEKLTLKQQYDELEAEYDSLKQELEQLKEGVACHLSLSWPSLPPPARPTHHDQEVIKEVIERTVFSSRALCW

SEQ ID NO: 842239 - protein, 874 aa, Homo sapiens
MAAEEVLQTVDHYKTEIERLTKELTETTHEKIQAAEYGLVVLEEKLTLKQQYDELEAEYDSLKQELEQLKEVAFGQSFSIHRKVAEDGETREETLLQESASKEAYYLGKILEMQNELKQSRAVVTNVQAENERLTAVVQDLKENNEMVELQRIRMKDEIREYKFREARLLQDYTELEEENITLQKLVSTLKQNQVEYEGLKHEIKRFEEETVLLNSQLEDAIRLKEIAEHQLEEALETLKNEREQKNNLRKELSQYISLNDNHISISVDGLKFAEDGSEPNNDDKMNGHIHGPLVKLNGDYRTPTLRKGESLNPVSDLFSELNISEIQKLKQQLMQVEREKAILLANLQESQTQLEHTKGALTEQHERVHRLTEHVNAMRGLQSSKELKAELDGEKGRDSGEEAHDYEVDINGLEILECKYRVAVTEVIDLKAEIKALKEKYNKSVENYTDEKAKYESKIQMYDEQVTSLEKTTKESGEKMAHMEKELQKMTSIANENHSTLNTAQDELVTFSEELAQLYHHVCLCNNETPNRVMLDYYRQSRVTRSGSLKGPDDPRGLLSPRLARRGVSSPVETRTSSEPVAKESTEASKEPSPTKTPTISPVITAPPSSPVLDTSDIRKEPMNIYNLNAIIRDQIKHLQKAVDRSLQLSRQRAAARELAPMIDKDKEALMEEILKLKSLLSTKREQIATLRAVLKANKQTAEVALANLKNKYENEKAMVTETMTKLRNELKALKEDAATFSSLRAMFATRCDEYVTQLDEMQRQLAAAEDEKKTLNTLLRMAIQQKLALTQRLEDLEFDHEQSRRSKGKLGKSKIGSPKVSGEASVTVPTIDTYLLHSQGPQTPNIRVSSGTQRKRYACSDLHSTVQWPDFS

SEQ ID NO: 842240 - protein, 718 aa, Homo sapiens; identical to SEQ ID NO: 842236

SEQ ID NO: 842241 - protein, 707 aa, Homo sapiens
MAAEEVLQTVDHYKTEIERLTKELTETTHEKIQAAEYGLVVLEEKLTLKQQYDELEAEYDSLKQELEQLKEVAFGQSFSIHRKVAEDGETREETLLQESASKEAYYLGKILEMQNELKQSRAVVTNVQAENERLTAVVQDLKENNEMVELQRIRMKDEIREYKFREARLLQDYTELEEENITLQKLVSTLKQNQVEYEGLKHEIKRFEEETVLLNSQLEDAIRLKEIAEHQLEEALETLKNEREQKNNLRKELSQYISLNDNHISISVDGLKFAEDGSEPNNDDKMNGHIHGPLVKLNGDYRTPTLRKGESLNPVSDLFSELNISEIQKLKQQLMQVEREKAILLANLQESQTQLEHTKGALTEQHERVHRLTEHVNAMRGLQSSKELKAELDGEKGRDSGEEAHDYEVDINGLEILECKYRVAVTEVIDLKAEIKALKEKYNKSVENYTDEKAKYESKIQMYDEQVTSLEKTTKESGEKMAHMEKELQKMTSIANENHSTLNTAQDELVTFSEELAQLYHHVCLCNNETPNRVMLDYYRQSRVTRSGSLKGPDDPRGLLSPRLARRGVSSPVETRTSSEPVAKESTEASKEPSPTKTPTISPVITAPPSSPVLDTSDIRKEPMNIYNLNAIIRDQIKHLQKAVDRSLQLSRQRAAARELAPMIDKDKEALMEEILKLKSLLSTKREQIATLRAVLKANKQVISFYW

SEQ ID NO: 842242 - protein, 154 aa, Homo sapiens
MAAEEVLQTVDHYKTEIERLTKELTETTHEKIQAAEYGLVVLEEKLTLKQQYDELEAEYDSLKQELEQLKEVGPLLEEKIERVHCFLPQEKNCLRNEYISWNLGGNGCLACGGGRLVRVIKSQHSKTTFKWVGMYKSNFSKPLLSQTQVSATIS

SEQ ID NO: 842243 - protein, 828 aa, Homo sapiens
FVTQLACFLANQQNKYKYEECKDLIKSMLRNERQFKEEKLAEQLKQAEELRQYKVLVHSQERELTQLREKLREGRDASRSLNQHLQALLTPDKPDKSQGQDLQEQLAEGCRLAQQLFQKLSPENDEDEDEDVQVEEAEKVLESSAPREVQKAEESKVPEDSLEECAITCSNSHGPCDSNQPHKNINITFEEDKVNSALVVDRESSHDECQDAVNILPVPGPTSSATNVSMVVSAGPLSSEKAEMNILEINEKLHPQLAEKKQQFRNLKEKCFVTQLACFLANQQNKYKNEECKDLIKSMLRNERQFKEEKLAEQLKQAEELRQYKVLVHSQERELTQLREKLREGRDASCSLNQHLQALLTPDEPDKSQGQDLQEQLAEGCRLAQHLVQKLSPENDNDDDEDVQVEVAEKVQKSSAPREMPKAEEKEVPEDSLEECAITCSNSHGPYDSNQPHRKTKITFEEDKVDSTLIGSSSHVEWEDAVHIIPENESDDEEEEEKGPVSPRNLQESEEEEVPQESWDEGYSTLSIPPEMLASYQSYSGTFHSLEEQQVCMAVDIGGHRWDQVKKEDQEATGPRLSRELLDEKGPEVLQDSLDRCYSTPSGYLELTDSCQPYRSAFYILEQQRVGWALDMDEIEKYQEVEEDQDPSCPRLSRELLDEKEPEVLQDSLDRCYSTPSGYLELPDLGQPYRSAVHSLEEQYLGLALDVDRIKKDQEEEEDQGPPCPRLSRELLEAVEPEVLQDSLDRCYSTPSSCLEQPDSCLPYGSSFYALEEKHVGFSLDVGEIEKKGKGKKRRGRRSTKKRRRRGRKEGEEDQNPPCPRLSRCAAG

SEQ ID NO: 842244 - protein, 371 aa, Homo sapiens
GKYLKNTSVFTENDNDDDEDVQVEVAEKVQKSSAPREMPKAEEKEVPEDSLEECAITCSNSHGPYDSNQPHRKTKITFEEDKVDSTLIGSSSHVEWEDAVHIIPENESDDEEEEEKGPVSPRNLQESEEEEVPQESWDEGYSTLSIPPEMLASYQSYSGTFHSLEEQQVCMAVDIGGHRWDQVKKEDQEATGPRLSRELLDEKEPEVLQDSLDRCYSTPSGYLELPDLGQPYRSAVHSLEEQYLGLALDVDRIKKDQEEEEDQGPPCPRLSRELLEAVEPEVLQDSLDRCYSTPSSCLEQPDSCLPYGSSFYALEEKHVGFSLDVGEIEKKGKGKKRRGRRSTKKRRRRGRKEGEEDQNPPCPRLSRCAAG

SEQ ID NO: 842245 - protein, 910 aa, Homo sapiens
VPGSSEVTRLGFATGSCCVPQTPPVSGMTRMRQFGFDPRIPPERKHPRARESWRARAPLHVSISFDRCKITSVSCGCDNRDLFYSNAHVVALSLYRIRHAHQVELRLPISETLSQMNRDQLQKFVQYLISAHHTEVLPTAQRLADEILLLGSEINLVNGAPDPTAGAGIEDANCWHLDEEQIQEQVKQLLSNGGYYGASQQLRSMFSKVREMLRMRDSNGARMLILMTEQFLQDTRLALWRQQGAGMTDKCRQLWDELGALWVCVVLSPHCKPEERAGWLQLLSRWDKLDVCPLEEGNYSFDGPSLQPTMAPAPELLQKGSTCITNTEGWVGHPLDPIGCLCRALLEACRLEEETLTLYPDSGPEKRKVAYQHVPVPGSPGESYLVLALEVALLGLGQQRALPEGLYAQDKVVRNEEQLLALLEEVELDERLVQVLRKQAGLLLEGGPFSGFGEVLFRESVPMHTCARYLFTALLPHDPDLAYRLALRAMRLPILETAFPAGEPHPSPLDSIMSNRFPRWFILGHLETRQCELASTMLTAAKGDPKWLHTVLGSIQQNIHSPALLFKLAQDACKTATPVSAPPDTTLLGIALELGLQVMRMTLNVMTWRRREMVRWLVSCATEIGPQALMNIMQNWYSLFTPVEAATIVAVTGTTHATLLRLQLDTSRREELWACARTLALQCAMKDPQNCALPALTLCEKNHSAFEAAYQIVLDAAAGGLGHAHLFTVARYMEHRGLPLRAYKLATLALAQLSIAFNQDSHPAVNDVLWACSLSHSLGRHELSAIVPLIIRSIHCAPMLSDILRRWTLSAPGLGPLGARRAAKPLGADRAPLCQLLDAAVTAYITTSHSRLTHISPRHYGDFIEFLGKARETFLLAPDGHLQFSQFLENLKQTYKGKKKLMLLVRERFG

SEQ ID NO: 842246 - protein, 685 aa, Homo sapiens
WNDAYLQRILASDSYGPSLTGSVGGDKPTFDPQGRPLWLGEPFPTACARVDTLRAHGYPRQALRLASAIINTLRLQQRHQLESYKQQKKELLQKGSTCITNTEGWVGHPLDPIGCLCRALLEACRLEEETLTLYPDSGPEKRKVAYQHVPVPGSPGESYLVLALEVALLGLGQQRALPEGLYAQDKVVRNEEQLLALLEEVELDERLVQVLRKQAGLLLEGGPFSGFGEVLFRESVPMHTCARYLFTALLPHDPDLAYRLALRAMRLPILETAFPAGEPHPSPLDSIMSNRFPRWFILGHLETRQCELASTMLTAAKGDPKWLHTVLGSIQQNIHSPALLFKLAQDACKTATPVSAPPDTTLLGIALELGLQVMRMTLNVMTWRRREMVRWLVSCATEIGPQALMNIMQNWYSLFTPVEAATIVAVTGTTHATLLRLQLDTSRREELWACARTLALQCAMKDPQNCALPALTLCEKNHSAFEAAYQIVLDAAAGGLGHAHLFTVARYMEHRGLPLRAYKLATLALAQLSIAFNQDSHPAVNDVLWACSLSHSLGRHELSAIVPLIIRSIHCAPMLSDILRRWTLSAPGLGPLGARRAAKPLGADRAPLCQLLDAAVTAYITTSHSRLTHISPRHYGDFIEFLGKARETFLLAPDGHLQFSQFLENLKQTYKGKKKLMLLVRERFG

SEQ ID NO: 842247 - protein, 910 aa, Homo sapiens; identical to SEQ ID NO: 842245

SEQ ID NO: 842248 - protein, 146 aa, Homo sapiens
MGASLCCPGWSRTLGLKRSSLLSFPKRWDYINPRLLTHWPFLQVEERFSRVPEPVQKRIVFWSFPRSEREICMYSSLGYPPPEGEHDARVPFTRGLHLLQSGAVDRVLQVGESLSPTPAGEARRSIPGLEMGELEGGLGPGDGRLQ

SEQ ID NO: 842249 - protein, 990 aa, Homo sapiens
MEPPAAKRSRGCPAGPEERDAGAGAARGRGRPEALLDLSAKRVAESWAFEQVEERFSRVPEPVQKRIVFWSFPRSEREICMYSSLGYPPPEGEHDARVPFTRGLHLLQSGAVDRVLQVGFHLSGNIREPGSPGEPERLYHVSISFDRCKITSVSCGCDNRDLFYSNAHVVALSLYRIRHAHQVELRLPISETLSQMNRDQLQKFVQYLISAHHTEVLPTAQRLADEILLLGSEINLVNGAPDPTAGAGIEDANCWHLDEEQIQEQVKQLLSNGGYYGASQQLRSMFSKVREMLRMRDSNGARMLILMTEQFLQDTRLALWRQQGAGMTDKCRQLWDELGALWVCVVLSPHCKPEERAGWLQLLSRWDKLDVCPLEEGNYSFDGPSLQPTMAPAPELLQKGSTCITNTEGWVGHPLDPIGCLCRALLEACRLEEETLTLYPDSGPEKRKVAYQHVPVPGSPGESYLVLALEVALLGLGQQRALPEGLYAQDKVVRNEEQLLALLEEVELDERLVQVLRKQAGLLLEGGPFSGFGEVLFRESVPMHTCARYLFTALLPHDPDLAYRLALRAMRLPILETAFPAGEPHPSPLDSIMSNRFPRWFILGHLETRQCELASTMLTAAKGDPKWLHTVLGSIQQNIHSPALLFKLAQDACKTATPVSAPPDTTLLGIALELGLQVMRMTLNVMTWRRREMVRWLVSCATEIGPQALMNIMQNWYSLFTPVEAATIVAVTGTTHATLLRLQLDTSRREELWACARTLALQCAMKDPQNCALPALTLCEKNHSAFEAAYQIVLDAAAGGLGHAHLFTVARYMEHRGLPLRAYKLATLALAQLSIAFNQDSHPAVNDVLWACSLSHSLGRHELSAIVPLIIRSIHCAPMLSDILRRWTLSAPGLGPLGARRAAKPLGADRAPLCQLLDAAVTAYITTSHSRLTHISPRHYGDFIEFLGKARETFLLAPDGHLQFSQFLENLKQTYKGKKKLMLLVRERFG

SEQ ID NO: 842250 - protein, 601 aa, Homo sapiens
MAPAPELLQKGSTCITNTEGWVGHPLDPIGCLCRALLEACRLEEETLTLYPDSGPEKRKVAYQHVPVPGSPGESYLVLALEVALLGLGQQRALPEGLYAQDKVVRNEEQLLALLEEVELDERLVQVLRKQAGLLLEGGPFSGFGEVLFRESVPMHTCARYLFTALLPHDPDLAYRLALRAMRLPILETAFPAGEPHPSPLDSIMSNRFPRWFILGHLETRQCELASTMLTAAKGDPKWLHTVLGSIQQNIHSPALLFKLAQDACKTATPVSAPPDTTLLGIALELGLQVMRMTLNVMTWRRREMVRWLVSCATEIGPQALMNIMQNWYSLFTPVEAATIVAVTGTTHATLLRLQLDTSRREELWACARTLALQCAMKDPQNCALPALTLCEKNHSAFEAAYQIVLDAAAGGLGHAHLFTVARYMEHRGLPLRAYKLATLALAQLSIAFNQDSHPAVNDVLWACSLSHSLGRHELSAIVPLIIRSIHCAPMLSDILRRWTLSAPGLGPLGARRAAKPLGADRAPLCQLLDAAVTAYITTSHSRLTHISPRHYGDFIEFLGKARETFLLAPDGHLQFSQFLENLKQTYKGKKKLMLLVRERFG

SEQ ID NO: 842251 - protein, 604 aa, Homo sapiens
VPGSSEVTRLGFATGSCCVPQTPPVSGMTRMRQFGFDPRIPPERKHPRARESWRARAPLHVSISFDRCKITSVSCGCDNRDLFYSNAHVVALSLYRIRHAHQVELRLPISETLSQMNRDQLQKFVQYLISAHHTEVLPTAQRLADEILLLGSEINLVNGAPDPTAGAGIEDANCWHLDEEQIQEQVKQLLSNGGYYGASQQLRSMFSKVREMLRMRDSNGARMLILMTEQFLQDTRLALWRQQGAGMTDKCRQLWDELGALWVCVVLSPHCKPEERAGWLQLLSRWDKLDVCPLEEGNYSFDGPSLQPTMAPAPELLQKGSTCITNTEGWVGHPLDPIGCLCRALLEACRLEEETLTLYPDSGPEKRKVAYQHVPVPGSPGESYLVLALEVALLGLGQQRALPEGLYAQDKVVRNEEQLLALLEEVELDERLVQVLRKQAGLLLEGGPFSGFGEVLFRESVPMHTCARYLFTALLPHDPDLAYRLALRAMRLPILETAFPAGEPHPSPLDSIMSNRFPRWFILGHLETRQCELASTMLTAAKGDPKWLHTVLGSIQQNIHSPALLFKLAQDACKTATPVSAPPDTTLLGIALELGLQVMRLTLD

SEQ ID NO: 842252 - protein, 314 aa, Homo sapiens [sequence omitted]

SEQ ID NO: 842253 - protein, 224 aa, Homo sapiens
MTLTLPGKPWRTEQTEDLKRVLRAVDRAIPLVLVSGNHDIGNTPTAETVEEFCRTWGDDYFSFWVGGVLFLVLNSQFYENPSKCPSLKQAQDQWLDEQLSIARQRHCQHAIVFQHIPLFLESIDEDDDYYFNLSKSTRKKLADKFIHAGVRVVFSGHYHRNAGGTYQNLDMVVSSAIGCQLGRDPHGLRVVVVTAEKIVHRYYSLDELSEKGIEDDLMDLIKKK

SEQ ID NO: 842254 - protein, 314 aa, Homo sapiens [sequence omitted]

SEQ ID NO: 842255 - protein, 187 aa, Homo sapiens
MSAAEAGGVFHRARGRTLAAFPAEKESEWKGPFYFILGADPQFGLIKAWSTGDCDNGGDEWEQEIRLTEQAVQAINKLNPKPKFFVLCGDLIHAMPGKPWRTEQTEDLKRVLRAVDRGRTVHCRAGEGRTGTIVVIDAMLDHEALQNRKVGRVQADVSRIRAQQVQMVQTDMQMSSYTKRFMEHDLY

SEQ ID NO: 842256 - protein, 314 aa, Homo sapiens [sequence omitted]

SEQ ID NO: 842257 - protein, 226 aa, Homo sapiens
MDVTLTLPGKPWRTEQTEDLKRVLRAVDRAIPLVLVSGNHDIGNTPTAETVEEFCRTWGDDYFSFWVGGVLFLVLNSQFYENPSKCPSLKQAQDQWLDEQLSIARQRHCQHAIVFQHIPLFLESIDEDDDYYFNLSKSTRKKLADKFIHAGVRVVFSGHYHRNAGGTYQNLDMVVSSAIGCQLGRDPHGLRVVVVTAEKIVHRYYSLDELSEKGIEDDLMDLIKKK

SEQ ID NO: 842258 - protein, 172 aa, Homo sapiens [sequence omitted]

SEQ ID NO: 842259 - protein, 253 aa, Homo sapiens
MSAAEAGGVFHRARGRTLAAFPAEKESEWKGPFYFILGADPQFGLIKAWSTGDCDNGGDEWEQEIRLTEQAVQAINKLNPKPKFFVLCGDLIHAMPGKPWRTEQTEDLKRVLRAVDRAIPLVLVSGNHDIGNTPTAETVEEFCRTWGDDYFSFWVGGVLFLVLNSQFYENPSKCPSLKQAQDQWLDEQLSIARQRHCQHAIVFQHIPLFLESIDEDDDYYFNLSKSTRKKLADKFIHAGVDIAEVEVVVVATQ

SEQ ID NO: 842260 - protein, 112 aa, Homo sapiens [sequence omitted]

SEQ ID NO: 842261 - protein, 223 aa, Homo sapiens
MITVNPDGKIMVRRCLVTLRPFRLFVLGIGFFTLCFLMTSLGGQFSARRLGDSPFTIRTEVMGGPESRGVLRKMSDLLELMVKRMDALARLENSSELHRAGGDLHFPADRMPPGAGLMERIQAIAQNVSDIAVKVDQILRHSLLLHSKVSEGRRDQCEAPSDPKFPDCSGKVEWMRARWTSDPCYAFFGVDGTECSFLIYLSEVEWFCPPLPWRNQTAAQRAP

SEQ ID NO: 842262 - protein, 48 aa, Homo sapiens
MGSLGLHEKTPQCAGSSFRLLPVSSRPRNMDPEVVQVRMTMGRIRGRG

SEQ ID NO: 842263 - protein, 207 aa, Homo sapiens
AIQQAEDGLKEFDAGIIELKRRGDKLQVEQPSMQELSKLQDMYDELMMIIGSRRSGLNQNLTLKSQYERALQDLADLLETGQEKMAGDQKIIVSSKEEIQQLLDKHKEYFQGLESHMILTETLFRKIISFAVQKETQFHTELMAQASAVLKRAHKRGVELEYILETWSHLDEDQQELSRQLEVVESSIPSVGLVEENEDRLIDRITL

SEQ ID NO: 842264 - protein, 65 aa, Homo sapiens
VKYAGVCDVGVRVCVQMHEWLSLHECYEKMCVRDHVRVSVHTCVCKCVGVKKCRRLGAHESLTVC

SEQ ID NO: 842265 - protein, 227 aa, Homo sapiens
LSVPAAARPAGVGPEHAAEPGPSLGRSAPAMASLLPLLCLCVVAAHLAGARDATPTEEPMATALGLERRSVYTGQPSPALEDWEEASEWTSWFNVDHPGGDGDFESLAAIRFYYGPARVCPRPLALEARTTDWALPSAVGERVHLNPTRGFWCLNREQPRGRRCSNYHVRFRCPLEASWGAWGPWGPCSGSCGPGRRLRRRHCPSPAGDACPGRPLEAQKCVRPRCP

SEQ ID NO: 842266 - protein, 88 aa, Homo sapiens
MIAGTGMLSRVALRTGALSHQILDRASSDRGAGYDYMAPGHATHPAVPMALGGGYHASPSGGGKALSESAGIPGMSYGEALKEGVAWP

SEQ ID NO: 842267 - protein, 289 aa, Homo sapiens
MRVKDPTKALPEKAKRSKRPTVPHDEDSSDDIAVGLTCQHVSHAISVNHVKRAIAENLWSVCSECLKERRFYDGQLVLTSDIWLCLKCGFQGCGKNSESQHSLKHFKSSRTEPHCIIINLSTWIIWCYECDEKLSTHCNKKVLAQIVDFLQKHASKTQTSAFSRIMKLCEEKCETDEIQKGGKCRNLSVRGITNLGNTCFFNAVMQNLAQTYTLTDLMNEIKESSTKLKIFPSSDSQLDPLVVELSRPGPLTSALFLFLHSMKETEKGPLSPKVLFNQLCQKWVHLHLI

SEQ ID NO: 842268 - protein, 345 aa, Homo sapiens
MRVKDPTKALPEKAKRSKRPTVPHDEDSSDDIAVGLTCQHVSHAISVNHVKRAIAENLWSVCSECLKERRFYDGQLVLTSDIWLCLKCGFQGCGKNSESQHSLKHFKSSRTEPHCIIINLSTWIIWCYECDEKLSTHCNKKVLAQIVDFLQKHASKTQTSAFSRIMKLCEEKCETDEIQKGGKCRNLSVRGITNLGNTCFFNAVMQNLAQTYTLTDLMNEIKESSTKLKIFPSSDSQLDPLVVELSRPGPLTSALFLFLHSMKETEKGPLSPKVLFNQLCQKAPRFKDFQQQDSQELLHYLLDAVRTEETKRIQASILKAFNNPTTKTADDETRKKVKDVTRQNV

SEQ ID NO: 842269 - protein, 182 aa, Homo sapiens
MRVKDPTKALPEKAKRSKRPTVPHDEDSSDDIAVGLTCQHVSHAISVNHVKRAIAENLWSVCSECLKERRFYDGQLVLTSDIWLCLKCGFQGCGKNSESQHSLKHFKSSRTEPHCIIINLSTWIIWCYECDEKLSTHCNKKVLAQIVDFLQKHASKTQTRPGPILIHLFSINCLGAHSESVC

SEQ ID NO: 842270 - protein, 289 aa, Homo sapiens; identical to SEQ ID NO: 842267

SEQ ID NO: 842271 - protein, 32 aa, Homo sapiens
WNSPESFIMDQLLFTLGYQYPRWWERLEGSFR

SEQ ID NO: 842272 - protein, 184 aa, Homo sapiens
APPSVRGGREGASRSRSELPTRVLPAEGWWWERSGSGGAEPGRGPCGGRAAAGPADGGMGCTVSAEDKAAAERSKMIDKNLREDGEKAAREVKLLLLGAGESGKSTIVKQMKIIHEDGYSEEECRQYRAVVYSNTIQSIMAIVKAMGNLQIDFADPSRAVCALRPTLSHLPKGFGVAGCGGSCL

SEQ ID NO: 842273 - protein, 413 aa, Homo sapiens
APPSVRGGREGASRSRSELPTRVLPAEGWWWERSGSGGAEPGRGPCGGRAAAGPADGGMGCTVSAEDKAAAERSKMIDKNLREDGEKAAREVKLLLLGAGESGKSTIVKQMKIIHEDGYSEEECRQYRAVVYSNTIQSIMAIVKAMGNLQIDFADPSRADDARQLFALSCTAEEQGVLPDDLSGVIRRLWADHGVQACFGRSREYQLNDSAAYYLNDLERIAQSDYIPTQQDVLRTRVKTTGIVETHFTFKDLHFKMFDVGGQRSERKKWIHCFEGVTAIIFCVALSAYDLVLAEDEEMNRMHESMKLFDSICNNKWFTDTSIILFLNKKDLFEEKITHSPLTICFPEYTGANKYDEAASYIQSKFEDLNKRKDTKEIYTHFTCATDTKNVQFVFDAVTDVIIKNNLKDCGLF

SEQ ID NO: 842274 - protein, 413 aa, Homo sapiens; identical to SEQ ID NO: 842273

SEQ ID NO: 842275 - protein, 413 aa, Homo sapiens; identical to SEQ ID NO: 842273

SEQ ID NO: 842276 - protein, 413 aa, Homo sapiens; identical to SEQ ID NO: 842273

SEQ ID NO: 842277 - protein, 413 aa, Homo sapiens; identical to SEQ ID NO: 842273

SEQ ID NO: 842278 - protein, 413 aa, Homo sapiens; identical to SEQ ID NO: 842273

SEQ ID NO: 842279 - protein, 413 aa, Homo sapiens; identical to SEQ ID NO: 842273

SEQ ID NO: 842280 - protein, 413 aa, Homo sapiens; identical to SEQ ID NO: 842273

SEQ ID NO: 842281 - protein, 339 aa, Homo sapiens
MTEGVKTLGWTKQKGGCHWGRSEGAGESGKSTIVKQMKIIHEDGYSEEECRQYRAVVYSNTIQSIMAIVKAMGNLQIDFADPSRADDARQLFALSCTAEEQGVLPDDLSGVIRRLWADHGVQACFGRSREYQLNDSAAYYLNDLERIAQSDYIPTQQDVLRTRVKTTGIVETHFTFKDLHFKMFDVGGQRSERKKWIHCFEGVTAIIFCVALSAYDLVLAEDEEMNRMHESMKLFDSICNNKWFTDTSIILFLNKKDLFEEKITHSPLTICFPEYTGANKYDEAASYIQSKFEDLNKRKDTKEIYTHFTCATDTKNVQFVFDAVTDVIIKNNLKDCGLF

SEQ ID NO: 842282 - protein, 303 aa, Homo sapiens
MKIIHEDGYSEEECRQYRAVVYSNTIQSIMAIVKAMGNLQIDFADPSRADDARQLFALSCTAEEQGVLPDDLSGVIRRLWADHGVQACFGRSREYQLNDSAAYYLNDLERIAQSDYIPTQQDVLRTRVKTTGIVETHFTFKDLHFKMFDVGGQRSERKKWIHCFEGVTAIIFCVALSAYDLVLAEDEEMNRMHESMKLFDSICNNKWFTDTSIILFLNKKDLFEEKITHSPLTICFPEYTGANKYDEAASYIQSKFEDLNKRKDTKEIYTHFTCATDTKNVQFVFDAVTDVIIKNNLKDCGLF

SEQ ID NO: 842283 - protein, 413 aa, Homo sapiens; identical to SEQ ID NO: 842273

SEQ ID NO: 842284 - protein, 308 aa, Homo sapiens
SWSLAIRIIHEDGYSEEECRQYRAVVYSNTIQSIMAIVKAMGNLQIDFADPSRADDARQLFALSCTAEEQGVLPDDLSGVIRRLWADHGVQACFGRSREYQLNDSAAYYLNDLERIAQSDYIPTQQDVLRTRVKTTGIVETHFTFKDLHFKMFDVGGQRSERKKWIHCFEGVTAIIFCVALSAYDLVLAEDEEMNRMHESMKLFDSICNNKWFTDTSIILFLNKKDLFEEKITHSPLTICFPEYTGANKYDEAASYIQSKFEDLNKRKDTKEIYTHFTCATDTKNVQFVFDAVTDVIIKNNLKDCGLF

SEQ ID NO: 842285 - protein, 434 aa, Homo sapiens
APPSVRGGREGASRSRSELPTRVLPAEGWWWERSGSGGAEPGRGPCGGRAAAGPADGGMGCTVSAEDKAAAERSKMIDKNLREDGEKAAREVKLLLLAGESGKMHHRQSRLRSIPQDCVISRERDSPGAIRAGCSYYKTTSHIASLIDLISLYDTMDGSIALLDLTFSPITFQKLDRRPWDDARQLFALSCTAEEQGVLPDDLSGVIRRLWADHGVQACFGRSREYQLNDSAAYYLNDLERIAQSDYIPTQQDVLRTRVKTTGIVETHFTFKDLHFKMFDVGGQRSERKKWIHCFEGVTAIIFCVALSAYDLVLAEDEEMNRMHESMKLFDSICNNKWFTDTSIILFLNKKDLFEEKITHSPLTICFPEYTGANKYDEAASYIQSKFEDLNKRKDTKEIYTHFTCATDTKNVQFVFDAVTDVIIKNNLKDCGLF

SEQ ID NO: 842286 - protein, 273 aa, Homo sapiens
RAAGIRHQLQIVFADPSRADDARQLFALSCTAEEQGVLPDDLSGVIRRLWADHGVQACFGRSREYQLNDSAAYYLNDLERIAQSDYIPTQQDVLRTRVKTTGIVETHFTFKDLHFKMFDVGGQRSERKKWIHCFEGVTAIIFCVALSAYDLVLAEDEEMNRMHESMKLFDSICNNKWFTDTSIILFLNKKDLFEEKITHSPLTICFPEYTGANKYDEAASYIQSKFEDLNKRKDTKEIYTHFTCATDTKNVQFVFDAVTDVIIKNNLKDCGLF

SEQ ID NO: 842287 - protein, 243 aa, Homo sapiens
MATPRRNAGSTGRLSTATPSSPSWPLSKPWATCRSTLPTPPERYLNDLERIAQSDYIPTQQDVLRTRVKTTGIVETHFTFKDLHFKMFDVGGQRSERKKWIHCFEGVTAIIFCVALSAYDLVLAEDEEMNRMHESMKLFDSICNNKWFTDTSIILFLNKKDLFEEKITHSPLTICFPEYTGANKYDEAASYIQSKFEDLNKRKDTKEIYTHFTCATDTKNVQFVFDAVTDVIIKNNLKDCGLF

SEQ ID NO: 842288 - protein, 413 aa, Homo sapiens; identical to SEQ ID NO: 842273

SEQ ID NO: 842289 - protein, 192 aa, Homo sapiens
RGSQALVSTQDVLRTRVKTTGIVETHFTFKDLHFKMFDVGGQRSERKKWIHCFEGVTAIIFCVALSAYDLVLAEDEEMNRMHESMKLFDSICNNKWFTDTSIILFLNKKDLFEEKITHSPLTICFPEYTGANKYDEAASYIQSKFEDLNKRKDTKEIYTHFTCATDTKNVQFVFDAVTDVIIKNNLKDCGLF

SEQ ID NO: 842290 - protein, 385 aa, Homo sapiens
APPSVRGGREGASRSRSELPTRVLPAEGWWWERSGSGGAEPGRGPCGGRAAAGPADGGMGCTVSAEDKAAAERSKMIDKNLREDGEKAAREVKLLLLGAGESGKSTIVKQMKIIHEDGYSEEECRQYRAVVYSNTIQSIMAIVKAMGNLQIDFADPSRADDARQLFALSCTAEEQGVLPDDLSGVIRRLWADHGVQACFGRSREYQLNDSAAYYLNDLERIAQSDYIPTQQDVLRTRVKTTGIVETHFTFKDLHFKMFDVGGQRSERKKWIHCFEGVTAIIFCVALSAYDLVLAEDEEMNRMHESMKLFDSICNNKWFTDTSIILFLNKKDLFEEKITRPSAGRPRASGTPALPSTELGSKGCSRQLPTSLRALPQRPWPQALLT

SEQ ID NO: 842291 - protein, 358 aa, Homo sapiens
APPSVRGGREGASRSRSELPTRVLPAEGWWWERSGSGGAEPGRGPCGGRAAAGPADGGMGCTVSAEDKAAAERSKMIDKNLREDGEKAAREVKLLLLGAGESGKSTIVKQMKIIHEDGYSEEECRQYRAVVYSNTIQSIMAIVKAMGNLQIDFADPSRADDARQLFALSCTAEEQGVLPDDLSGVIRRLWADHGVQACFGRSREYQLNDSAAYYLNDLERIAQSDYIPTQQDVLRTRVKTTGIVETHFTFKDLHFKMFDVGGQRSERKKWIHCFEGVTAIIFCVALSAYDLVLAEDEEMNRMHESMKLFDSICNNKWFTDTSIILFLNKKDLFEEKITLRWVRWTCAAVQPAPHPSLT

SEQ ID NO: 842292 - protein, 182 aa, Homo sapiens
APPSVRGGREGASRSRSELPTRVLPAEGWWWERSGSGGAEPGRGPCGGRAAAGPADGGMGCTVSAEDKNRMHESMKLFDSICNNKWFTDTSIILFLNKKDLFEEKITHSPLTICFPEYTGANKYDEAASYIQSKFEDLNKRKDTKEIYTHFTCATDTKNVQFVFDAVTDVIIKNNLKDCGLF

SEQ ID NO: 842293 - protein, 121 aa, Homo sapiens
MEEVIQAGLAQWSRQKGLALPWDRTRGHPDVPWRNLTSSPTRPLAQPAGSCMPAEPSPAAHYHQLHVHLQLLPSDLSERPGLRLAPLALVEVGMTLPVPQTPLPHVTQQQKLAPGRQLCPW

SEQ ID NO: 842294 - protein, 104 aa, Homo sapiens
MLVMAMVPPSGHLFWFLTIVLFCDEGRGAHAESPKAASGGAPASPAWTPSFAQHQPLPQPKSKCLQGASCPVPQPQPLGGPKGKSTRSVRRHHSWKPQSTCSFS

SEQ ID NO: 842295 - protein, 148 aa, Homo sapiens
APPSVRGGREGASRSRSELPTRVLPAEGWWWERSGSGGAEPGRGPCGGRAAAGPADGGMGCTVSAEDKAAAERSKMIDKNLREDGEKAAREVKLLLLAAPAQVQMFTGSLLPSPPTPAARRPQRKKHKKRETPPFLETTVHLLILVAF

SEQ ID NO: 842296 - protein, 232 aa, Homo sapiens
APPSVRGGREGASRSRSELPTRVLPAEGWWWERSGSGGAEPGRGPCGGRAAAGPADGGMGCTVSAEDKAAAERSKMIDKNLREDGEKAAREVKLLLLGAGESGKSTIVKQMKIIHEDGYSEEECRQYRAVVYSNTIQSIMAIVKAMGNLQIDFADPSRADDARQLFALSCTAEEQGVLPDDLSGVIRRLWADHGVQACFGRSREYQLNDSAAYYLNDLERIAQSDYIPTQWL

SEQ ID NO: 842297 - protein, 159 aa, Homo sapiens
APPSVRGGREGASRSRSELPTRVLPAEGWWWERSGSGGAEPGRGPCGGRAAAGPADGGMGCTVSAEDKAAAERSKMIDKNLREDGEKAAREVKLLLLGAGESGKSTIVKQMKIIHEDGYSEEECRQYRAVVYSNSPGGGQHSTAEVSLHVIKAAFDTND

SEQ ID NO: 842298 - protein, 115 aa, Homo sapiens
APPSVRGGREGASRSRSELPTRVLPAEGWWWERSGSGGAEPGRGPCGGRAAAGPADGGMGCTVSAEDKAAAERSKMIDKNLREDGEKAAREVKLLLLAGESGKSTCSFSSFLRNG

SEQ ID NO: 842299 - protein, 88 aa, Homo sapiens
NSFSSRHRGSSGTAFSGLCRSLEGWRAGRQAVLGELQQDVTRRAKRPREGGPGTLRSKEAAGARPEGPAPAALAPGSINLKCSSLALT

SEQ ID NO: 842300 - protein, 413 aa, Homo sapiens; identical to SEQ ID NO: 842273

SEQ ID NO: 842301 - protein, 413 aa, Homo sapiens; identical to SEQ ID NO: 842273

SEQ ID NO: 842302 - protein, 355 aa, Homo sapiens
MGCTVSAEDKAAAERSKMIDKNLREDGEKAAREVKLLLLGAGESGKSTIVKQMKIIHEDGYSEEECRQYRAVVYSNTIQSIMAIVKAMGNLQIDFADPSRADDARQLFALSCTAEEQGVLPDDLSGVIRRLWADHGVQACFGRSREYQLNDSAAYYLNDLERIAQSDYIPTQQDVLRTRVKTTGIVETHFTFKDLHFKMFDVGGQRSERKKWIHCFEGVTAIIFCVALSAYDLVLAEDEEMNRMHESMKLFDSICNNKWFTDTSIILFLNKKDLFEEKITHSPLTICFPEYTGANKYDEAASYIQSKFEDLNKRKDTKEIYTHFTCATDTKNVQFVFDAVTDVIIKNNLKDCGLF

SEQ ID NO: 842303 - protein, 338 aa, Homo sapiens
MIDKNLREDGEKAAREVKLLLLGAGESGKSTIVKQMKIIHEDGYSEEECRQYRAVVYSNTIQSIMAIVKAMGNLQIDFADPSRADDARQLFALSCTAEEQGVLPDDLSGVIRRLWADHGVQACFGRSREYQLNDSAAYYLNDLERIAQSDYIPTQQDVLRTRVKTTGIVETHFTFKDLHFKMFDVGGQRSERKKWIHCFEGVTAIIFCVALSAYDLVLAEDEEMNRMHESMKLFDSICNNKWFTDTSIILFLNKKDLFEEKITHSPLTICFPEYTGANKYDEAASYIQSKFEDLNKRKDTKEIYTHFTCATDTKNVQFVFDAVTDVIIKNNLKDCGLF

SEQ ID NO: 842304 - protein, 344 aa, Homo sapiens
RNRRGGADIVVVVRNRRGRVVVVKLLLLGAGESGKSTIVKQMKIIHEDGYSEEECRQYRAVVYSNTIQSIMAIVKAMGNLQIDFADPSRADDARQLFALSCTAEEQGVLPDDLSGVIRRLWADHGVQACFGRSREYQLNDSAAYYLNDLERIAQSDYIPTQQDVLRTRVKTTGIVETHFTFKDLHFKMFDVGGQRSERKKWIHCFEGVTAIIFCVALSAYDLVLAEDEEMNRMHESMKLFDSICNNKWFTDTSIILFLNKKDLFEEKITHSPLTICFPEYTGANKYDEAASYIQSKFEDLNKRKDTKEIYTHFTCATDTKNVQFVFDAVTDVIIKNNLKDCGLF

SEQ ID NO: 842305 - protein, 339 aa, Homo sapiens
MEYAGHLPASSAQGTILACTSCTGAGESGKSTIVKQMKIIHEDGYSEEECRQYRAVVYSNTIQSIMAIVKAMGNLQIDFADPSRADDARQLFALSCTAEEQGVLPDDLSGVIRRLWADHGVQACFGRSREYQLNDSAAYYLNDLERIAQSDYIPTQQDVLRTRVKTTGIVETHFTFKDLHFKMFDVGGQRSERKKWIHCFEGVTAIIFCVALSAYDLVLAEDEEMNRMHESMKLFDSICNNKWFTDTSIILFLNKKDLFEEKITHSPLTICFPEYTGANKYDEAASYIQSKFEDLNKRKDTKEIYTHFTCATDTKNVQFVFDAVTDVIIKNNLKDCGLF

SEQ ID NO: 842306 - protein, 303 aa, Homo sapiens; identical to SEQ ID NO: 842282

SEQ ID NO: 842307 - protein, 316 aa, Homo sapiens
VRRPRGSPTIVKQMKIIHEDGYSEEECRQYRAVVYSNTIQSIMAIVKAMGNLQIDFADPSRADDARQLFALSCTAEEQGVLPDDLSGVIRRLWADHGVQACFGRSREYQLNDSAAYYLNDLERIAQSDYIPTQQDVLRTRVKTTGIVETHFTFKDLHFKMFDVGGQRSERKKWIHCFEGVTAIIFCVALSAYDLVLAEDEEMNRMHESMKLFDSICNNKWFTDTSIILFLNKKDLFEEKITHSPLTICFPEYTGANKYDEAASYIQSKFEDLNKRKDTKEIYTHFTCATDTKNVQFVFDAVTDVIIKNNLKDCGLF

SEQ ID NO: 842308 - protein, 413 aa, Homo sapiens; identical to SEQ ID NO: 842273

SEQ ID NO: 842309 - protein, 413 aa, Homo sapiens; identical to SEQ ID NO: 842273

SEQ ID NO: 842310 - protein, 218 aa, Homo sapiens
MTLEECGLSNQLNDSAAYYLNDLERIAQSDYIPTQQDVLRTRVKTTGIVETHFTFKDLHFKMFDVGGQRSERKKWIHCFEGVTAIIFCVALSAYDLVLAEDEEMNRMHESMKLFDSICNNKWFTDTSIILFLNKKDLFEEKITHSPLTICFPEYTGANKYDEAASYIQSKFEDLNKRKDTKEIYTHFTCATDTKNVQFVFDAVTDVIIKNNLKDCGLF

SEQ ID NO: 842311 - protein, 374 aa, Homo sapiens
  misc_feature (374)..(374): Xaa can be any naturally occurring amino acid
APPSVRGGREGASRSRSELPTRVLPAEGWWWERSGSGGAEPGRGPCGGRAAAGPADGGMGCTVSAEDKAAAERSKMIDKNLREDGEKAAREVKLLLLGAGESGKSTIVKQMKIIHEDGYSEEECRQYRAVVYSNTIQSIMAIVKAMGNLQIDFADPSRADDARQLFALSCTAEEQGVLPDDLSGVIRRLWADHGVQACFGRSREYQLNDSAAYYLNDLERIAQSDYIPTQQDVLRTRVKTTGIVETHFTFKDLHFKMFDVGGQRSERKKWIHCFEGVTAIIFCVALSAYDLVLAEDEEMNRMHESMKLFDSICNNKWFTDTSIILFLNKKDLFEEKITHSPLTICFPEYTGANKYDEAASYIQSMVGLVRGSSX

SEQ ID NO: 842312 - protein, 344 aa, Homo sapiens
APPSVRGGREGASRSRSELPTRVLPAEGWWWERSGSGGAEPGRGPCGGRAAAGPADGGMGCTVSAEDKAAAERSKMIDKNLREDGEKAAREVKLLLLGAGESGKSTIVKQMKIIHEDGYSEEECRQYRAVVYSNTIQSIMAIVKAMGNLQIDFADPSRADDARQLFALSCTAEEQGVLPDDLSGVIRRLWADHGVQACFGRSREYQLNDSAAYYLNDLERIAQSDYIPTQQDVLRTRVKTTGIVETHFTFKDLHFKMFDVGGQRSERKKWIHCFEGVTAIIFCVALSAYDLVLAEDEEMNRMHESMKLFDSICNNKWFTDTSIILFLNKKDLFEEKITRSTGIL

SEQ ID NO: 842313 - protein, 146 aa, Homo sapiens
CRPPTQIKGSTRHLFWGAQVIRDLARQVPVSCPDELKFSVSFSRFGNLRSAKARLLIFYLVCLRLECIKSAPLPRDKQACMYLGANKYDEAASYIQSKFEDLNKRKDTKEIYTHFTCATDTKNVQFVFDAVTDVIIKNNLKDCGLF

SEQ ID NO: 842314 - protein, 104 aa, Homo sapiens; identical to SEQ ID NO: 842294

SEQ ID NO: 842315 - protein, 117 aa, Homo sapiens
MRLNGIMKDSQSEMLVMAMVPPSGHLFWFLTIVLFCDEGRGAHAESPKAASGGAPASPAWTPSFAQHQPLPQPKSKCLQGASCPVPQPQPLGGPKGKSTRSVRRHHSWKPQSTCSFS

SEQ ID NO: 842316 - protein, 266 aa, Homo sapiens
APPSVRGGREGASRSRSELPTRVLPAEGWWWERSGSGGAEPGRGPCGGRAAAGPADGGMGCTVSAEDKAAAERSKMIDKNLREDGEKAAREVKLLLLGAGESGKSTIVKQMKIIHEDGYSEEECRQYRAVVYSNTIQSIMAIVKAMGNLQIDFADPSRADDARQLFALSCTAEEQGVLPDDLSGVIRRLWADHGVQACFGRSREYQLNDSAAYCTMVLLPDSPAPNSSNFTSRAAFSPSSRSFLSIIFSALGQSPVRSALTSSNRF

SEQ ID NO: 842317 - protein, 158 aa, Homo sapiens
APPSVRGGREGASRSRSELPTRVLPAEGWWWERSGSGGAEPGRGPCGGRAAAGPADGGMGCTVSAEDKAAAERSKMIDKNLREDGEKAAREVKLLLLGVRPRPALGSLIPSSNPQTRTLTSQTRASNSQTRAVWDPTPGPGPGLKTLDWTRPLILPRL

SEQ ID NO: 842318 - protein, 34 aa, Homo sapiens
MLTHTHTHTFIFPKFILTPILTPKDPNSPDPIPD

SEQ ID NO: 842319 - protein, 97 aa, Homo sapiens
LWASYVCRLHTPVGFIHLRAAYTCRLHTPVGFIHLWASYVCRLHTPVGFIHLRAAYTCGLHAPVDCMHLWTAYTCGLHTPVGCIHLWTACLLVEGFY

SEQ ID NO: 842320 - protein, 246 aa, Homo sapiens
LGGTWTAVLELSRLPVDCCQLPVASRFSESWQRLFHRVLLEAEPKSGCDSGDGVEHPAGQARTAPATQHRRIRPCLCGERLERKSPAWEPSEQPCRTGWGLLYDRPLRPENCWEAVARGGTQMLEEGVLPSPGPALPQEENTGEEGMAAGLLTAGPRGSTFFSSVTVAFAQERWRCLVSTPRDRFKEGIPGKSRSLVLLGLPVSQPGMNSQLEQREGAWMLEGEDLRSPSPGWKIISGITTRAKPF

SEQ ID NO: 842321 - protein, 98 aa, Homo sapiens
MEAQELNKKETLNDRIQDPIIWSPACKRKEQEPNKDRNNSQKKSRLVFTDLQRRTLFAIFKENKRPSKEMQITISQQLGLELTTVSNFFMNARRRSLE

SEQ ID NO: 842322 - protein, 258 aa, Homo sapiens
MAANVGSMFQYWKRFDLQQLQRELDATATVLANRQDESEQSRKRLIEQSREFKKNTPEDLRKQVAPLLKSFQGEIDALSKRSKEAEAAFLNVYKRLIDVPDPVPALDLGQQLQLKVQRLHDIETENQKLRETLEEYNKEFAEVKNQEVTIKALKEKIREYEQTLKNQAETIALEKEQKLQNDFAEKERKLQETQMSTTSKLEEAEHKVQSLQTGLILSFLVPWMWGGPRGRVGSAPDRPGPRGYLLLFGAVGAAGSPR

SEQ ID NO: 842323 - protein, 322 aa, Homo sapiens
PTRSPERREYDAIRMNLSCSLLFSKVWRLQNDFAEPERKLQETQMSTTSKLEEAEHKVQSLQTALEKTRTELFDLKTKYDEETTAKADEIEMIMTDLERANQRAEVAQREAETLREQLSSANHSLQLASQIQKAPDVEQAIEVLTRSSLEVELAAKEREIAQLVEDVQRLQASLTKLRENSASQISQLEQQLSAKNSTLKQWKKNSKGRLTMKEGTQSSTSESMEVGPSRRWDTDAASLDVLWDEHDLTQNTAAFNTNLRDARAQERHRGGQTGEQPERGESDIHKPRPGQRWNSRKEKESKAKGDNNAGKTATGQRTTERR

SEQ ID NO: 842324 - protein, 678 aa, Homo sapiens
MAANVGSMFQYWKRFDLQQLQRELDATATVLANRQDESEQSRKRLIEQSREFKKNTPEDLRKQVAPLLKSFQGEIDALSKRSKEAEAAFLNVYKRLIDVPDPVPALDLGQQLQLKVQRLHDIETENQKLRETLEEYNKEFAEVKNQEVTIKALKEKIREYEQTLKNQAETIALEKEQKLQNDFAEKERKLQETQMSTTSKLEEAEHKVQSLQTALEKTRTELFDLKTKYDEETTAKADEIEMIMTDLERANQRAEVAQREAETLREQLSSANHSLQLASQIQKAPDVEQAIEVLTRSSLEVELAAKEREIAQLVEDVQRLQASLTKLRENSASQISQLEQQLSAKNSTLKQLEEKLKGQADYEEVKKELNILKSMEFAPSEGAGTQDAAKPLEVLLLEKNRSLQSENAALRISNSDLSGRCAELQVRITEAVATATEQRELIARLEQDLSIIQSIQRPDAEGAAEHRLEKIPEPIKEATALFYGPAAPASGALPEGQVDSLLSIISSQRERFRARNQELEAENRLAQHTLQALQSELDSLRADNIKLFEKIKFLQSYPGRGSGSDDTELRYSSQYEERLDPFSSFSKRERQRKYLSLSPWDKATLSMGRLVLSNKMARTIGFFYTLFLHCLVFLVLYKLAWSESMERDCATFCAKKFADHLHKFHENDNGAAAGDLWQ

SEQ ID NO: 842325 - protein, 662 aa, Homo sapiens
MAANVGSMFQYWKRFDLQQLQRELDATATVLANRQDESEQSRKRLIEQSREFKKNTPEIDALSKRSKEAEAAFLNVYKRLIDVPDPVPALDLGQQLQLKVQRLHDIETENQKLRETLEEYNKEFAEVKNQEVTIKALKEKIREYEQTLKNQAETIALEKEQKLQNDFAEKERKLQETQMSTTSKLEEAEHKVQSLQTALEKTRTELFDLKTKYDEETTAKADEIEMIMTDLERANQRAEVAQREAETLREQLSSANHSLQLASQIQKAPDVEQAIEVLTRSSLEVELAAKEREIAQLVEDVQRLQASLTKLRENSASQISQLEQQLSAKNSTLKQLEEKLKGQADYEEVKKELNILKSMEFAPSEGAGTQDAAKPLEVLLLEKNRSLQSENAALRISNSDLSGRCAELQVRITEAVATATEQRELIARLEQDLSIIQSIQRPDAEGAAEHRLEKIPEPIKEATALFYGPAAPASGALPEGQVDSLLSIISSQRERFRARNQELEAENRLAQHTLQALQSELDSLRADNIKLFEKIKFLQSYPGRGSGSDDTELRYSSQYEERLDPFSSFSKRERQRKYLSLSPWDKATLSMGRLVLSNKMARTIGFFYTLFLHCLVFLVLYKLAWSESMERDCATFCAKKFADHLHKFHENDNGAAAGDLWQ

SEQ ID NO: 842326 - protein, 1519 aa, Homo sapiens
APAAPGQPRDSARWMLCVAGARLKRELDATATVLANRQDESEQSRKRLIEQSREFKKNTPEDLRKQVAPLLKSFQGEIDALSKRSKEAEAAFLNVYKRLIDVPDPVPALDLGQQLQLKVQRLHDIETENQKLRETLEEYNKEFAEVKNQEVTIKALKEKIREYEQTLKNQAETIALEKEQKLQNDFAEKERKLQETQMSTTSKLEEAEHKVQSLQTALEKTRTELFDLKTKYDEETTAKADEIEMIMTDLERANQRAEVAQREAETLREQLSSANHSLQLASQIQKAPDVEQAIEVLTRSSLEVELAAKEREIAQLVEDVQRLQASLTKLRENSASQISQLEQQLSAKNSTLKQLEEKLKGQADYEEVKKELNILKSMEFAPSEGAGTQDAAKPLEVLLLEKNRSLQSENAALRISNSDLSGSARRKGKDQPESRRPGSLPAPPPSQLPRNPGEQASNTNGTHQFSPAGLSQDFFSSSLASPSLPLASTGKFALNSLLQRQLMQSFYSKAMQEAGSTSMIFSTGPYSTNSISSQSPLQQSPDVNGMAPSPSQSESAGSVSEGEEMDTAEIARQVKEQLIKHNIGQRIFGHYVLGLSQGSVSEILARPKPWNKLTVRGKEPFHKMKQFLSDEQNILALRSIQGRQRENPGQSLNRLFQEVPKRRNGSEGNITTRIRASETGSDEAIKSILEQAKRELQVQKTAEPAQPSSASGSGNSDDAIRSILQQARREMEAQQAALDPALKQAPLSQSDITILTPKLLSTSPMPTVSSYPPLAISLKKPSAAPEAGASALPNPPALKKEAQDAPGLDPQGAADCAQGVLRQVKNEVGRSGAWKDHWWSAVQPERRNAASSEEAKAEETGGGKEKGSGGSGGGSQPRAERSQLQGPSSSEYWKEWPSAESPYSQSSELSLTGASRSETPQNSPLPSSPIVPMSKPTKPSVPPLTPEQYEVYMYQEVDTIELTRQVKEKLAKNGICQRIFGEKVLGLSQGSVSDMLSRPKPWSKLTQKGREPFIRMQLWLNGELGQGVLPVQGQQQGPVLHSVTSLQDPLQQGCVSSESTPKTSASCSPAPESPMSSSESVKSLTELVQQPCPPIEASKDSKPPEPSDPPASDSQPTTPLPLSGHSALSIQELVAMSPELDTYGITKRVKEVLTDNNLGQRLFGETILGLTQGSVSDLLARPKPWHKLSLKGREPFVRMQLWLNDPNNVEKLMDMKRMEKKAYMKRRHSSVSDSQPCEPPSVGTEYSQGASPQPQHQLKKPRVVLAPEEKEALKRAYQQKPYPSPKTIEDLATQLNLKTSTVINWFHNYRSRIRRELFIEEIQAGSQGQAGASDSPSARSGRAAPSSEGDSCDGVEATEGPGSADTEEPKSQGEAEREEVPRPAEQTEPPPSGTPGPDDARDDDHEGGPVEGPGPLPSPASATATAAPAAPEDAATSAAAAPGEGPAAPSSAPPPSNSSSSSAPRRPSSLQSLFGLPEAAGARDSRDNPLRKKKAANLNSIIHRLEKAASREEPIEWEF

SEQ ID NO: 842327 - protein, 678 aa, Homo sapiens; identical to SEQ ID NO: 842324

SEQ ID NO: 842328 - protein, 1414 aa, Homo sapiens
MAANVGSMFQYWKRFDLQQLQRELDATATVLANRQDESEQSRKRLIEQSREFKKNTPEDLRKQVAPLLKSFQGEIDALSKRSKEAEAAFLNVYKRLIDVPDPVPALDLGQQLQLKVQRLHDIETENQKLRETLEEYNKEFAEVKNQEVTIKALKEKIREYEQTLKNQAETIALEKEQKLQNDFAEKERKLQETQMSTTSKLEEAEHKVQSLQTALEKTRTELFDLKTKYDEETTAKADEIEMIMTDLERANQRAEVAQREAETLREQLSSANHSLQLASQIQKAPDVEQAIEVLTRSSLEVELAAKEREIAQLVEDVQRLQASLTKLRENSASQISQLEQQLSAKNSTLKQLEEKLKGQADYEEVKKELNILKSMEFAPSEGAGTQDAAKPLEVLLLEKNRSLQSENAALRISNSDLSGPYSTNSISSQSPLQQSPDVNGMAPSPSQSESAGSVSEGEEMDTAEIARQVKEQLIKHNIGQRIFGHYVLGLSQGSVSEILARPKPWNKLTVRGKEPFHKMKQFLSDEQNILALRSIQGRQRENPGQSLNRLFQEVPKRRNGSEGNITTRIRASETGSDEAIKSILEQAKRELQVQKTAEPAQPSSASGSGNSDDAIRSILQQARREMEAQQAALDPALKQAPLSQSDITILTPKLLSTSPMPTVSSYPPLAISLKKPSAAPEAGASALPNPPALKKEAQDAPGLDPQGAADCAQGVLRQVKNEVGRSGAWKDHWWSAVQPERRNAASSEEAKAEETGGGKEKGSGGSGGGSQPRAERSQLQGPSSSEYWKEWPSAESPYSQSSELSLTGASRSETPQNSPLPSSPIVPMSKPTKPSVPPLTPEQYEVYMYQEVDTIELTRQVKEKLAKNGICQRIFGEKVLGLSQGSVSDMLSRPKPWSKLTQKGREPFIRMQLWLNGELGQGVLPVQGQQQGPVLHSVTSLQDPLQQGCVSSESTPKTSASCSPAPESPMSSSESVKSLTELVQQPCPPIEASKDSKPPEPSDPPASDSQPTTPLPLSGHSALSIQELVAMSPELDTYGITKRVKEVLTDNNLGQRLFGETILGLTQGSVSDLLARPKPWHKLSLKGREPFVRMQLWLNDPNNVEKLMDMKRMEKKAYMKRRHSSVSDSQPCEPPSVGTEYSQGASPQPQHQLKKPRVVLAPEEKEALKRAYQQKPYPSPKTIEDLATQLNLKTSTVINWFHNYRSRIRRELFIEEIQAGSQGQAGASDSPSARSGRAAPSSEGDSCDGVEATEGPGSADTEEPKSQGEAEREEVPRPAEQTEPPPSGTPGPDDARDDDHEGGPVEGPGPLPSPASATATAAPAAPEDAATSAAAAPGEGPAAPSSAPPPSNSSSSSAPRRPSSLQSLFGLPEAAGARDSRDNPLRKKKAANLNSIIHRLEKAASREEPIEWEF

SEQ ID NO: 842329 - protein, 472 aa, Homo sapiens
MLLVVACFDRFKKGRKNHLNHFSFLFSTAKADEIEMIMTDLERANQRAEVAQREAETLREQLSSANHSLQLASQIQKAPDVEQAIEVLTRSSLEVELAAKEREIAQLVEDVQRLQASLTKLRENSASQISQLEQQLSAKNSTLKQLEEKLKGQADYEEVKKELNILKSMEFAPSEGAGTQDAAKPLEVLLLEKNRSLQSENAALRISNSDLSGRCAELQVRITEAVATATEQRELIARLEQDLSIIQSIQRPDAEGAAEHRLEKIPEPIKEATALFYGPAAPASGALPEGQVDSLLSIISSQRERFRARNQELEAENRLAQHTLQALQSELDSLRADNIKLFEKIKFLQSYPGRGSGSDDTELRYSSQYEERLDPFSSFSKRERQRKYLSLSPWDKATLSMGRLVLSNKMARTIGFFYTLFLHCLVFLVLYKLAWSESMERDCATFCAKKFADHLHKFHENDNGAAAGDLWQ

SEQ ID NO: 842330 - protein, 711 aa, Homo sapiens
  misc_feature (589)..(590): Xaa can be any naturally occurring amino acid
  misc_feature (593)..(594): Xaa can be any naturally occurring amino acid
  misc_feature (596)..(596): Xaa can be any naturally occurring amino acid
  misc_feature (600)..(600): Xaa can be any naturally occurring amino acid
  misc_feature (607)..(608): Xaa can be any naturally occurring amino acid
  misc_feature (611)..(611): Xaa can be any naturally occurring amino acid
  misc_feature (622)..(622): Xaa can be any naturally occurring amino acid
  misc_feature (625)..(625): Xaa can be any naturally occurring amino acid
  misc_feature (633)..(633): Xaa can be any naturally occurring amino acid
  misc_feature (638)..(638): Xaa can be any naturally occurring amino acid
  misc_feature (646)..(646): Xaa can be any naturally occurring amino acid
  misc_feature (655)..(656): Xaa can be any naturally occurring amino acid
  misc_feature (688)..(688): Xaa can be any naturally occurring amino acid
  misc_feature (704)..(704): Xaa can be any naturally occurring amino acid
MAANVGSMFQYWKRFDLQQLQRELDATATVLANRQDESEQSRKRLIEQSREFKKNTPEDLRKQVAPLLKSFQGEIDALSKRSKEAEAAFLNVYKRLIDVPDPVPALDLGQQLQLKVQRLHDIETENQKLRETLEEYNKEFAEVKNQEVTIKALKEKIREYEQTLKNQAETIALEKEQKLQNDFAEKERKLQETQMSTTSKLEEAEHKVQSLQTALEKTRTELFDLKTKYDEETTAKADEIEMIMTDLERANQRAEVAQREAETLREQLSSANHSLQLASQIQKAPDVEQAIEVLTRSSLEVELAAKEREIAQLVEDVQRLQASLTKLRENSASQISQLEQQLSAKNSTLKQLEEKLKGQADYEEVKKELNILKSMEFAPSEGAGTQDAAKPLEVLLLEKNRSLQSENAALRISNSDLSGPYSTNSISSQSPLQQSPDVNGMAPSPSQSESAGSVSEGEEMDTAEIARQVKEQLIKHNIGQRIFGHYVLGLSQGSVSEILARPKPWNKLTVRGKEPFHKMKQFLSDEQNILALRSIQGRQRENPGQSLNRLFQEVPKRRNGSEGNITTRPPGRGSPEPAGMSWRARERQXXEKXXDXVLPXPSAVPHXXPPXPLASLKTAADXDKXRARPHPAXQAPHXTLLPGPPXRVVAGTSEXXVGRGAGMSQVCLRQSFFILYCYFYYFEFKPDXLHSIFPTGKSGPAAFXPAGWGWN

SEQ ID NO: 842331 - protein, 1183 aa, Homo sapiens
MAANVGSMFQYWKRFDLQQLQRELDATATVLANRQDESEQSRKRLIEQSREFKKNTPEDLRKQVAPLLKSFQGEIDALSKRSKEAEAAFLNVYKRLIDVPDPVPALDLGQQLQLKVQRLHDIETENQKLRETLEEYNKEFAEVKNQEVTIKALKEKIREYEQTLKNQSPSTPRLCRKPEAQALIFSTGPYSTNSISSQSPLQQSPDVNGMAPSPSQSESAGSVSEGEEMDTAEIARQVKEQLIKHNIGQRIFGHYVLGLSQGSVSEILARPKPWNKLTVRGKEPFHKMKQFLSDEQNILALRSIQGRQRENPGQSLNRLFQEVPKRRNGSEGNITTRIRASETGSDEAIKSILEQAKRELQVQKTAEPAQPSSASGSGNSDDAIRSILQQARREMEAQQAALDPALKQAPLSQSDITILTPKLLSTSPMPTVSSYPPLAISLKKPSAAPEAGASALPNPPALKKEAQDAPGLDPQGAADCAQGVLRQVKNEVGRSGAWKDHWWSAVQPERRNAASSEEAKAEETGGGKEKGSGGSGGGSQPRAERSQLQGPSSSEYWKEWPSAESPYSQSSELSLTGASRSETPQNSPLPSSPIVPMSKPTKPSVPPLTPEQYEVYMYQEVDTIELTRQVKEKLAKNGICQRIFGEKVLGLSQGSVSDMLSRPKPWSKLTQKGREPFIRMQLWLNGELGQGVLPVQGQQQGPVLHSVTSLQDPLQQGCVSSESTPKTSASCSPAPESPMSSSESVKSLTELVQQPCPPIEASKDSKPPEPSDPPASDSQPTTPLPLSGHSALSIQELVAMSPELDTYGITKRVKEVLTDNNLGQRLFGETILGLTQGSVSDLLARPKPWHKLSLKGREPFVRMQLWLNDPNNVEKLMDMKRMEKKAYMKRRHSSVSDSQPCEPPSVGTEYSQGASPQPQHQLKKPRVVLAPEEKEALKRAYQQKPYPSPKTIEDLATQLNLKTSTVINWFHNYRSRIRRELFIEEIQAGSQGQAGASDSPSARSGRAAPSSEGDSCDGVEATEGPGSADTEEPKSQGEAEREEVPRPAEQTEPPPSGTPGPDDARDDDHEGGPVEGPGPLPSPASATATAAPAAPEDAATSAAAAPGEGPAAPSSAPPPSNSSSSSAPRRPSSLQSLFGLPEAAGARDSRDNPLRKKKAANLNSIIHRLEKAASREEPIEWEF

SEQ ID NO: 842332 - protein, 255 aa, Homo sapiens
MAANVGSMFQYWKRFDLQQLQRELDATATVLANRQDESEQSRKRLIEQSREFKKNTPEDLRKQVAPLLKSFQGEIDALSKRSKEAEAAFLNVYKRLIDVPDPVPALDLGQQLQLKVQRLHDIETENQKLRETLEEYNKEFAEVKNQEVTIKALKEKIREYEQTLKNQAETIALEKEQKLQNDFAEKERKLQETQMSTTSKLEEAEHKVQSLQTALEKTRTELFDLKTKYDEETTAKSGRGESDLPHAARFHPGTL

SEQ ID NO: 842333 - protein, 294 aa, Homo sapiens
MAANVGSMFQYWKRFDLQQLQRELDATATVLANRQDESEQSRKRLIEQSREFKKNTPEDLRKQVAPLLKSFQGEIDALSKRSKEAEAAFLNVYKRLIDVPDPVPALDLGQQLQLKVQRLHDIETENQKLRETLEEYNKEFAEVKNQEVTIKALKEKIREYEQTLKNQAETIALEKEQKLQNDFAEKERKLQETQMSTTSKLEEAEHKVQSLQTALEKTRTELFDLKTKYDEETTAKLKATRLNVLTGLERATEGEVLTERGDLGKGLIGQHSPAWVQVQRPQWAPQGDRCTKGR

SEQ ID NO: 842334 - protein, 619 aa, Homo sapiens
MLSSLFSFLSFLPFQIDALSKRSKEAEAAFLNVYKRLIDVPDPVPALDLGQQLQLKVQRLHDIETENQKLRETLEEYNKEFAEVKNQEVTIKALKEKIREYEQTLKNQAETIALEKEQKLQNDFAEKERKLQETQMSTTSKLEEAEHKVQSLQTALEKTRTELFDLKTKYDEETTAKADEIEMIMTDLERANQRAEVAQREAETLREQLSSANHSLQLASQIQKAPDVEQAIEVLTRSSLEVELAAKEREIAQLVEDVQRLQASLTKLRENSASQISQLEQQLSAKNSTLKQLEEKLKGQADYEEVKKELNILKSMEFAPSEGAGTQDAAKPLEVLLLEKNRSLQSENAALRISNSDLSGRCAELQVRITEAVATATEQRELIARLEQDLSIIQSIQRPDAEGAAEHRLEKIPEPIKEATALFYGPAAPASGALPEGQVDSLLSIISSQRERFRARNQELEAENRLAQHTLQALQSELDSLRADNIKLFEKIKFLQSYPGRGSGSDDTELRYSSQYEERLDPFSSFSKRERQRKYLSLSPWDKATLSMGRLVLSNKMARTIGFFYTLFLHCLVFLVLYKLAWSESMERDCATFCAKKFADHLHKFHENDNGAAAGDLWQ

SEQ ID NO: 842335 - protein, 1519 aa, Homo sapiens; identical to SEQ ID NO: 842326

SEQ ID NO: 842336 - protein, 304 aa, Homo sapiens
MEFAPSEGAGTQDAAKPLEVLLLEKNRSLQSENAALRISNSDLSGRCAELQVRITEAVATATEQRELIARLEQDLSIIQSIQRPDAEGAAEHRLEKIPEPIKEATALFYGPAAPASGALPEGQVDSLLSIISSQRERFRARNQELEAENRLAQHTLQALQSELDSLRADNIKLFEKIKFLQSYPGRGSGSDDTELRYSSQYEERLDPFSSFSKRERQRKYLSLSPWDKATLSMGRLVLSNKMARTIGFFYTLFLHCLVFLVLYKLAWSESMERDCATFCAKKFADHLHKFHENDNGAAAGDLWQ

SEQ ID NO: 842337 - protein, 1414 aa, Homo sapiens; identical to SEQ ID NO: 842328

SEQ ID NO: 842338 - protein, 239 aa, Homo sapiens
AEREYSVPIVRRHLLIASCHLQGAAEHRLEKIPEPIKEATALFYGPAAPASGALPEGQVDSLLSIISSQRERFRARNQELEAENRLAQHTLQALQSELDSLRADNIKLFEKIKFLQSYPGRGSGSDDTELRYSSQYEERLDPFSSFSKRERQRKYLSLSPWDKATLSMGRLVLSNKMARTIGFFYTLFLHCLVFLVLYKLAWSESMERDCATFCAKKFADHLHKFHENDNGAAAGDLWQ

SEQ ID NO: 842339 - protein, 124 aa, Homo sapiens
MVARLGGSGSDDTELRYSSQYEERLDPFSSFSKRERQRKYLSLSPWDKATLSMGRLVLSNKMARTIGFFYTLFLHCLVFLVLYKLAWSESMERDCATFCAKKFADHLHKFHENDNGAAAGDLWQ

SEQ ID NO: 842340 - protein, 131 aa, Homo sapiens
YLPACICTHISHILSLTMDKSLCFCRGPDSSLGLQSLFLSSSAQKSPMSDHLTREARMNPPSGLQSLHDMATSHLPGLISQCSLLHSPHSSCLVSWLPLKHSRPALALGPWHFAGPLPLPWILSRFAVHLL

SEQ ID NO: 842341 - protein, 58 aa, Homo sapiens
MTFCVLISLDYPQHSSLWEEAVVRSKLGVVMDNENCVEDTGSDSLVRTLKRRAGGHLM

SEQ ID NO: 842342 - protein, 69 aa, Homo sapiens
QFGASIDDIQGFSETSFLDKAYHFTMQASYIIFVDLQYLIDRLESTQEVAVLAVPVHFTPHSTGTETPP

SEQ ID NO: 842343 - protein, 38 aa, Homo sapiens
VDQAVDPKREAQDKGPGGTKPTKSVLPAKGQKVPLEQK

SEQ ID NO: 842344 - protein, 83 aa, Homo sapiens
EPQAYHLHPESCVTMWVPVVFLTLSVTWIGAAPLILSRIVGGWECEKHSQPWQVLVASRGRAVCGGVLVHPQWVLTAAHCIRK

SEQ ID NO: 842345 - protein, 187 aa, Homo sapiens
MVGGMQEREPALTVKLRLFPPKPSTPAQTGSWALFCLSQPHSKPIPPAPPYCNSPHSHTRSPLPPTYARTFSPLPSQLPAPSCFTKGEVPGHLRVSLCGAQNLQGPLSMPLVPWTVSLVHLLRPSILSQSTDFSHSAVSAQPYPRDLDAWPPNLALGYPDATRHLLLPSQAIWPETTNGSLSLAMGL

SEQ ID NO: 842346 - protein, 187 aa, Homo sapiens; identical to SEQ ID NO: 842345

SEQ ID NO: 842347 - protein, 117 aa, Homo sapiens
TFFFIWLCGLENTFLSQRSEVPRTDQPRAHWSESSSGSMAAQPHPQAAACHPRWHVPSSYPGSGKTWLLLGSYYSVLSTSLQSLGFLPSNINFVIYLLENNHKNLKSKLSKGVSHNP

SEQ ID NO: 842348 - protein, 256 aa, Homo sapiens
MVEAEELAQLRLLNLELLRQLWVGQDAVRRSVARAASESSLESSSSYNSETPSTPETSSTSLSTSCPRGRSSVWGPPDACRGDLRDVARSGVASLPPAKCQHQESLGRPRPHSAPSLGTSSLRDPEPSGRLGDPGPQEAQTPRSILAQQSKLSKPRVTFSEESAVPERSWRLRPYLGYDWIAGSLDTSSSITSQPEAFFSKLQEFRETNKEECICSHPEPQLPGLRESSGSGVEEDHECECGPSARPLSSPASRCP

SEQ ID NO: 842349 - protein, 388 aa, Homo sapiens
MVEAEELAQLRLLNLELLRQLWVGQDAVRRSVARAASESSLESSSSYNSETPSTPETSSTSLSTSCPRGRSSVWGPPDACRGDLRDVARSGVASLPPAKCQHQESLGRPRPHSAPSLGTSSLRDPEPSGRLGDPGPQEAQTPRSILAQQSKLSKPRVTFSEESAVPERSWRLRPYLGYDWIAGSLDTSSSITSQPEAFFSKLQEFRETNKEECICSHPEPQLPGLRESSGSGVEEDHECVYCYRVNRRLFPVPVDPGTPCRLCRTPRDQQGPGTLAQPAHVRVSIPLSILEPPHRYHIHRRKSFDASDTLALPRHCLLGWDIFPPKSEKSSAPRNLDLWSSVSAEAQHQKLSGTSSPFHPASPMQMLPPTPTWSVPQVPRPHVPRQKP

SEQ ID NO: 842350 - protein, 415 aa, Homo sapiens
MVEAEELAQLRLLNLELLRQLWVGQDAVRRSVARAASESSLESSSSYNSETPSTPETSSTSLSTSCPRGRSSVWGPPDACRGDLRDVARSGVASLPPAKCQHQESLGRPRPHSAPSLGTSSLRDPEPSGRLGDPGPQEAQTPRSILAQQSKLSKPRVTFSEESAVPERSWRLRPYLGYDWIAGSLDTSSSITSQPEAFFSKLQEFRETNKEECICSHPERAGAGEGGRGRLSGSIPRPAHPPRPLRPQLPGLRESSGSGVEEDHECVYCYRVNRRLFPVPVDPGTPCRLCRTPRDQQGPGTLAQPAHVRVSIPLSILEPPHRYHIHRRKSFDASDTLALPRHCLLGWDIFPPKSEKSSAPRNLDLWSSVSAEAQHQKLSGTSSPFHPASPMQMLPPTPTWSVPQVPRPHVPRQKP

SEQ ID NO: 842351 - protein, 154 aa, Homo sapiens [sequence omitted]

SEQ ID NO: 842352 - protein, 104 aa, Homo sapiens
LKLPLLNSAYPVPQLTNRSSPFRGPPHSRNRPPHRPRKLTNRLCSSALSPAPTLKLTLRIAEYTLTRRPGPAPHLTNQDGRPRPLERLRRLRLLRRRMLGDSAG

SEQ ID NO: 842353 - protein, 388 aa, Homo sapiens; identical to SEQ ID NO: 842349

SEQ ID NO: 842354 - protein, 282 aa, Homo sapiens [sequence omitted]

SEQ ID NO: 842355 - protein, 388 aa, Homo sapiens
MTSRPCPSPDQSRRPAEAPGTAQAAAAATAAHARGFCRSSLESSSSYNSETPSTPETSSTSLSTSCPRGRSSVWGPPDACRGDLRDVARSGVASLPPAKCQHQESLGRPRPHSAPSLGTSSLRDPEPSGRLGDPGPQEAQTPRSILAQQSKLSKPRVTFSEESAVPERSWRLRPYLGYDWIAGSLDTSSSITSQPEAFFSKLQEFRETNKEECICSHPEPQLPGLRESSGSGVEEDHECVYCYRVNRRLFPVPVDPGTPCRLCRTPRDQQGPGTLAQPAHVRVSIPLSILEPPHRYHIHRRKSFDASDTLALPRHCLLGWDIFPPKSEKSSAPRNLDLWSSVSAEAQHQKLSGTSSPFHPASPMQMLPPTPTWSVPQVPRPHVPRQKP

SEQ ID NO: 842356 - protein, 104 aa, Homo sapiens; identical to SEQ ID NO: 842352

SEQ ID NO: 842357 - protein, 257 aa, Homo sapiens
MSAPSDLEMIGNEDLEFTRANQRRRHVTSHRSSSFTLLQSLAIEDSRDKPTYSVLLGQLFAFIGTNPDQAVSSSSFLLAAQTRWRRGNTRKQALVHMRELLTAAVRVGGVTHLVGPVTMVLQGGPRIEELTCGGMVEQVQEAFGETMTSVVSLCARYPIACANSIGLLCTIPYTRSEEKCLVRSGLVQLMDRLCSLSNQTESSSSEKQTKKQKVATMAWAAFQVLANRCVEWEKEEGGFPRGCALSGWPAHPYWPGT

SEQ ID NO: 842358 - protein, 327 aa, Homo sapiens
MSAPSDLEMIGNEDLEFTRANQRRRHVTSHRSSSFTLLQSLAIEDSRDKPTYSVLLGQLFAFIGTNPDQAVSSSSFLLAAQTRWRRGNTRKQALVHMRELLTAAVRVGGVTHLVGPVTMVLQGGPRIEELTCGGMVEQVQEAFGETMTSVVSLCARYPIACANSIGLLCTIPYTRSEEKCLVRSGLVQLMDRLCSLSNQTESSSSEKQTKKQKVATMAWAAFQVLANRCVEWEKEEGGSTEAVHSGLARQVSSLLTNHLARATECCGNQAAGNDALQDVLSLLNDLSRSHIGKAILSQPACVSKLLSLLLDQRPSPKLVLIILQLCR

SEQ ID NO: 842359 - protein, 102 aa, Homo sapiens
MRGQVQWLTSVIPALWEAKKNLINLPALSSSLSIIASSEKPSLNGHPISPKALAIVGILSLSVQVINIYLSKYQRPILLCSSLYSQNSVWCIIWLNRNVLNE

SEQ ID NO: 842360 - protein, 32 aa, Homo sapiens
GFCSERLELALGTLPLMVKSTSAPGGCNLCPP

SEQ ID NO: 842361 - protein, 146 aa, Homo sapiens
AGQVSCVRLQCPPLPCKLQVTERGSCCPRCRGCLAHGEEHPEGSRWVPPDSACSSCVCHEGVVTCARIQCISSCAQPRQGPHDCCPQCSDCEHEGRKYEPGESFQPGADPCEVCICEPQPEGPPSLRCHRRQCPSLVGCPPSQLLP

SEQ ID NO: 842362 - protein, 102 aa, Homo sapiens
SVDANSHSYDVEMQVQNDSYVINSERLGPKESSPSAVRPTSTTCCLTSSRKPTLIPLVPASDTEATSGGCHPPLGTSPWVASPDPPLGSGGSISAPLLLAPF

SEQ ID NO: 842363 - protein, 134 aa, Homo sapiens
PPEPGEPGLQGRAPQVRTQLRGHQARSQSRSAAGQRSAHGSTRCDYSYLLENSRPGPPHVLQGDSETLWAGGTFSSIWTLAASQADVTHPLGLRHGSLAQTLPLVPVVPFLPLCCWPPSEDARASPGPLLQSLV

SEQ ID NO: 842364 - protein, 73 aa, Homo sapiens
HTRPENVEWPPSGLGCHLHHITRDRSPVFFGNHVPRTPPDCLPEHTKINEAQNPVPTSFHEEQVVHQRDGPHE

SEQ ID NO: 842365 - protein, 94 aa, Homo sapiens
QTGIPPQRTPHTGQDGCGFSVPTVQNVVPTQPPVAPRSVSVWNHHFLVHTDPPSMFPGSHICLNRPVSVSWCLLSGRMQHRGKEVIMSGGSWHW

SEQ ID NO: 842366 - protein, 133 aa, Homo sapiens
LSCDPGILSAPSELAVLPLPLLLYQRPNQSCGNADEREYLCSGKWLEFILEESPGDSLPGMGDSVGNSTEVECSRCQESEPGFKLEMDEGVMGDRAQQQEGRRWQSTCACWGAEGPAGLPPEVCCGKTTRWGQ

SEQ ID NO: 842367 - protein, 272 aa, Homo sapiens
  misc_feature (246)..(246): Xaa can be any naturally occurring amino acid
  misc_feature (253)..(253): Xaa can be any naturally occurring amino acid
ATCPARSPRLSSRSAARCGCCWANGLRSSERCVLESLRPCVRLRPEASAARGFCCEPETMAKPAQGAKYRGSIHDFPGFDPNQDAEALYTAMKGFGSDKEAILDIITSRSNRQRQEVCQSYKSLYGKDLIADLKYELTGKFERLIVGLMRPPAYCDAKEIKDAISGIGTDEKCLIEILASRTNEQMHQLVAAYKDAYERDLEADIIGDTSGHFQKMLVVLLQGTREEDDVVSEDLVQQDVQTYYRXAKGGEKXPWGKKKIWGGGGGKKTPKG

SEQ ID NO: 842368 - protein, 732 aa, Homo sapiens
ATCPARSPRLSSRSAARCGCCWANGLRSSERCVLESLRPCVRLRPEASAARGFCCEPETMAKPAQGAKYRGSIHDFPGFDPNQDAEALYTAMKGFGSDKEAILDIITSRSNRQRQEVCQSYKSLYGKDLIADLKYELTGKFERLIVGLMRPPAYCDAKEIKDAISGIGTDEKCLIEILASRTNEQMHQLVAAYKDAYERDLEADIIGDTSGHFQKMLVVLLQGTREEDDVVSEDLVQQDVQDLYEAGELKWGTDEAQFIYILGNRSKQHLRLVFDEYLKTTGKPIEASIRGELSGDFEKLMLAVVKCIRSTPEYFAERLFKAMKGLGTRDNTLIRIMVSRSELDMLDIREIFRTKYEKSLYSMIKNDTSGEYKKTLLKLSGGDDDAAGQFFPEAAQVAYQMWELSAVARVELKGTVRPANDFNPDADAKALRKAMKGLGTDEDTIIDIITHRSNVQRQQIRQTFKSHFGRDLMTDLKSEISGDLARLILGLMMPPAHYDAKQLKKAMEGAGTDEKALIEILATRTNAEIRAINEAYKEDYHKSLEDALSSDTSGHFRRILISLATGHREEGGENLDQAREDAQVAAEILEIADTPSGDKTSLETRFMTILCTRSYPHLRRVFQEFIKMTNYDVEHTIKKEMSGDVRDAFVAIVQSVKNKPLFFADKLYKSMKGAGTDEKTLTRIMVSRSEIDLLNIRREFIEKYDKSLHQAIEGDTSGDFLKALLALCGGED

SEQ ID NO: 842369 - protein, 678 aa, Homo sapiens
EALYTAMKGFGSDKEAILDIITYGATGRGDAEALYTAMKGFGSDKEAILDIITSRSNRQRQEVCQSYKSLYGKDLIADLKYELTGKFERLIVGLMRPPAYCDAKEIKDAISGIGTDEKCLIEILASRTNEQMHQLVAAYKDAYERDLEADIIGDTSGHFQKMLVVLLQGTREEDDVVSEDLVQQDVQDLYEAGELKWGTDEAQFIYILGNRSKQHLRLVFDEYLKTTGKPIEASIRGELSGDFEKLMLAVVKCIRSTPEYFAERLFKAMKGLGTRDNTLIRIMVSRSELDMLDIREIFRTKYEKSLYSMIKNDTSGEYKKTLLKLSGGDDDAAGQFFPEAAQVAYQMWELSAVARVELKGTVRPANDFNPDADAKALRKAMKGLGTDEDTIIDIITHRSNVQRQQIRQTFKSHFGRDLMTDLKSEISGDLARLILGLMMPPAHYDAKQLKKAMEGAGTDEKALIEILATRTNAEIRAINEAYKEDYHKSLEDALSSDTSGHFRRILISLATGHREEGGENLDQAREDAQVAAEILEIADTPSGDKTSLETRFMTILCTRSYPHLRRVFQEFIKMTNYDVEHTIKKEMSGDVRDAFVAIVQSVKNKPLFFADKLYKSMKGAGTDEKTLTRIMVSRSEIDLLNIRREFIEKYDKSLHQAIEGDTSGDFLKALLALCGGED

SEQ ID NO: 842370 - protein, 643 aa, Homo sapiens
LLSPIPGSDKEAILDIITSRSNRQRQEVCQSYKSLYGKDLIADLKYELTGKFERLIVGLMRPPAYCDAKEIKDAISGIGTDEKCLIEILASRTNEQMHQLVAAYKDAYERDLEADIIGDTSGHFQKMLVVLLQGTREEDDVVSEDLVQQDVQDLYEAGELKWGTDEAQFIYILGNRSKQHLRLVFDEYLKTTGKPIEASIRGELSGDFEKLMLAVVKCIRSTPEYFAERLFKAMKGLGTRDNTLIRIMVSRSELDMLDIREIFRTKYEKSLYSMIKNDTSGEYKKTLLKLSGGDDDAAGQFFPEAAQVAYQMWELSAVARVELKGTVRPANDFNPDADAKALRKAMKGLGTDEDTIIDIITHRSNVQRQQIRQTFKSHFGRDLMTDLKSEISGDLARLILGLMMPPAHYDAKQLKKAMEGAGTDEKALIEILATRTNAEIRAINEAYKEDYHKSLEDALSSDTSGHFRRILISLATGHREEGGENLDQAREDAQVAAEILEIADTPSGDKTSLETRFMTILCTRSYPHLRRVFQEFIKMTNYDVEHTIKKEMSGDVRDAFVAIVQSVKNKPLFFADKLYKSMKGAGTDEKTLTRIMVSRSEIDLLNIRREFIEKYDKSLHQAIEGDTSGDFLKALLALCGGED

SEQ ID NO: 842371 - protein, 709 aa, Homo sapiens
ATCPARSPRLSSRSAARCGCCWANGLRSSERCVLESLRPCVRLRPEASAARGFCCEPETMAKPAQGAKYRGSIHDFPGFDPNQDAEALYTAMKGFGSDKEAILDIITSRSNRQRQEVCQSYKSLYGKDLIADLKYELTGKFERLIVGLMRPPAYCDAKEIKDAISGIGTDEKCLIEILASRTNEQMHQLVAAYKDAYERDLEADIIGDTSGHFQKMLVVLLQGTREEDDVVSEDLVQQDVQDLYEAGELKWGTDEAQFIYILGNRSKQHLRLVFDEYLKTTGKPIEASIRGELSGDFEKLMLAVVKCIRSTPEYFAERLFKAMKGLGTRDNTLIRIMVSRSELDMLDIREIFRTKYEKSLYSMIKNDTSGEYKKTLLKLSGGDDDAAGQFFPEAAQVAYQMWELSAVARVELKGTVRPANDFNPDADAKALRKAMKGLGTDEDTIIDIITHRSNVQRQQIRQTFKSHFGRDLMTDLKSEISGDLARLILGLMMPPAHYDAKQLKKAMEGAGTDEKALIEILATRTNAEIRAINEAYKEDYHKSLEDALSSDTSGHFRRILISLATGHREEGGENLDQAREDAQVAAEILEIADTPSGDKTSLETRFMTILCTRSYPHLRRVFQEFIKMTNYDVEHTIKKEMSGDVRDAFVAIVQSVKNKPLFFADKLYKSMKGAGTDEKTLTRIMVSRSEGDTSGDFLKALLALCGGED

SEQ ID NO: 842372 - protein, 732 aa, Homo sapiens; identical to SEQ ID NO: 842368

SEQ ID NO: 842373 - protein, 732 aa, Homo sapiens; identical to SEQ ID NO: 842368

SEQ ID NO: 842374 - protein, 525 aa, Homo sapiens
ATCPARSPRLSSRSAARCGCCWANGLRSSERCVLESLRPCVRLRPEASAARGFCCEPETMAKPAQGAKYRGSIHDFPGFDPNQDAEALYTAMKGFGSDKEAILDIITSRSNRQRQEVCQSYKSLYGKDLIADLNELDMLDIREIFRTKYEKSLYSMIKNDTSGEYKKTLLKLSGGDDDAAGQFFPEAAQVAYQMWELSAVARVELKGTVRPANDFNPDADAKALRKAMKGLGTDEDTIIDIITHRSNVQRQQIRQTFKSHFGRDLMTDLKSEISGDLARLILGLMMPPAHYDAKQLKKAMEGAGTDEKALIEILATRTNAEIRAINEAYKEDYHKSLEDALSSDTSGHFRRILISLATGHREEGGENLDQAREDAQVAAEILEIADTPSGDKTSLETRFMTILCTRSYPHLRRVFQEFIKMTNYDVEHTIKKEMSGDVRDAFVAIVQSVKNKPLFFADKLYKSMKGAGTDEKTLTRIMVSRSEIDLLNIRREFIEKYDKSLHQAIEGDTSGDFLKALLALCGGED

SEQ ID NO: 842375 - protein, 667 aa, Homo sapiens
ATCPARSPRLSSRSAARCGCCWANGLRSSERCVLESLRPCVRLRPEASAARGFCCEPETMAKPAQGAKYRGSIHDFPGFDPNQDAEALYTAMKGFGSDKEAILDIITSRSNRQRQEVCQSYKSLYGKDLIADLKYELTGKFERLIVGLMRPPAYCDAKEIKDAISGIGTDEKCLIEILASRTNEQMHQLVAAYKDAYERDLEADIIGDTSGHFQKMLVVLLQGTREEDDVVSEDLVQQDVQDLYEAGELKWGTDEAQFIYILGNRSKQHLRLVFDEYLKTTGKPIEASIRGELSGDFEKLMLAVVKCIRSTPEYFAERLFKAMKGLGTRDNTLIRIMVSRSELDMLDIREIFRTKYEKSLYSMIKNDTSGEYKKTLLKLSGGDDDAAGQFFPEAAQVAYQMWELSAVARVELKGTVRPANDFNPDADAKALRKAMKGLGTDEDTIIDIITHRSNVQRQQIRQTFKSHFGRDLMTDLKSEISGDLARLILGLMMPPAHYDAKQLKKAMEGAGTDEKALIEILATRTNAEIRAINEAYKEDYHKSLEDALSSDTSGHFRRILISLATGHREEGGENLDQAREDAQVAAEILEIADTPSGDKTSLETRFMTILCTRSYPHLRRVFQEFIKMTNYDVEHTIKKEMSGDVRDAFVAIGNWQGLREGLGALGT

SEQ ID NO: 842376 - protein, 332 aa, Homo sapiens [sequence omitted]

SEQ ID NO: 842377 - protein, 398 aa, Homo sapiens
CPSPFVCPSPFVCPSPFVCPSPFVCPSPFVKNDTSGEYKKTLLKLSGGDDDAAGQFFPEAAQVAYQMWELSAVARVELKGTVRPANDFNPDADAKALRKAMKGLGTDEDTIIDIITHRSNVQRQQIRQTFKSHFGRDLMTDLKSEISGDLARLILGLMMPPAHYDAKQLKKAMEGAGTDEKALIEILATRTNAEIRAINEAYKEDYHKSLEDALSSDTSGHFRRILISLATGHREEGGENLDQAREDAQVAAEILEIADTPSGDKTSLETRFMTILCTRSYPHLRRVFQEFIKMTNYDVEHTIKKEMSGDVRDAFVAIVQSVKNKPLFFADKLYKSMKGAGTDEKTLTRIMVSRSEIDLLNIRREFIEKYDKSLHQAIEGDTSGDFLKALLALCGGED

SEQ ID NO: 842378 - protein, 591 aa, Homo sapiens
ATCPARSPRLSSRSAARCGCCWANGLRSSERCVLESLRPCVRLRPEASAARGFCCEPETMAKPAQGAKYRGSIHDFPGFDPNQDAEALYTAMKGFGSDKEAILDIITSRSNRQRQEVCQSYKSLYGKDLIADLKYELTGKFERLIVGLMRPPAYCDAKEIKDAISGIGTDEKCLIEILASRTNEQMHQLVAAYKDAYERDLEADIIGDTSGHFQKMLVVLLQGTREEDDVVSEDLVQQDVQDLYEAGELKWGTDEAQFIYILGNRSKQHLRLVFDEYLKTTGKPIEASIRGELSGDFEKLMLAVVKCIRSTPEYFAERLFKAMKGLGTRDNTLIRIMVSRSELDMLDIREIFRTKYEKSLYSMIKNDTSGEYKKTLLKLSGGDDDAAGQFFPEAAQVAYQMWELSAVARVELKGTVRPANDFNPDADAKALRKAMKGLGTDEDTIIDIITHRSNVQRQQIRQTFKSHFGRDLMTDLKSEISGDLARLILGLMMPPAHYDAKIVPAPETKEGAGVGGGVGLGSYLQWSLGNAPTPTGHRGPSTAERLKNRSHRSCPPPLPSDPQAFPASSPCYSLCPGLGYVRSKNILNLCL

SEQ ID NO: 842379 - protein, 449 aa, Homo sapiens
ATCPARSPRLSSRSAARCGCCWANGLRSSERCVLESLRPCVRLRPEASAARGFCCEPETMAKPAQGAKYRGSIHDFPGFDPNQDAEALYTAMKGFGSDKEAILDIITSRSNRQRQEVCQSYKSLYGKDLIADLKYELTGKFERLIVGLMRPPAYCDAKEIKDAISGIGTDEKCLIEILASRTNEQMHQLVAAYKDAYERDLEADIIGDTSGHFQKMLVVLLQGTREEDDVVSEDLVQQDVQDLYEAGELKWGTDEAQFIYILGNRSKQHLRLVFDEYLKTTGKPIEASIRGELSGDFEKLMLAVVKCIRSTPEYFAERLFKAMKGLGTRDNTLIRIMVSRSELDMLDIREIFRTKYEKSLYSMIKNDTSGEYKKTLLKLSGGDDDAAGQFFPEAAQVAYQMWELSAVARVELKGTVRPANDFNPDADAKALRKAMKGLGTDENASSSAP

SEQ ID NO: 842380 - protein, 312 aa, Homo sapiens
ATCPARSPRLSSRSAARCGCCWANGLRSSERCVLESLRPCVRLRPEASAARGFCCEPETMAKPAQGAKYRGSIHDFPGFDPNQDAEALYTAMKGFGSDKEAILDIITSRSNRQRQEVCQSYKSLYGKDLIADLKYELTGKFERLIVGLMRPPAYCDAKEIKDAISGIGTDEKCLIEILASRTNEQMHQLVAAYKDAYERDLEADIIGDTSGHFQKMLVVLLQGTREEDDVVSEDLVQQDVQVNKHKLDKSMKGAGTDEKTLTRIMVSRSEIDLLNIRREFIEKYDKSLHQAIEGDTSGDFLKALLALCGGED

SEQ ID NO: 842381 - protein, 376 aa, Homo sapiens
ATCPARSPRLSSRSAARCGCCWANGLRSSERCVLESLRPCVRLRPEASAARGFCCEPETMAKPAQGAKYRGSIHDFPGFDPNQDAEALYTAMKGFGSDKEAILDIITSRSNRQRQEVCQSYKSLYGKDLIADLKYELTGKFERLIVGLMRPPAYCDAKEIKDAISGIGTDEKCLIEILASRTNEQMHQLVAAYKDAYERDLEADIIGDTSGHFQKMLVVLLQGTREEDDVVSEDLVQQDVQDLYEAGELKWGTDEAQFIYILGNRSKQHLRLVFDEYLKTTGKPIEASIRGELSGDFEKLMLAVVKCIRSTPEYFAERLFKAMKGLGTRDNTLIRIMVSRSELDMLDIREIFRTKYEKSLYSMIKNDTSGEYKKTI

SEQ ID NO: 842382 - protein, 131 aa, Homo sapiens
MAYPKFIESANIMDPDEQLETLHEALKLLPPAHCETLRYLMAHLKRVTLHEKENLMNAENLGIVFGPTLYKGAGTDEKTLTRIMVSRSEIDLLNIRREFIEKYDKSLHQAIEGDTSGDFLKALLALCGGED

SEQ ID NO: 842383 - protein, 312 aa, Homo sapiens; identical to SEQ ID NO: 842380

SEQ ID NO: 842384 - protein, 107 aa, Homo sapiens
ATCPARSPRLSSRSAARCGCCWANGLRSSERCVLESLRPCVRLRPEASAARGFCCEPETMAKPAQGAKYRGSIHDFPGFDPNHPLLQPLPWFGLCQIQKHPEPLSVK

SEQ ID NO: 842385 - protein, 109 aa, Homo sapiens
ATCPARSPRLSSRSAARCGCCWANGLRSSERCVLESLRPCVRLRPEASAARIFWGGPVESPASPHPASPIYFLGGDKAQDVVSTVIPEHACTPSPANRGEEVGGVSLCL

SEQ ID NO: 842386 - protein, 87 aa, Homo sapiens
CACPPSRLHHSTSPSFMVDSRPGHCAPLLLKSSFLLGGTEALSNLPVSLSDAVFDEYLKTTGKPIEASIRGELSGDFEKLMLAVGMS

SEQ ID NO: 842387 - protein, 99 aa, Homo sapiens
LEDPRVVLSGDVRDAFVAIVQSVKNKPLFFADKLYKSMKGAGTDEKTLTRIMVSRSEIDLLNIRREFIEKYDKSLHQAIEGDTSGDFLKALLALCGGED

SEQ ID NO: 842388 - protein, 732 aa, Homo sapiens; identical to SEQ ID NO: 842368

SEQ ID NO: 842389 - protein, 432 aa, Homo sapiens
MLAVVKCIRSTPEYFAERLFKAMKGLGTRDNTLIRIMVSRSELDMLDIREIFRTKYEKSLYSMIKNDTSGEYKKTLLKLSGGDDDAAGQFFPEAAQVAYQMWELSAVARVELKGTVRPANDFNPDADAKALRKAMKGLGTDEDTIIDIITHRSNVQRQQIRQTFKSHFGRDLMTDLKSEISGDLARLILGLMMPPAHYDAKQLKKAMEGAGTDEKALIEILATRTNAEIRAINEAYKEDYHKSLEDALSSDTSGHFRRILISLATGHREEGGENLDQAREDAQVAAEILEIADTPSGDKTSLETRFMTILCTRSYPHLRRVFQEFIKMTNYDVEHTIKKEMSGDVRDAFVAIVQSVKNKPLFFADKLYKSMKGAGTDEKTLTRIMVSRSEIDLLNIRREFIEKYDKSLHQAIEGDTSGDFLKALLALCGGED

SEQ ID NO: 842390 - protein, 753 aa, Homo sapiens
ATCPARSPRLSSRSAARCGCCWANGLRSSERCVLESLRPCVRLRPEASAARGFCCEPETMAKPAQGAKYRGSIHDFPGFDPNQDAEALYTAMKGFGSDKEAILDIITSRSNRQRQEVCQSYKSLYGKDLIADLKYELTGKFERLIVGLMRPPAYCDAKEIKDAISGIGTDEKCLIEILASRTNEQMHQLVAAYKDAYERDLEADIIGDTSGHFQKMLVVLLQGTREEDDVVSEDLVQQDVQDLYEAGELKWGTDEAQFIYILGNRSKQHLRLVFDEYLKTTGKPIEASIRGELSGDFEKLMLAVVKCIRSTPEYFAERLFKAMKGLGTRDNTLIRIMVSRSELDMLDIREIFRTKYEKSLYSMIKNDTSGEYKKTLLKLSGGDDDAAGQFFPEAAQVAYQMWELSAVARVELKGTVRPANDFNPDADAKALRKAMKGLGTDEDTIIDIITHRSNVQRQQIRQTFKSHFGRDLMTDLKSEISGDLARLILGLMMPPAHYDAKQLKKAMEGAGTDEKALIEILATRTNAEIRAINEAYKEDYHKSLEDALSSDTSGHFRRILISLATGHREEGGENLDQAREDAQVAAEILEIADTPSGDKTSLETRFMTILCTRSYPHLRRVFQEFIKMTNYDVEHTIKKEMSGDVRDAFVAIVQSVKNKPLFFADKLYKSMKGAGTDEKTLTRIMVSRSEIDLLNIRREFIEKYDKSLHQAIEGDTSGDFLKALLALCGGRARVLDQEFGCLGSNLHLPCTCF

SEQ ID NO: 842391 - protein, 332 aa, Homo sapiens [sequence omitted]

SEQ ID NO: 842392 - protein, 666 aa, Homo sapiens
ATCPARSPRLSSRSAARCGCCWANGLRSSERCVLESLRPCVRLRPEASAARGFCCEPETMAKPAQGAKYRGSIHDFPGFDPNQDAEALYTAMKGFGSDKEAILDIITSRSNRQRQEVCQSYKSLYGKDLIADLKYELTGKFERLIVGLMRPPAYCDAKEIKDAISGIGTDEKCLIEILASRTNEQMHQLVAAYKDAYERDLEADIIGDTSGHFQKMLVVLLQGTREEDDVVSEDLVQQDVQDLYEAGELKWGTDEAQFIYILGNRSKQHLRLVFDEYLKTTGKPIEASIRGELSGDFEKLMLAVVKCIRSTPEYFAERLFKAMKGLGTRDNTLIRIMVSRSELDMLDIREIFRTKYEKSLYSMIKNDTSGEYKKTLLKLSGGDDDAAGQFFPEAAQVAYQMWELSAVARVELKGTVRPANDFNPDADAKALRKAMKGLGTDEDTIIDIITHRSNVQRQQIRQTFKSHFGRDLMTDLKSEISGDLARLILGLMMPPAHYDAKQLKKAMEGAGTDEKALIEILATRTNAEIRAINEAYKEDYHKSLEDALSSDTSGHFRRILISLATGHREEGGENLDQAREDAQVAAEILEIADTPSGDKTSLETRFMTILCTRSYPHLRRVFQEFIKMTNYDVEHTIKKEMSPTRCVCYFQDLSSHLASSRAWVRL

SEQ ID NO: 842393 - protein, 327 aa, Homo sapiens
FLTSSPLKGTVRPANDFNPDADAKALRKAMKGLGTDEDTIIDIITHRSNVQRQQIRQTFKSHFGRDLMTDLKSEISGDLARLILGLMMPPAHYDAKQLKKAMEGAGTDEKALIEILATRTNAEIRAINEAYKEDYHKSLEDALSSDTSGHFRRILISLATGHREEGGENLDQAREDAQVAAEILEIADTPSGDKTSLETRFMTILCTRSYPHLRRVFQEFIKMTNYDVEHTIKKEMSGDVRDAFVAIVQSVKNKPLFFADKLYKSMKGAGTDEKTLTRIMVSRSEIDLLNIRREFIEKYDKSLHQAIEGDTSGDFLKALLALCGGED

SEQ ID NO: 842394 - protein, 235 aa, Homo sapiens
MAEIIFALTFQGAGTDEKALIEILATRTNAEIRAINEAYKEDYHKSLEDALSSDTSGHFRRILISLATGHREEGGENLDQAREDAQVAAEILEIADTPSGDKTSLETRFMTILCTRSYPHLRRVFQEFIKMTNYDVEHTIKKEMSGDVRDAFVAIVQSVKNKPLFFADKLYKSMKGAGTDEKTLTRIMVSRSEIDLLNIRREFIEKYDKSLHQAIEGDTSGDFLKALLALCGGED

SEQ ID NO: 842395 - protein, 440 aa, Homo sapiens
ATCPARSPRLSSRSAARCGCCWANGLRSSERCVLESLRPCVRLRPEASAARGFCCEPETMAKPAQGAKYRGSIHDFPGFDPNQDAEALYTAMKGFGSDKEAILDIITSRSNRQRQEVCQSYKSLYGKDLIADLKYELTGKFERLIVGLMRPPAYCDAKEIKDAISGIGTDEKCLIEILASRTNEQMHQLVAAYKDAYERDLEADIIGDTSGHFQKMLVVLLQGTREEDDVVSEDLVQQDVQDLYEAGELKWGTDEAQFIYILGNRSKQHLRLVFDEYLKTTGKPIEASIRGELSGDFEKLMLAVVKCIRSTPEYFAERLFKAMKGLGTRDNTLIRIMVSRSELDMLDIREIFRTKYEKSLYSMIKNDTSGEYKKTLLKLSGGDDDAAGQFFPEAAQVAYQMWELSAVARVELKGTVRPANDFNPDADAKALRKAMKGLGT

SEQ ID NO: 842396 - protein, 99 aa, Homo sapiens; identical to SEQ ID NO: 842387

SEQ ID NO: 842397 - protein, 259 aa, Homo sapiens
ATCPARSPRLSSRSAARCGCCWANGLRSSERCVLESLRPCVRLRPEASAARGFCCEPETMAKPAQGAKYRGSIHDFPGFDPNQDAEALYTAMKGFGSDKEAILDIITSRSNRQRQEVCQSYKSLYGKDLIADLKYELTGKFERLIVGLMRPPAYCDAKEIKDAISGIGTDEKCLIEILASRTNEQMHQLVAAYKDAYERDLEADIIGDTSGHFQKMLVVLLQGTREEDDVVSEDLVQQDVQPLATASALVWAMSDPKTS

SEQ ID NO: 842398 - protein, 228 aa, Homo sapiens
ATCPARSPRLSSRSAARCGCCWANGLRSSERCVLESLRPCVRLRPEASAARGFCCEPETMAKPAQGAKYRGSIHDFPGFDPNQDAEALYTAMKGFGSDKEAILDIITSRSNRQRQEVCQSYKSLYGKDLIADLKYELTGKFERLIVGLMRPPAYCDAKEIKDAISGIGTDEKCLIEILASRTNEQMHQLVAAYKDAYERDLEADIIGDTSGHFQKMLVVLLQGTREDT

SEQ ID NO: 842399 - protein, 66 aa, Homo sapiens
CLGEMMSKWLLGPWLEGMALGCQAGTLLARILMGGLDELGIPLSQERRTSERRLLLVAAVLVGLCV

SEQ ID NO: 842400 - protein, 200 aa, Homo sapiens
ALFAFEMLCTMLGKLFEPYVVHVLPHLLLCFGDGNQYVREAADDCAKAVMSNLSAHGVKLVLPSLLAALEEESWRTKAGSVELLGAMAYCAPKQLSSCLPNIVPKLTEVLTDSHVKVQKAGQQALRQIGSVIRNPEILAIAPVLLDALTDPSRKTQKCLQTLLDTKFVHFIDAPSLALIMPIVQRAFQDRSTDTRKMAAQ

SEQ ID NO: 842401 - protein, 353 aa, Homo sapiens
PECSVEDSKLSLVLDKDEVAPQSAIHMDLPPERDGEKGRSTKPGFAMPKLALPKMKASKSGVSLPQRDVDPSLSSATAGGSFQDTEKASSDGGRGGLGATASATGSEGVNLHRPQVHIPSLGFAKPDLRSSKAKVEVSQPEADLPLPKHDLSTEGDSRGCGLGDVPVSQPCGEGIAPTPEDPLQPSCRKPDAEVLTVESPEEEAMTKYSQESWFKMPKFRMPSLRRSFRDRGGAGKLEVAQTQAPAATGGEAAAKVKEFLVSGSNVEAAMSLQLPEADAEVTASESKSSTDILRCDLDSTGLKLHLSTAGMTGDELSTSEVRIHPSKGPLPFQMPGMRLPETQVLPGEIDETP

SEQ ID NO: 842402 - protein, 272 aa, Homo sapiens
AAFAGRHGGLQGPEPLLPPPPRSPTSTHRGPVTATAKKVTAARVAVASVQGKMASATDSRYGQKESSDQNFDYMFKILIIGNSSVGKTSFLFRYADDSFTPAFVSTVGIDFKVKTIYRNDKRIKLQIWDTAGQERYRTITTAYYRGAMGFILMYDITNEESFNAVQDWSTQIKTYSWDNAQVLLVGNKCDMEDERVVSSERGRQLADHLGFEFFEASAKDNINVKQTFERLVDVICEKMSESLDTADPAVTGAKQGPQLSDQQVPPHQDCAC

SEQ ID NO: 842403 - protein, 196 aa, Homo sapiens
AAFAGRHGGLQGPEPLLPPPPRSPTSTHRGPVTATAKKVTAARVAVASVQGKDTAGQERYRTITTAYYRGAMGFILMYDITNEESFNAVQDWSTQIKTYSWDNAQVLLVGNKCDMEDERVVSSERGRQLADHLGFEFFEASAKDNINVKQTFERLVDVICEKMSESLDTADPAVTGAKQGPQLSDQQVPPHQDCAC

SEQ ID NO: 842404 - protein, 131 aa, Homo sapiens
FLFRYADDSFTPAFVSTVGIDFKVKTIYRNDKRIKLQIWVGPSWRAPARLGWIPVLGKAAPTSSISFLTGVIHLHTGHLSVRCPLCTGAETAPVFSHKHLILVPQFPHLQVLPCMRFQLDLGPHSLFLFVF

SEQ ID NO: 842405 - protein, 272 aa, Homo sapiens; identical to SEQ ID NO: 842402

SEQ ID NO: 842406 - protein, 233 aa, Homo sapiens
EFRVVAVASVQGKMASATDSRYGQKESSDQNFDYMFKILIIGNSSVGKTSFLFRYADDSFTPAFVSTVGIDFKVKTIYRNDKRIKLQIWDTAGQERYRTITTAYYRGAMGFILMYDITNEESFNAVQDWSTQIKTYSWDNAQVLLVGNKCDMEDERVVSSERGRQLADHLGFEFFEASAKDNINVKQTFERLVDVICEKMSESLDTADPAVTGAKQGPQLSDQQVPPHQDCAC

SEQ ID NO: 842407 - protein, 167 aa, Homo sapiens
AAFAGRHGGLQGPEPLLPPPPRSPTSTHRGPVTATAKKVTAARVAVASVQGKMASATDSRYGQKESSDQNFDYMFKILIIGNSSVGKTSFLFRYADDSFTPAFVSTVGIDFKVKTIYRNDKRIKLQIWDTAGQERYRTITTAYYRGAMGFILMYDITNEESFNAVQD

SEQ ID NO: 842408 - protein, 91 aa, Homo sapiens
IDPPKDITISNVTKDSVMVSWSPPVASFDYYRVSYRPTQVGRLDSSVVPNTVTEFTITRLNPATEYEISLNSVRGREESERICTLVHTGGN

SEQ ID NO: 842409 - protein, 105 aa, Homo sapiens [sequence omitted]

SEQ ID NO: 842410 - protein, 109 aa, Homo sapiens
MLQAGPVLGTSHSGSPRVCMSPSALCCAHTVWVVLSVESACVVATGMWKPWAACGSRCWCHSAQTRGRPLPLLYEALVPVTYISFPSFLPSEKCTVLGAHRKTLYTFTP

SEQ ID NO: 842411 - protein, 343 aa, Homo sapiens
MKMEEAVGKVEELIESEAPPKASEQETAKEEDGSVELESQVQKDGVADSTVISSMPCLLMELRRDSSESQLASTESDKPTTGRVYESDSSNHCMLSPSSSGHLADSDTLSSAEENEPSQAETAVEGDPSGVSGATVGRKSRRSRSESETSTMAAKKNRQSSDKQNGRVAKVKGHRSQKHKERIRLLRQKREAAARKKYNLLQDSSTSDSDLTCDSSTSSSDDDEEVSGSSKTITAEIPGHLDPGFLASDKTSAGNAPLNEEINIASSDSEVEIVGVQEHARCVHPRGGVIQSVSSWKHGSGTQYVSTRQTQSWTAVTPQQTWASPAEVVDLTLDEDSRRKYLL

SEQ ID NO: 842412 - protein, 156 aa, Homo sapiens
MSDTNSDPEVVNVDNLLAAAVVQEHSNSVGGQDTGATWRTSGLLEELNAEAGHLDPGFLASDKTSAGNAPLNEEINIASSDSEVEIVGVQEHARCVHPRGGVIQSVSSWKHGSGTQYVSTRQTQSWTAVTPQQTWASPAEVVDLTLDEDSRRKYLL

SEQ ID NO: 842413 - protein, 283 aa, Homo sapiens
MKMEEAVGKVEELIESEAPPKASEQETAKEEDGSVELESQVQKDGVADSTVISSMPCLLMELRRDSSESQLASTESDKPTTGRVYESDSSNHCMLSPSSSGHLADSDTLSSAEENEPSQAETAVEGDPSGVSGATVGRKSRRSRSESETSTMAAKKNRQSSDKQNGRVAKVKGHRSQKHKERIRLLRQKREAAARKKYNLLQDSSTSDSDLTCDSSTSSSDDDEEVSGSSKTITAEIPGHLDPGFLASDKTSAGNAPLNEEINIASSDSEVEIVGVQEHARCD

SEQ ID NO: 842414 - protein, 115 aa, Homo sapiens
YLCKKNEKACSKENMEGVAEYPFKKKITGAIHGLNQTSQQKPGIEMGLYQQRHCQFELKRTEKDAENEGKLLDFLDSVSKYVLQWSLPYPWGIHSKTPSRCLKPQIGRALGLLCF

SEQ ID NO: 842415 - protein, 1563 aa, Homo sapiens
GQTGPASTKMSATSWFLVSSSGARHRLPRELIFVGREECELMLQSRSVDKQHAVINYDQDRDEHWVKDLGSLNGTFVNDMRIPDQKYVTLKLNDVIRFGYDSNMYVLERVQHRVPEEALKHEKYTSQLQVSVKGLAPKRSEALPEHTPYCEASNPRPEKGDRRPGTEAASYRTPLYGQPSWWGEDDGSTLPDAQRQGEPYPERPKGPVQQDGELHGFRAPAEPQGCSFRREPSYFEIPTKETPQPSQPPEVPAHEMPTKDAEAGGGGAAPVVQSHASFTIEFDDCSPGKMKIKDHITKFSLRQRRPPGKEATPGEMVSAETKVADWLVQNDPSLLHRVGPGDDRHSTKSDLPVHTRTLKGHKHEDGTQSDSEDPLAKAASAAGVPLEASGEQVRLQRQIKRDPQELLHNQQAFVIEFFDEDTPRKKRSQSFTHSPSGDPKADKRRGPTPADRDRPSVPAPVQAGGRSSGPQRAGSLKREKTEERLGSPSPASRTPARPFGSVGRRSRLAQDFMAQCLRESSPAARPSPEKVPPVLPAPLTPHGTSPVGPPTPPPAPTDPQLTKARKQEEDDSLSDAGTYTIETEAQDTEVEEARKMIDQVFGVLESPELSRASSATFRPVIRGDRDESDDGGVAQRMALLQEFASRPLGAAPQAEHQGLPVPGSPGGQKWVSRWASLADSYSDPGLTEDGLGRRGGEPEGSLPVRMRRRLPQLPSERADSPAGPESSRRSGPGPPELDSEQPSRLFGQEELDPDSLSDASGSDGGRGPEPGVEPQDSRRRSPQEGPTWSRGRRSPRAPGEPTPASFFIGDQNGDAVLSRKPLAAPGDGEGLGQTAQPSPPARDGVYVSANGRMVIQLRPGRSPEPDGPAPAFLRQESFTKEPASGPPAPGKPPHISSHPLLQDLAATRAARMDFHSQDTHLILKETETALAALEARLLSNSVDAECEGGSTPRPPEDALSGDSDVDTASTVSLRSGKSGPSPTTPQPLRAQKEMSPSPPAAQDPGGTALVSAREQSSERQHHPLGPTDMGRGEPVRRSAIRRGHRPRGSLDWPSEERGPVLAHLPSSDVMASNHETPEATGAGRLGSRRKPAAPPPSPAAREEQSRSSASSQKGPQALTRSNSLSTPRPTRASRLRRARLGDASDTEAADGERGSLGNPEPVGRPAAEQAKKLSRLDILAMPRKRAGSFTGTSDPEAAPARTSFSGRSVELCCASRKPTMAEARAVSRKAANTATTTGPRQPFSRARSGSARYTSTTQTPRAGSSSRARSRAPGPRDTDDDEEEPDPYGFIVQTAEIAEIARLSQTLVKDVAILAQEIHDVAGDGDTLGSSEPAHSASLSNMPSTPASTISAREELVQRIPEASLNFQKVPPGSLNSRDFDQNMNDSCEDALANKTRPRNREEVIFDNLMLNPVSQLSQAIRENTEHLAEKMKILFQNTGRAWEDLEARINAENEVPILKTSNKEISSILKELRRVQKQLEVINAIVDPSGSLDLLTGNRSLASSAQPGLGKGRVAAQSPPSPASAEALLPALPLRNFPQRASCGPPSLPDPTFLPDAERFLI

SEQ ID NO: 842416 - protein, 1598 aa, Homo sapiens
GQTGPASTKMSATSWFLVSSSGARHRLPRELIFVGREECELMLQSRSVDKQHAVINYDQDRDEHWVKDLGSLNGTFVNDMRIPDQKYVTLKLNDVIRFGYDSNMYVLERVQHRVPEEALKHEKYTSQLQVSVKGLAPKRSEALPEHTPYCEASNPRPEKGDRRPGTEAASYRTPLYGQPSWWGEDDGSTLPDAQRQGEPYPERPKGPVQQDGELHGFRAPAEPQGCSFRREPSYFEIPTKETPQPSQPPEVPAHEMPTKDAEAGGGGAAPVVQSHASFTIEFDDCSPGKMKIKDHITKFSLRQRRPPGKEATPGEMVSAETKVADWLVQNDPSLLHRVGPGDDRHSTKSDLPVHTRTLKGHKHEDGTQSDSEDPLAKAASAAGVPLEASGEQVRLQRQIKRDPQELLHNQQAFVIEFFDEDTPRKKRSQSFTHSPSGDPKADKRRGPTPADRDRPSVPAPVQAGGRSSGPQRAGSLKREKTEERLGSPSPASRTPARPFGSVGRRSRLAQDFMAQCLRESSPAARPSPEKVPPVLPAPLTPHGTSPVGPPTPPPAPTDPQLTKARKQEEDDSLSDAGTYTIETEAQDTEVEEARKMIDQVFGVLESPELSRASSATFRPVIRGDRDESDDGGVAQRMALLQEFASRPLGAAPQAEHQGLPVPGSPGGQKWVSRWASLADSYSDPGLTEDGLGRRGGEPEGSLPVRMRRRLPQLPSERADSPAGPESSRRSGPGPPELDSEQPSRLFGQEELDPDSLSDASGSDGGRGPEPGVEPQDSRRRSPQEGPTWSRGRRSPRAPGEPTPASFFIGDQNGDAVLSRKPLAAPGDGEGLGQTAQPSPPARDGVYVSANGRMVIQLRPGRSPEPDGPAPAFLRQESFTKEPASGPPAPGKPPHISSHPLLQDLAATRAARMDFHSQDTHLILKETETALAALEARLLSNSVDAECEGGSTPRPPEDALSGDSDVDTASTVSLRSGKSGPSPTTPQPLRAQKEMSPSPPAAQDPGGTALVSAREQSSERQHHPLGPTDMGRGEPVRRSAIRRGHRPRGSLDWPSEERGPVLAHLPSSDVMASNHETPEATGAGRLGSRRKPAAPPPSPAAREEQSRSSASSQKGPQALTRSNSLSTPRPTRASRLRRARLGDASDTEAADGERGSLGNPEPVGRPAAEQAKKLSRLDILAMPRKRAGSFTGTSDPEAAPARTSFSGRSVELCCASRKPTMAEARAVSRKAANTATTTGPRQPFSRARSGSARYTSNTRRRQQGSDYTSTSEEEYGSRHGSPKHTRSHTSTATQTPRAGSSSRARSRAPGPRDTDDDEEEPDPYGFIVQTAEIAEIARLSQTLVKDVAILAQEIHDVAGDGDTLGSSEPAHSASLSNMPSTPASTISAREELVQRIPEASLNFQKVPPGSLNSRDFDQNMNDSCEDALANKTRPRNREEVIFDNLMLNPVSQLSQAIRENTEHLAEKMKILFQNTGRAWEDLEARINAENEVPILKTSNKEISSILKELRRVQKQLEVINAIVDPSGSLDLLTGNRSLASSAQPGLGKGRVAAQSPPSPASAEALLPALPLRNFPQRASCGPPSLPDPTFLPDAERFLI

SEQ ID NO: 842417 - protein, 397 aa, Homo sapiens
AVDVSMKGYWVGAPASTLPSPAALSPLPEGPWDCHRVLSAALFCSCFYNQFTHQDTRRRQQGSDYTSTSEEEYGSRHGSPKHTRSHTSTATQTPRAGSSSRARSRAPGPRDTDDDEEEPDPYGFIVQTAEIAEIARLSQTLVKDVAILAQEIHDVAGDGDTLGSSEPAHSASLSNMPSTPASTISAREELVQRIPEASLNFQKVPPGSLNSRDFDQNMNDSCEDALANKTRPRNREEVIFDNLMLNPVSQLSQAIRENTEHLAEKMKILFQNTGRAWEDLEARINAENEVPILKTSNKEISSILKELRRVQKQLEVINAIVDPSGSLDLLTGNRSLASSAQPGLGKGRVAAQSPPSPASAEALLPALPLRNFPQRASCGPPSLPDPTFLPDAERFLI

SEQ ID NO: 842418 - protein, 1598 aa, Homo sapiens; identical to SEQ ID NO: 842416

SEQ ID NO: 842419 - protein, 458 aa, Homo sapiens
GQTGPASTKMSATSWFLVSSSGARHRLPRELIFVGREECELMLQSRSVDKQHAVINYDQDRDEHWVKDLGSLNGTFVNDMRIPDQKYVTLKLNDVIRFGYDSNMYVLERVQHRVPEEALKHEKYTSQLQVSVKGLAPKRSEALPEHTPYCEASNPRPEKGDRRPGTEAASYRTPLYGQPSWWGEDDGSTLPDAQRQGEPYPERPKGPVQQDGELHGFRAPAEPQGCSFRREPSYFEIPTKETPQPSQPPEVPAHEMPTKDAEAGGGGAAPVVQSHASFTIEFDDCSPGKMKIKDHITKFSLRQRRPPGKEATPGEMVSAETKVADWLVQNDPSLLHRVGPGDDRHSTKSDLPVHTRTLKGHKHEDGTQSDSEDPLAKAASAAGVPLEASGEQVRLQRQIKRDPQELLHNQQAFVIEFFDEDTPRKKRSQSFTVHSFSGGLVAVFRKMVILYDLSWNLF

SEQ ID NO: 842420 - protein, 209 aa, Homo sapiens
EWEHREVRTLAESCVCSCGAGPGVGEGSLRQAPSPPAWLPPPDLGREQRVPDDQRAPSTPTAQRGASLGRAVMRGGLGQQQRVGDVALASWRILLWRQGGHSSVVRGLGATAGVVLGQGMEQGCLCLLGVTSSPGAPEGWLCVSPVPQRGQAACRHQLRPGQGRALGEGPGQPQWGKCERPWPGLLTARPFSPGPSLSVLAPPPVIAPP

SEQ ID NO: 842421 - protein, 1664 aa, Homo sapiens
EWEHREVRTLAESCVCSCGAGPGVGEGSLRQAPSPPAWLPPPDLGREQRVPDDQRAPSTPTAQRGASLGRAVMRGGLGQQQRVGDVALASWRILLWRQGGHSSVVRGLGATAGVVLGQGMEQGCLCLLGVTSSPGAPEGCCVSLQSRSVDKQHAVINYDQDRDEHWVKDLGSLNGTFVNDMRIPDQKYVTLKLNDVIRFGYDSNMYVLERVQHRVPEEALKHEKYTSQLQVSVKGLAPKRSEALPEHTPYCEASNPRPEKGDRRPGTEAASYRTPLYGQPSWWGEDDGSTLPDAQRQGEPYPERPKGPVQQDGELHGFRAPAEPQGCSFRREPSYFEIPTKETPQPSQPPEVPAHEMPTKDAEAGGGGAAPVVQSHASFTIEFDDCSPGKMKIKDHITKFSLRQRRPPGKEATPGEMVSAETKVADWLVQNDPSLLHRVGPGDDRHSTKSDLPVHTRTLKGHKHEDGTQSDSEDPLAKAASAAGVPLEASGEQVRLQRQIKRDPQELLHNQQAFVIEFFDEDTPRKKRSQSFTHSPSGDPKADKRRGPTPADRDRPSVPAPVQAGGRSSGPQRAGSLKREKTEERLGSPSPASRTPARPFGSVGRRSRLAQDFMAQCLRESSPAARPSPEKVPPVLPAPLTPHGTSPVGPPTPPPAPTDPQLTKARKQEEDDSLSDAGTYTIETEAQDTEVEEARKMIDQVFGVLESPELSRASSATFRPVIRGDRDESDDGGVAQRMALLQEFASRPLGAAPQAEHQGLPVPGSPGGQKWVSRWASLADSYSDPGLTEDGLGRRGGEPEGSLPVRMRRRLPQLPSERADSPAGPESSRRSGPGPPELDSEQPSRLFGQEELDPDSLSDASGSDGGRGPEPGVEPQDSRRRSPQEGPTWSRGRRSPRAPGEPTPASFFIGDQNGDAVLSRKPLAAPGDGEGLGQTAQPSPPARDGVYVSANGRMVIQLRPGRSPEPDGPAPAFLRQESFTKEPASGPPAPGKPPHISSHPLLQDLAATRAARMDFHSQDTHLILKETETALAALEARLLSNSVDAECEGGSTPRPPEDALSGDSDVDTASTVSLRSGKSGPSPTTPQPLRAQKEMSPSPPAAQDPGGTALVSAREQSSERQHHPLGPTDMGRGEPVRRSAIRRGHRPRGSLDWPSEERGPVLAHLPSSDVMASNHETPEATGAGRLGSRRKPAAPPPSPAAREEQSRSSASSQKGPQALTRSNSLSTPRPTRASRLRRARLGDASDTEAADGERGSLGNPEPVGRPAAEQAKKLSRLDILAMPRKRAGSFTGTSDPEAAPARTSFSGRSVELCCASRKPTMAEARAVSRKAANTATTTGPRQPFSRARSGSARYTSTTQTPRAGSSSRARSRAPGPRDTDDDEEEPDPYGFIVQTAEIAEIARLSQTLVKDVAILAQEIHDVAGDGDTLGSSEPAHSASLSNMPSTPASTISAREELVQRIPEASLNFQKVPPGSLNSRDFDQNMNDSCEDALANKTRPRNREEVIFDNLMLNPVSQLSQAIRENTEHLAEKMKILFQNTGRAWEDLEARINAENEVPILKTSNKEISSILKELRRVQKQLEVINAIVDPSGSLDLLTGNRSLASSAQPGLGKGRVAAQSPPSPASAEALLPALPLRNFPQRASCGPPSLPDPTFLPDAERFLI

SEQ ID NO: 842422 - protein, 1526 aa, Homo sapiens
PVRMRRRLPQLPSERADSPAGPESSRRSGPGPPELDSEQHRVPEEALKHEKYTSQLQVSVKGLAPKRSEALPEHTPYCEASNPRPEKGDRRPGTEAASYRTPLYGQPSWWGEDDGSTLPDAQRQGEPYPERPKGPVQQDGELHGFRAPAEPQGCSFRREPSYFEIPTKETPQPSQPPEVPAHEMPTKDAEAGGGGAAPVVQSHASFTIEFDDCSPGKMKIKDHITKFSLRQRRPPGKEATPGEMVSAETKVADWLVQNDPSLLHRVGPGDDRHSTKSDLPVHTRTLKGHKHEDGTQSDSEDPLAKAASAAGVPLEASGEQVRLQRQIKRDPQELLHNQQAFVIEFFDEDTPRKKRSQSFTHSPSGDPKADKRRGPTPADRDRPSVPAPVQAGGRSSGPQRAGSLKREKTEERLGSPSPASRTPARPFGSVGRRSRLAQDFMAQCLRESSPAARPSPEKVPPVLPAPLTPHGTSPVGPPTPPPAPTDPQLTKARKQEEDDSLSDAGTYTIETEAQDTEVEEARKMIDQVFGVLESPELSRASSATFRPVIRGDRDESDDGGVAQRMALLQEFASRPLGAAPQAEHQGLPVPGSPGGQKWVSRWASLADSYSDPGLTEDGLGRRGGEPEGSLPVRMRRRLPQLPSERADSPAGPESSRRSGPGPPELDSEQPSRLFGQEELDPDSLSDASGSDGGRGPEPGVEPQDSRRRSPQEGPTWSRGRRSPRAPGEPTPASFFIGDQNGDAVLSRKPLAAPGDGEGLGQTAQPSPPARDGVYVSANGRMVIQLRPGRSPEPDGPAPAFLRQESFTKEPASGPPAPGKPPHISSHPLLQDLAATRAARMDFHSQDTHLILKETETALAALEARLLSNSVDAECEGGSTPRPPEDALSGDSDVDTASTVSLRSGKSGPSPTTPQPLRAQKEMSPSPPAAQDPGGTALVSAREQSSERQHHPLGPTDMGRGEPVRRSAIRRGHRPRGSLDWPSEERGPVLAHLPSSDVMASNHETPEATGAGRLGSRRKPAAPPPSPAAREEQSRSSASSQKGPQALTRSNSLSTPRPTRASRLRRARLGDASDTEAADGERGSLGNPEPVGRPAAEQAKKLSRLDILAMPRKRAGSFTGTSDPEAAPARTSFSGRSVELCCASRKPTMAEARAVSRKAANTATTTGPRQPFSRARSGSARYTSNTRRRQQGSDYTSTSEEEYGSRHGSPKHTRSHTSTATQTPRAGSSSRARSRAPGPRDTDDDEEEPDPYGFIVQTAEIAEIARLSQTLVKDVAILAQEIHDVAGDGDTLGSSEPAHSASLSNMPSTPASTISAREELVQRIPEASLNFQKVPPGSLNSRDFDQNMNDSCEDALANKTRPRNREEVIFDNLMLNPVSQLSQAIRENTEHLAEKMKILFQNTGRAWEDLEARINAENEVPILKTSNKEISSILKELRRVQKQLEVINAIVDPSGSLDLLTGNRSLASSAQPGLGKGRVAAQSPPSPASAEALLPALPLRNFPQRASCGPPSLPDPTFLPDAERFLI

SEQ ID NO: 842423 - protein, 1598 aa, Homo sapiens; identical to SEQ ID NO: 842416

SEQ ID NO: 842424 - protein, 77 aa, Homo sapiens
WGPRCRPSLLQLVQRIPEASLNFQKVPPGSLNSRDFDQNMNDSCEDALANKTRPRNREEARCPLPPRSWVWGEQGRG

SEQ ID NO: 842425 - protein, 546 aa, Homo sapiens
GEWFSSRKIAAPVPLWAQPVRGRGCGREKEPAGYLGPRQPLSPASFALSSARLLPAAARALKVVKRPPGRIMVTPCPTSPSSPAARAGRRDNDQNLRAPVKKSRRPRLRRKQPLHPLNPCPLPGDSGICDLFESPSSGSDGAESPSAARGGSPLPGPAQPVAQLDLQTFRDYGQSCYAFRKAQESHFHPREALARQPQGGAGRASSTPPLFLSSQALSSPAGSALRAPGPATAQVPPRVEAQGAVEGRHRPHFTDGEKWGVDGLRDLPRPKLATGARERGIRFRVESGLLPNSGKLFNTPELLSSSAKWNPSPSFELLSPLREVTAESRCKLLSWLIPVHRQFGLSFESLCLTVNTLDRFLTTTPVAADCFQLLGVTSLLIACKQVEVHPPRVKQLLALCCGAFSRQQLCNLECIVLHKLHFTLGAPTISFFLEHFTHARVEAGQAEASEALEAQALARGVAELSLADYAFTSYSPSLLAICCLALADRMLRVSRPVDLRLGDHPEAALEDCMGKLQLLVAINSTSLTHMLPVQICEKCSLPPSSK

SEQ ID NO: 842426 - protein, 398 aa, Homo sapiens
GEWFSSRKIAAPVPLWAQPVRGRGCGREKEPAGYLGPRQPLSPASFALSSARLLPAAARALKVVKRPPGRIMVTPCPTSPSSPAARAGRRDNDQNLRAPVKKSRRPRLRRKQPLHPLNPCPLPGDSGICDLFESPSSGSDGAESPSAARGGSPLPGPAQPVAQLDLQTFRDYGQSCYAFRKAQESHFHPREALARQPQVTAESRCKLLSWLIPVHRQFGLSFESLCLTVNTLDRFLTTTPVAADCFQLLGVTSLLIACKQVEVHPPRVKQLLALCCGAFSRQQLCNLECIVLHKLHFTLGAPTISFFLEHFTHARVEAGQAEASEALEAQALARGVAELSLADYAFTSYSPSLLAICCLALADRMLRVSRPVDLRLGDHPEAALEDCMVPGPAAGPLP

SEQ ID NO: 842427 - protein, 421 aa, Homo sapiens
GEWFSSRKIAAPVPLWAQPVRGRGCGREKEPAGYLGPRQPLSPASFALSSARLLPAAARALKVVKRPPGRIMVTPCPTSPSSPAARAGRRDNDQNLRAPVKKSRRPRLRRKQPLHPLNPCPLPGDSGICDLFESPSSGSDGAESPSAARGGSPLPGPAQPVAQLDLQTFRDYGQSCYAFRKAQESHFHPREALARQPQVTAESRCKLLSWLIPVHRQFGLSFESLCLTVNTLDRFLTTTPVAADCFQLLGVTSLLIACKQVEVHPPRVKQLLALCCGAFSRQQLCNLECIVLHKLHFTLGAPTISFFLEHFTHARVEAGQAEASEALEAQALARGVAELSLADYAFTSYSPSLLAICCLALADRMLRVSRPVDLRLGDHPEAALEDCMGKLQLLVAINSTSLTHMLPVQICEKCSLPPSSK

SEQ ID NO: 842428 - protein, 202 aa, Homo sapiens
GEWFSSRKIAAPVPLWAQPVRGRGCGREKEPAGYLGPRQPLSPASFALSSARLLPAAARALKVVKRPPGRIMVTPCPTSPSSPAARAGRRDNDQNLRAPVKKSRRPRLRRKQPLHPLNPCPLPGDSGICDLFESPSSGSDGAESPSAARGGSPLPGPAQPVAQLDLQTFRDYGQSCYAFRKAQESHFHPREALARQPQVRCW

SEQ ID NO: 842429 - protein, 202 aa, Homo sapiens; identical to SEQ ID NO: 842428

SEQ ID NO: 842430 - protein, 911 aa, Homo sapiens
MAAAAASAPQQLSDEELFSQLRRYGLSPGPVTESTRPVYLKKLKKLREEEQQQHRSGGRGNKTRNSNNNNTAAATVAAAGPAAAAAAGMGVRPVSGDLSYLRTPGGLCRISASGPESLLGGPGGASAAPAAGSKVLLGFSSDESDVEASPRDQAGGGGRKDRASLQYRGLKAPPAPLAASEVTNSNSAERRKPHSWWGARRPAGPELQTPPGKDGAVEDEEGEGEDGEERDPETEEPLWASRTVNGSRLVPYSCRENYSDSEEEDDDDVASSRQVLKDDSLSRHRPRRTHSKPLPPLTAKSAGGRLETSVQGGGGLAMNDRAAAAGSLDRSRNLEEAAAAEQGGGCDQVDSSPVPRYRVNAKKLTPLLPPPLTDMDSTLDSSTGSLLKTNNHIGGGAFSVDSPRIYSNSLPPSAAVAASSSLRINHANHTGSNHTYLKNTYNKPKLSEPEEELLQQFKREEVSPTGSFSAHYLSMFLLTAACLFFLILGLTYLGMRGTGVSEDGELSIENPFGETFGKIQESEKTLMMNTLYKLHDRLAQLAGDHECGSSSQRTLSVQEAAAYLKDLGPEYEGIFNTSLQWILENGKDVGIRCVGFGPEEELTNITDVQFLQSTRPLMSFWCRFRRAFVTVTHRLLLLCLGVVMVCVVLRYMKYRWTKEEEETRQMYDMVVKIIDVLRSHNEACQENKDLQPYMPIPHVRDSLIQPHDRKKMKKVWDRAVDFLAANESRVRTETRRIGGADFLVWRWIQPSASCDKILVIPSKVWQGQAFHLDRRNSPPNSLTPCLKIRNMFDPVMEIGDQWHLAIQEAILEKCSDNDGIVHIAVDKNSREGCVYVKCLSPEYAGKAFKALHGSWFDGKLVTVKYLRLDRYHHRFPQALTSNTPLKPSNKHMNSMSHLRLRTGLTNSQGSS

SEQ ID NO: 842431 - protein, 911 aa, Homo sapiens; identical to SEQ ID NO: 842430

SEQ ID NO: 842432 - protein, 911 aa, Homo sapiens; identical to SEQ ID NO: 842430

SEQ ID NO: 842433 - protein, 911 aa, Homo sapiens; identical to SEQ ID NO: 842430

SEQ ID NO: 842434 - protein, 911 aa, Homo sapiens; identical to SEQ ID NO: 842430

SEQ ID NO: 842435 - protein, 504 aa, Homo sapiens
MSLICSISNEVPEHPCVSPVSNHVYERRLIEKYIAENGTDPINNQPLSEEQLIDIKVAHPIRPKPPSATSIPAILKALQDEWDAVMLHSFTLRQQLQTTRQELSHALYQHDAACRVIARLTKEVTAAREALATLKPQAGLIVPQAVPSSQPSVVGAGEPMDLGELVGMTPEIIQKLQDKATVLTTERKKRGKTVPEELVKPEELSKYRQVASHVGLHSASIPGILALDLCPSDTNKILTGGADKNVVVFDKSSEQILATLKGHTKKVTSVVFHPSQDLVFSASPDATIRIWSVPNASCVQVVRAHESAVTGLSLHATGDYLLSSSDDQYWAFSDIQTGRVLTKVTDETSGCSLTCAQFHPDGLIFGTGTMDSQIKIWDLKERTNVANFPGHSGPITSIAFSENGYYLATAADDSSVKLWDLRKLKNFKTLQLDNNFEVKSLIFDQSGTYLALGGTDVQIYICKQWTEILHFTEHSGLTTGVAFGHHAKFIASTGMDRSLKFYSL

SEQ ID NO: 842436 - protein, 114 aa, Homo sapiens
MSLICSISNEVPEHPCVSPVSNHVYERRLIEKYIAENGTDPINNQPLSEEQLIDIKVAHPIRPKPPSATSIPAILKALQDEWDAVMLQQLSLLAQAACRTNPRKFPKTSVVGAG

SEQ ID NO: 842437 - protein, 504 aa, Homo sapiens; identical to SEQ ID NO: 842435

SEQ ID NO: 842438 - protein, 504 aa, Homo sapiens; identical to SEQ ID NO: 842435

SEQ ID NO: 842439 - protein, 244 aa, Homo sapiens
DLEDPVSSPFVVFTFQDLVFSASPDATIRIWSVPNASCVQVVRAHESAVTGLSLHATGDYLLSSSDDQYWAFSDIQTGRVLTKVTDETSGCSLTCAQFHPDGLIFGTGTMDSQIKIWDLKERTNVANFPGHSGPITSIAFSENGYYLATAADDSSVKLWDLRKLKNFKTLQLDNNFEVKSLIFDQSGTYLALGGTDVQIYICKQWTEILHFTEHSGLTTGVAFGHHAKFIASTGMDRSLKFYSL

SEQ ID NO: 842440 - protein, 205 aa, Homo sapiens
MLAQTPELDRGGLSLHATGDYLLSSSDDQYWAFSDIQTGRVLTKVTDETSGCSLTCAQFHPDGLIFGTGTMDSQIKIWDLKERTNVANFPGHSGPITSIAFSENGYYLATAADDSSVKLWDLRKLKNFKTLQLDNNFEVKSLIFDQSGTYLALGGTDVQIYICKQWTEILHFTEHSGLTTGVAFGHHAKFIASTGMDRSLKFYSL

SEQ ID NO: 842441 - protein, 156 aa, Homo sapiens
WSLTCCEIAYPDSLFYVDLAAKDSQIKICDLMERTNVANFPGHSGPITSIAFSENGYYLATAADDSSVKLWDLRKLKNFKTLQLDNNFEVKSLIFDQSGTYLALGGTDVQIYICKQWTEILHFTEHSGLTTGVAFGHHAKFIASTGMDRSLKFYSL

SEQ ID NO: 842442 - protein, 221 aa, Homo sapiens
MSLICSISNEVPEHPCVSPVSNHVYERRLIEKYIAENGTDPINNQPLSEEQLIDIKVAHPIRPKPPSATSIPAILKALQDEWDAVMLHSFTLRQQLQTTRQELSHALYQHDAACRVIARLTKEVTAAREALATLKPQAGLIVPQAVPSSQPSVVGAGEPMDLGELVGMTPEIIQKLQDKATVLTTERKKRGKTVPEELVKPEELSKYRQVASHVEGLCRVL

SEQ ID NO: 842443 - protein, 109 aa, Homo sapiens
MYFSMMPPLINMIRDRGYTSLLRHRWDIHIISLWSEWWPENHGGMDHPHPCNSRPHGNGCGRKNCHPLKAQGRSPGPLPSCRSMDVVVAVPHPFCCSSCETGEAEPREL

SEQ ID NO: 842444 - protein, 220 aa, Homo sapiens
MSLICSISNEVPEHPCVSPVSNHVYERRLIEKYIAENGTDPINNQPLSEEQLIDIKVAHPIRPKPPSATSIPAILKALQDEWDAVMLHSFTLRQQLQTTRQELSHALYQHDAACRVIARLTKEVTAAREALATLKPQAGLIVPQAVPSSQPSVVGAGEPMDLGELVGMTPEIIQKLQDKDTVLTLERQEEDGKTVPEELVSRNSQNGGAPVGASAHPDRL

SEQ ID NO: 842445 - protein, 447 aa, Homo sapiens
MSLICSISNEVPEHPCVSPVSNHVYERRLIEKYIAENGTDPINNQPLSEEQLIDIKVAHPIRPKPPSATSIPAILKALQDEWDAVMLHSFTLRQQLQTTRQELSHALYQHDAACRVIARLTKEVTAAREALATLKPQAGLIVPQAVPSSQPSVVGAGEPMDLGELVGMTPEIIQKLQDKATVLTTERKKRGKTVPEELVKPEELSKYRQVASHVGLHSASIPGILALDLCPSDTNKILTGGADKNVVVFDKSSEQILATLKGHTKKVTSVVFHPSQDLVFSASPDATIRIWSVPNASCVQVVRAHESAVTGLSLHATGDYLLSSSDDQYWAFSDIQTGRVLTKVTDETSGCSLTCAQFHPDGLIFGTGTMDSQIKIWDLKVKSLIFDQSGTYLALGGTDVQIYICKQWTEILHFTEHSGLTTGVAFGHHAKFIASTGMDRSLKFYSL

SEQ ID NO: 842446 - protein, 495 aa, Homo sapiens [sequence omitted]

SEQ ID NO: 842447 - protein, 125 aa, Homo sapiens
MERTNVANFPGHSGPITSIAFSENGYYLATAADDSSVKLWDLRKLKNFKTLQLDNNFEVKSLIFDQSGTYLALGGTDVQIYICKQWTEILHFTEHSGLTTGVAFGHHAKFIASTGMDRSLKFYSL

SEQ ID NO: 842448 - protein, 127 aa, Homo sapiens
LVMGTEWPGKLATLVRSFKSQIFSENGYYLATAADDSSVKLWDLRKLKNFKTLQLDNNFEVKSLIFDQSGTYLALGGTDVQIYICKQWTEILHFTEHSGLTTGVAFGHHAKFIASTGMDRSLKFYSL

SEQ ID NO: 842449 - protein, 229 aa, Homo sapiens
VLSPCSWSLFLVCLAPFCSSIRLLWCVAFYGWCLCLSLFVLFLMSFGVLLFPTWLLSVPVGPFDLLLLLNYLSVGLFLAPSSLFLPLVYVGLFLVCSSSCFFPSPCVSLRVYVFFISLVWVFPFLCYVLFDVLLSRYCRFLCTFVFCFVSLVSFCYARLLSPCCWISLFGHLYGALMSLVSGVPTYCLVILCNPQRCDAILSRYFPELFCALTSVLMALSSLSSCAPVR

SEQ ID NO: 842450 - protein, 110 aa, Homo sapiens [sequence omitted]

SEQ ID NO: 842451 - protein, 111 aa, Homo sapiens
MHKDRHTRPCPPSSSLLASVVFKGASVRTVCCAVPPPPACVSSNAVLPSRQLCGGSCLDHLKADGWAWIRCCPPGSEEAALLLGPGHRLRQMDCLSQHPRTGTPYHRGSSG

SEQ ID NO: 842452 - protein, 246 aa, Homo sapiens
MCFPLISLILFLFGTCTAYWSGLLSSASVRLLSSLWLALKRPSELPKDIKMISPDLPFLTIVLIIVSWTTCGALAILLSYLYYVFKVVHLQASLTTFKNSQPVNPKHSRRSEKKSNHHKDSSIHHLRLSANDAEDSLRMHSTVINLLTWIVLLSMPSLIYWLKNLRYYFKLNPDPCKPLAFILIPTMAILGNTYTVSIKSSKLLKTTSQFPLPLAVGVIAFGSAHLYRLPCFVFIPLLLHALCNFM

SEQ ID NO: 842453 - protein, 178 aa, Homo sapiens
MCFPLISLILFLFGTCTAYWSGLLSSASVRLLSSLWLALKRPSELPKDIKMISPDLPFLTIVLIIVSWTTCGALAILLSYLYYVFKVVHLQASLTTFKNSQPVNPKHSRRSEKKSNHHKDSSIHHLRLSANDAEDSLRMHSTVINLLTWIVLLSMPSLIYWLKNLRYYFKLILLVRHI

SEQ ID NO: 842454 - protein, 585 aa, Homo sapiens
KVVTEPPVVTLLDKKEGEQAKALFEKVKKFRMHVEEGDILYTMYIRQTVLKVCKFLAILVYNLVYVEKISFLVACRVETSEVTGYASFCCNHTKAHLFSKLAFCYISFVCIYGLTCIYTLYWLFHRPLKEYSFRSVREETGMGDIPDVKNDFAFMLHLIDQYDSLYSKRFAVFLSEVSESRLKQLNLNHEWTPEKLRQKLQRNAAGRLELALCMLPGLPDTVFELSEVESLRLEAICDITFPPGLSQLVHLQELSLLHSPARLPFSLQVFLRDHLKVMRVKCEELREVPLWVFGLRGLEELHLEGLFPQELARAATLESLRELKQLKVLSLRSNAGKVPASVTDVAGHLQRLSLHNDGARLVALNSLKKLAALRELELVACGLERIPHAVFSLGALQELDLKDNHLRSIEEILSFQHCRKLVTLRLWHNQIAYVPEHVRKLRSLEQLYLSYNKLETLPSQLGLCSGLRLLDVSHNGLHSLPPEVGLLQNLQHLALSYNALEALPEELFFCRKLRTLLLGDNQLSQLSPHVGALRALSRLELKGNRLEALPEELGNCGGLKKAGLLVEDTLYQGLPAEVRDKMEEE

SEQ ID NO: 842455 - protein, 88 aa, Homo sapiens
GTARKHPKGGRPPILPAGGGLLASVGTARVHVLRGMTCRNGSLCTRFQDCPPACNSPSAAKTFLDQYPSSGSSREAFARGFTLLNSKP

SEQ ID NO: 842456 - protein, 307 aa, Homo sapiens
MEADKDDTQQILKEHSPDEFIKDEQNKGLIDEITKKNIQLKKEIQKLETELQEATKEFQIKEDIPETKMKFLSVETPENDSQLSNISCSFQVSSKVPYEIQKGQALITFEKEEVAQNVVSMSKHHVQIKDVNLEVTAKPVPLNSGVRFQVYVEVSKMKINVTEIPDTLREDQMRDKLELSFSKSRNGGGEVDRVDYDRQSGSAVITFVEIGVADKILKKKEYPLYINQTCHRVTVSPYTEIHLKKYQIFSGTSKRTVLLTGMEGIQMDEEIVEDLINIHFQRAKNGGGEVDVVKCSLGQPHIAYFEE

SEQ ID NO: 842457 - protein, 307 aa, Homo sapiens; identical to SEQ ID NO: 842456

SEQ ID NO: 842458 - protein, 147 aa, Homo sapiens
AWRASVPVAPCPGTAACTSWAALSRNGGGEVDRVDYDRQSGSAVITFVEIGVADKILKKKEYPLYINQTCHRVTVSPYTEIHLKKYQIFSGTSKRTVLLTGMEGIQMDEEIVEDLINIHFQRAKNGGGEVDVVKCSLGQPHIAYFEE

SEQ ID NO: 842459 - protein, 39 aa, Homo sapiens
LPNKDRLCPSQELSLNVGLILALHSISMALRPFSLTSFI

SEQ ID NO: 842460 - protein, 113 aa, Homo sapiens
FYINTDNVKQSLSKKRKALATSVLDILAKNLHKEVDSSSATQGAHQEHPSWKAPQDVVVEGTVTCREMLETKEEEQVREGKGAACCPPQRLLPLPDLEEFRSISRKIYEKPNS

SEQ ID NO: 842461 - protein, 587 aa, Homo sapiens
MESQGVPPGPYRATKLWNEVTTSFRAGMPLRKHRQHFKKYGNCFTAGEAVDWLYDLLRNNSNFGPEVTRQQTIQLLRKFLKNHVIEDIKGRWGSENVDDNNQLFRFPATSPLKTLPRRYPELRKNNIENFSKDKDSIFKLRNLSRRTPKRHGLHLSQENGEKIKHEIINEDQENAIDNRELSQEDVEEVWRYVILIYLQTILGVPSLEEVINPKQVIPQYIMYNMANTSKRGVVILQNKSDDLPHWVLSAMKCLANWPRSNDMNNPTYVGFERDVFRTIADYFLDLPEPLLTFEYYELFVNILVVCGYITVSDRSSGIHKIQDDPQSSKFLHLNNLNSFKSTECLLLSLLHREKNKEESDSTERLQISNPGFQERCAKKMQLVNLRNRRVSANDIMGGSCHNLIGLSNMHDLSSNSKPRCCSLEGIVDVPGNSSKEASSVFHQSFPNIEGQNNKLFLESKPKQEFLLNLHSEENIQKPFSAGFKRTSTLTVQDQEELCNGKCKSKQLCRSQSLLLRSSTRRNSYINTPVAEIIMKPNVGQGSTSVQTAMESELGESSATINKRLCKSTIELSENSLLPASSMLTGTQ

SEQ ID NO: 842462 - protein, 615 aa, Homo sapiens
MESQGVPPGPYRATKLWNEVTTSFRAGMPLRKHRQHFKKYGNCFTAGEAVDWLYDLLRNNSNFGPEVTRQQTIQLLRKFLKNHVIEDIKGRWGSENVDDNNQLFRFPATSPLKTLPRRYPELRKNNIENFSKDKDSIFKLRNLSRRTPKRHGLHLSQENGEKIKHEIINEDQENAIDNRELSQEDVEEVWRYVILIYLQTILGVPSLEEVINPKQVIPQYIMYNMANTSKRGVVILQNKSDDLPHWVLSAMKCLANWPRSNDMNNPTYVGFERDVFRTIADYFLDLPEPLLTFEYYELFVNILVVCGYITVSDRSSGIHKIQDDPQSSKFLHLNNLNSFKSTECLLLSLLHREKNKEESDSTERLQISNPGFQERCAKKMQLVNLRNRRVSANDIMGGSCHNLIGLSNMHDLSSNSKPRCCSLEGIVDVPGNSSKEASSVFHQSFPNIEGQNNKLFLESKPKQEFLLNLHSEENIQKPFSAGFKRTSTLTVQDQEELCNGKCKSKQLCRSQSLLLRSSTRRNSYINTPVAEIIMKPNVGQGSTSVQTAMESELGESSATINKRLCKSTIELSENSLLPASSMLTGTQSKAVAFNACNINFECLLTLCFAYLAFLP

SEQ ID NO: 842463 - protein, 615 aa, Homo sapiens; identical to SEQ ID NO: 842462

SEQ ID NO: 842464 - protein, 615 aa, Homo sapiens; identical to SEQ ID NO: 842462

SEQ ID NO: 842465 - protein, 166 aa, Homo sapiens [sequence omitted]

SEQ ID NO: 842466 - protein, 527 aa, Homo sapiens
MESQGVPPGPYRATKLWNEVTTSFRAGMPLRKHRQHFKKYGNCFTAGEAVDWLYDLLRNNSNFGPEVTRQQTIQLLRKFLKNHVIEDIKGRWGSENVDDNNQLFRFPATSPLKTLPRRYPELRKNNIENFSKDKDSIFKLRNLSRRTPKRHGLHLSQENGEKIKHEIINEDQENAIDNRELSQEDVEEVWRYVILIYLQTILGVPSLEEVINPKQVIPQYIMYNMANTSKRGVVILQNKSDDLPHWVLSAMKCLANWPRSNDMNNPTYVGFERDVFRTIADYFLDLPEPLLTFEYYELFVNILGLLQPHLERVAIDALQLCCLLLPPPNRRKLQLLMRMISRMSQNVDMPKLHDAMGTRSLMIHTFSRCVLCCAEEVDLDELLAGRLVSFLMDHHQEILQVPSYLQTAVEKHLDYLKKGHIENPGDGLFAPLPTYSYCKQISAQEFDEQKVSTSQAAIAELLENIIKNRSLPLKEKRKKLKQFQKEYPLIYQKRFPTTESEAALFGDKPTIKQPMLILRKPKFRSLR

SEQ ID NO: 842467 - protein, 811 aa, Homo sapiens
MESQGVPPGPYRATKLWNEVTTSFRAGMPLRKHRQHFKKYGNCFTAGEAVDWLYDLLRNNSNFGPEVTRQQTIQLLRKFLKNHVIEDIKGRWGSENVDDNNQLFRFPATSPLKTLPRRYPELRKNNIENFSKDKDSIFKLRNLSRRTPKRHGLHLSQENGEKIKHEIINEDQENAIDNRELSQEDVEEVWRYVILIYLQTILGVPSLEEVINPKQVIPQYIMYNMANTSKRGVVILQNKSDDLPHWVLSAMKCLANWPRSNDMNNPTYVGFERDVFRTIADYFLDLPEPLLTFEYYELFVNILVVCGYITVSDRSSGIHKIQDDPQSSKFLHLNNLNSFKSTECLLLSLLHREKNKEESDSTERLQISNPGFQERCAKKMQLVNLRNRRVSANDIMGGSCHNLIGLSNMHDLSSNSKPRCCSLEGIVDVPGNSSKEASSVFHQSFPNIEGQNNKLFLESKPKQEFLLNLHSEENIQKPFSAGFKRTSTLTVQDQEELCNGKCKSKQLCRSQSLLLRSSTRRNSYINTPVAEIIMKPNVGQGSTSVQTAMESELGESSATINKRLCKSTIELSENSLLPASSMLTGTQSLLQPHLERVAIDALQLCCLLLPPPNRRKLQLLMRMISRMSQNVDMPKLHDAMGTRSLMIHTFSRCVLCCAEEVDLDELLAGRLVSFLMDHHQEILQVPSYLQTAVEKHLDYLKKGHIENPGDGLFAPLPTYSYCKQISAQEFDEQKVSTSQAAIAELLENIIKNRSLPLKEKRKKLKQFQKEYPLIYQKRFPTTESEAALFGDKPTIKQPMLILRKPKFRSLR

SEQ ID NO: 842468 - protein, 394 aa, Homo sapiens
MYNMANTSKRGVVILQNKSDDLPHWVLSAMKCLANWPRSNDMNNPTYVGFERDVFRTIADYFLDLPEPLLTFEYYELFVNILVVCGYITVSDRSSGIHKIQDDPQSSKFLHLNNLNSFKSTECLLLSLLHREKNKEESDSTERLQISNPGFQERCAKKMQLVNLRNRRVSANDIMGGSCHNLIGLSNMHDLSSNSKPRCCSLEGIVDVPGNSSKEASSVFHQSFPNIEGQNNKLFLESKPKQEFLLNLHSEENIQKPFSAGFKRTSTLTVQDQEELCNGKCKSKQLCRSQSLLLRSSTRRNSYINTPVAEIIMKPNVGQGSTSVQTAMESELGESSATINKRLCKSTIELSENSLLPASSMLTGTQSKAVAFNACNINFECLLTLCFAYLAFLP

SEQ ID NO: 842469 - protein, 475 aa, Homo sapiens
MSPEVTCPRRGHLPRFHPRTWVEPVVASSQVAASLYDAGLLLVVKASYGTGGSSNHSASPSPRGALEDQQQRAISNFYIIYNLVVGLSPLLSAYGLGWLSDRYHRKISICMSLLGFLLSRLGLLLKVLLDWPVEVLYGAAALNGLFGGFSAFWSGVMALGSLGSSEGRRSVRLILIDLMLGLAGFCGSMASGHLFKQMAGHSGQGLILTACSVSCASFALLYSLLVLKVPESVAKPSQELPAVDTVSGTVGTYRTLDPDQLDQQYAVGHPPSPGKAKPHKTTIALLFVGAIIYDLAVVGTVDVIPLFVLREPLGWNQVQVGYGMAAGYTIFITSFLGVLVFSRCFRDTTMIMIGMVSFGSGALLLAFVKETYMFYIARAVMLFALIPVTTIRSAMSKLIKGSSYGKVFVILQLSLALTGVVTSTLYNKIYQLTMDMFVGSCFALSSFLSFLAIIPISIVAYKQVPLSPYGDIIEK

SEQ ID NO: 842470 - protein, 475 aa, Homo sapiens; identical to SEQ ID NO: 842469

SEQ ID NO: 842471 - protein, 109 aa, Homo sapiens
MPGAGTAEPRRLVQSGGAWSCTCRCCRAVPGGGAARRSLQRLPPSAVRQEDSLPPESQKHEIFLLFQQLATTSLLGKGQERRENSHHNISKGIHCQNLEYSTGQTFPPR

SEQ ID NO: 842472 - protein, 112 aa, Homo sapiens
ERETEREREREGCPETLSKSFTEIPIASVFSSVKIFGHDVRSTNRTDASPPHCACVPFPQQVPPHSWDQGSPPAPACIPILLVPFLPPALVLIVPFGPNSLNAQHMDSANSC

SEQ ID NO: 842473 - protein, 131 aa, Homo sapiens
MLSRLRVVSTTCTLACRHLHIKEKGKPLMLNPRTNKGMAFTLQERQMLGLQGLLPPKIETQDIQALRFHRNLKKMTSPLEKYIYIMGIQERNEKLFYRILQDDIESLMPIVYTPTVGLACSQYGHIFRRPK

SEQ ID NO: 842474 - protein, 584 aa, Homo sapiens
MLSRLRVVSTTCTLACRHLHIKEKGKPLMLNPRTNKGMAFTLQERQMLGLQGLLPPKIETQDIQALRFHRNLKKMTSPLEKYIYIMGIQERNEKLFYRILQDDIESLMPIVYTPTVGLACSQYGHIFRRPKGLFISISDRGHVRSIVDNWPENHVKAVVVTDGERILGLGDLGVYGMGIPVGKLCLYTACAGIRPDRCLPVCIDVGTDNIALLKDPFYMGLYQKRDRTQQYDDLIDEFMKAITDRYGRNTLIQFEDFGNHNAFRFLRKYREKYCTFNDDIQGTAAVALAGLLAAQKVISKPISEHKILFLGAGEAALGIANLIVMSMVENGLSEQEAQKKIWMFDKYGLLVKGRKAKIDSYQEPFTHSAPESIPDTFEDAVNILKPSTIIGVAGAGRLFTPDVIRAMASINERPVIFALSNPTAQAECTAEEAYTLTEGRCLFASGSPFGPVKLTDGRVFTPGQGNNVYIFPGVALAVILCNTRHISDSVFLEAAKALTSQLTDEELAQGRLYPPLANIQEVSINIAIKVTEYLYANKMAFRYPEPEDKAKYVKERTWRSEYDSLLPDVYEWPESASSPPVITE

SEQ ID NO: 842475 - protein, 837 aa, Homo sapiens
MLSRLRVVSTTCTLACRHLHIKEKGKPLMLNPRTNKGMAFTLQERQMLGLQGLLPPKIETQDIQALRFHRNLKKMTSPLEKYIYIMGIQERNEKLFYRILQDDIESLMPIVYTPTVGLACSQYGHIFRRPKGLFISISDRGHVRSIVDNWPENHVKAVVVTDGERILGLGDLGVYGMGIPVGKLCLYTACAGIRPDRCLPVCIDVGTDNIALLKDPFYMGLYQKRDRTQQYDDLIDEFMKAITDRYGRNTLIQFEDFGNHNAFRFLRKYREKYCTFNDDIQGTAAVALAGLLAAQKVISKPISEHKILFLGAGEAALGIANLIVMSMVENGLSEQEAQKKIWMFDKYGLLVKGRKAKIDSYQEPFTHSAPESIPDTFEDAVNILKPSTIIGVAGAGRLFTPDVIRAMASINERPVIFALSNPTAQAECTAEEAYTLTEGRCLFASGSPFGPVKLTDGRVFTPGQGNNVYIFPGVALAVILCNTRHISDSVFLEAAKALTSQLTDEELAQGRLYPPLANIQEVSINIAIKVKEKMLSRLRVVSTTCTLACRHLHIKEKGKPLMLNPRTNKGMAFTLQERQMLGLQGLLPPKIETQDIQALRFHRNLKKMTSPLEKYIYIMGIQERNEKLFYRILQDDIESLMPIVYTPTVGLACSQYGHIFRRPKGLFISISDRGHVRSIVDNWPENHVKAVVVTDGERILGLGDLGVYGMGIPVGKLCLYTACAGIRPDRCLPVCIDVGTDNIALLKDPFYMGLYQKRDRTQQYDDLIDEFMKAITDRYGRNTLIQFEDFGNHNAFRFLRKYREKYCTFNDDIQGTAAVALAGLLAAQKVISKPISE

SEQ ID NO: 842476 - protein, 718 aa, Homo sapiens
MLSRLRVVSTTCTLACRHLHIKEKGKPLMLNPRTNKGMAFTLQERQMLGLQGLLPPKIETQDIQALRFHRNLKKMTSPLEKYIYIMGIQERNEKLFYRILQDDIESLMPIVYTPTVGLACSQYGHIFRRPKGLFISISDRGHVRSIVDNWPENHVKAVVVTDGERILGLGDLGVYGMGIPVGKLCLYTACAGIRPDRCLPVCIDVGTDNIALLKDPFYMGLYQKRDRTQQYDDLIDEFMKAITDRYGRNTLIQFEDFGNHNAFRFLRKYREKYCTFNDDIQGTAAVALAGLLAAQKVISKPISEHKILFLGAGEAALGIANLIVMSMVENGLSEQEAQKKIWMFDKYGLLVKGRKAKIDSYQEPFTHSAPESIPDTFEDAVNILKPSTIIGVAGAGRLFTPDVIRAMASINERPVIFALSNPTAQAECTAEEAYTLTEGRCLFASGSPFGPVKLTDGRVFTPGQGNNVYIFPGVALAVILCNTRHISDSVFLEAAKALTSQLTDEELAQGRLYPPLANIQEVSINIAIKVKEKMLSRLRVVSTTCTLACRHLHIKEKGKPLMLNPRTNKGMAFTLQERQMLGLQGLLPPKIETQDIQALRFHRNLKKMTSPLEKYIYIMGIQERNEKLFYRILQDDIESLMPIVYTPTVGLACSQYGHIFRRPKGLFISISDRGHVRSIVDNWPENHVKAVVVTDGERILGLGDLGVYGMGIPVGSVY

SEQ ID NO: 842477 - protein, 414 aa, Homo sapiens
RNRRFSLFQYGKILSKLFEGWTKNSTAVILRITVQSSRFRYRGSFNSTFQRRHSSSHDLINQENVGGNHSAGVKKLFLFSMHSSSLYLGQDSTRHHSGRLVVDANLEASGAPIHKLDGTLGLDGGNWQHLHIKEKGKPLMLNPRTNKGMAFTLQERQMLGLQGLLPPKIETQDIQALRFHRNLKKMTSPLEKYIYIMGIQERNEKLFYRILQDDIESLMPIVYTPTVGLACSQYGHIFRRPKGLFISISDRGHVRSIVDNWPENHVKAVVVTDGERILGLGDLGVYGMGIPVGKLCLYTACAGIRPDRCLPVCIDVGTDNIALLKDPFYMGLYQKRDRTQQYDDLIDEFMKAITDRYGRNTLIQFEDFGNHNAFRFLRKYREKYCTFNDDIQGTAAVALAGLLAAQKVISKPIS

SEQ ID NO: 842478 - protein, 479 aa, Homo sapiens
MLSRLRVVSTTCTLACRHLHIKEKGKPLMLNPRTNKGMAFTLQERQMLGLQGLLPPKIETQDIQALRFHRNLKKMTSPLEKYIYIMGIQERNEKLFYRILQDDIESLMPIVYTPTVGLACSQYGHIFRRPKGLFISISDRGHVRSIVDNWPENHVKAVVVTDGERILGLGDLGVYGMGIPVGKLCLYTACAGIRPDRCLPVCIDVGTDNIALLKDPFYMGLYQKRDRTQQYDDLIDEFMKAITDRYGRNTLIQFEDFGNHNAFRFLRKYREKYCTFNDDIQGTAAVALAGLLAAQKVISKPISEHKILFLGAGEAALGIANLIVMSMVENGLSEQEAQKKIWMFDKYGLLVKGRKAKIDSYQEPFTHSAPESIPDTFEDAVNILKPSTIIGVAGAGRLFTPDVIRAMASINERPVIFALSNPTAQAECTAEEAYTLTEGRCLFASGSPFGPVKLTDGRVFTPGQGNNVYIFPGYRIPIC

SEQ ID NO: 842479 - protein, 584 aa, Homo sapiens; identical to SEQ ID NO: 842474

SEQ ID NO: 842480 - protein, 584 aa, Homo sapiens; identical to SEQ ID NO: 842474

SEQ ID NO: 842481 - protein, 304 aa, Homo sapiens
MLSRLRVVSTTCTLACRHLHIKEKGKPLMLNPRTNKGMAFTLQERQMLGLQGLLPPKIETQDIQALRFHRNLKKMTSPLEKYIYIMGIQERNEKLFYRILQDDIESLMPIVYTPTVGLACSQYGHIFRRPKGLFISISDRGHVRSIVDNWPENHVKAVVVTDGERILGLGDLGVYGMGIPVGKLCLYTACAGIRPDRCLPVCIDVGTDNIALLKDPFYMGLYQKRDRTQQYDDLIDEFMKAITDRYGRNTLIQFEDFGNHNAFRFLRKYREKYCTFNDDIQGTAAVALAGLLAAQKVISKPISE

SEQ ID NO: 842482 - protein, 114 aa, Homo sapiens
MLSRLRVVSTTCTLACRHLHIKEKGKPLMLNPRTNKGMAFTLQERQMLGLQGLLPPKIETQDIQALRFHRNLKKMTSPLEKILQDDIESLMPIVYTPTVGLACSQYGHIFRRPK

SEQ ID NO: 842483 - protein, 44 aa, Homo sapiens
LGFGLRSAALSSSMASVSSLSNTEGPGAGAAPSPVPGPVWNRKV

SEQ ID NO: 842484 - protein, 69 aa, Homo sapiens
HSDLRHWNPSVRVSESLLFQVSGPGQGRTLPTPHLRRLQKRESEQTRTVSSLITSTHDLERGALGQGWG

SEQ ID NO: 842485 - protein, 154 aa, Homo sapiens [sequence omitted]

SEQ ID NO: 842486 - protein, 238 aa, Homo sapiens
MLGTDRCVVEEWLSEFKALPDTQITSYAATLHRKKTLVPALYKVIQDSNNELLEPVCHQLFELYRSSEVRLKRFTLQFLPELMWVYLRLTVSRDRQSNGCIEALLLGIYNLEIADKDGNNKVLSFTIPSLSKPSIYHEPSTIGSMALTEGALCQHDLIRVVYSDLHPQRETFTAQNRFEVLSFLMLCYNSAIVYMPASSYQSLCRMGSRVCVSGFPRQHEKHWKELCGRIVLDPEFMV

SEQ ID NO: 842487 - protein, 156 aa, Homo sapiens
MWVYLRLTVSRDRQSNGCIEALLLGIYNLEIADKDGNNKVLSFTIPSLSKPSIYHEPSTIGSMALTEGALCQHDLIRVVYSDLHPQRETFTAQNRFEVLSFLMLCYNSAIVYMPASSYQSLCRMGSRVCVSGFPRQHEKHWKELCGRIVLDPEFMV

SEQ ID NO: 842488 - protein, 435 aa, Homo sapiens
MVGSDPEVGGPMRWLLSRRKGGGGGLRDGQGDGVEYVQPPGLTGEGDGGGHREFSRPPPSPRHTAESPFPFLHSTLSVPHPAPFQACPGPQQQKPHHLHPHILLAGSAAVPPRVLKAEMNNTAASPMSTATSSSGRSTGKSISFATELQSMMYSLGDARRPLHETAVLVEDVVHTQLINLLQQAAEVSQLRGARVITPEDLLFLMRKDKKKLRRLLKYMFIRDYKSKIVKGIDEDDLLEDKLSGSNNANKRQKIAQDFLNSIDQTGELLAMFEDDEIDEVKQERMERAERQTRIMDSAQYAEFCESRQLSFSKKASKFRDWLDCSSMEIKPNVVAMEILAYLAYETVAQLVDLALLVRQDMVTKAGDPFSHAISATFIQYHNSAESTAACGVEAHSDAIQPCHIREAIRRYSHRIGPLSPFTNAYRRNGMAFLAC

SEQ ID NO: 842489 - protein, 435 aa, Homo sapiens; identical to SEQ ID NO: 842488

SEQ ID NO: 842490 - protein, 435 aa, Homo sapiens; identical to SEQ ID NO: 842488

SEQ ID NO: 842491 - protein, 341 aa, Homo sapiens
PASLPPCSLISDCCASNQGDSVGVGPSEPGVRYNLMVRRFLSRCEKRKFRVGVTRFSRYSLGDARRPLHETAVLVEDVVHTQLINLLQQAAEVSQLRGARVITPEDLLFLMRKDKKKLRRLLKYMFIRDYKSKIVKGIDEDDLLEDKLSGSNNANKRQKIAQDFLNSIDQTGELLAMFEDDEIDEVKQERMERAERQTRIMDSAQYAEFCESRQLSFSKKASKFRDWLDCSSMEIKPNVVAMEILAYLAYETVAQLVDLALLVRQDMVTKAGDPFSHAISATFIQYHNSAESTAACGVEAHSDAIQPCHIREAIRRYSHRIGPLSPFTNAYRRNGMAFLAC

SEQ ID NO: 842492 - protein, 228 aa, Homo sapiens
PGALWLPLLPHAGRQEVGESQQPQASPSSHAAHSPKGRSHSTMPSARNSTNFISRQLVSRAENFPQATGFLAEKASLLTVPLRPTEPAVVIHLLQEAKKASKFRDWLDCSSMEIKPNVVAMEILAYLAYETVAQLVDLALLVRQDMVTKAGDPFSHAISATFIQYHNSAESTAACGVEAHSDAIQPCHIREAIRRYSHRIGPLSPFTISFSLTECLPQEWDGFSSLLM

SEQ ID NO: 842493 - protein, 435 aa, Homo sapiens; identical to SEQ ID NO: 842488

SEQ ID NO: 842494 - protein, 453 aa, Homo sapiens
MVGSDPEVGGPMRWLLSRRKGGGGGLRDGQGDGVEYVQPPGLTGEGDGGGHREFSRPPPSPRHTAESPFPFLHSTLSVPHPAPFQACPGPQQQKPHHLHPHILLAGSAAVPPRVLKAEMNNTAASPMSTATSSSGRSTGKSISFATELQSMIYHAGAQKLLDFGAFWMFRYSLGDARRPLHETAVLVEDVVHTQLINLLQQAAEVSQLRGARVITPEDLLFLMRKDKKKLRRLLKYMFIRDYKSKIVKGIDEDDLLEDKLSGSNNANKRQKIAQDFLNSIDQTGELLAMFEDDEIDEVKQERMERAERQTRIMDSAQYAEFCESRQLSFSKKASKFRDWLDCSSMEIKPNVVAMEILAYLAYETVAQLVDLALLVRQDMVTKAGDPFSHAISATFIQYHNSAESTAACGVEAHSDAIQPCHIREAIRRYSHRIGPLSPFTNAYRRNGMAFLAC

SEQ ID NO: 842495 - protein, 150 aa, Homo sapiens
PHFPQPHRTGVPTLSPALRRWALDSEALPFPAHSLPNDNALVSQKKKIKRERSSLGATGRSEKRTKSLCGRAVLSRRELFLGSSDPDALAQRDNVGHLRSVAHPFCAPVSNSAEQALIIRHHVSWKWMNNQGLPQRTNAPKCKVRSGSEY

SEQ ID NO: 842496 - protein, 128 aa, Homo sapiens
FIFILLLKNFWTILHYHHHHHYYYYYYYYLRWSLALSASLECSDTISAHCSLCLLGSSDLPTSGDPPSWDSQSAGITGMSHHTQPILHFLKINSKIILPSKRKSHQNFYWNWIHLKVILSGKNRCFRF

SEQ ID NO: 842497 - protein, 111 aa, Homo sapiens
NAQQDYHARSYFQSHVVPPLLRKTDQDHGGTGRDGWIVDYIHIFGQGQRYLNRRNWAGTGHSLQQVTGHDHYNADLKPIDGFNGRFGYRRNTPALRQSTSVFGEVTHFPLF

SEQ ID NO: 842498 - protein, 107 aa, Homo sapiens [sequence omitted]

SEQ ID NO: 842499 - protein, 107 aa, Homo sapiens
MTDLKQSHSVRLNDGPFMPVLGFGTYAPDHTPKSQAAEATKVAIDVGFRHIDSAYLYRQERGNILHHQALGYFLSGRIGSPGPRKVTEETWTGLCRSLHYSCTICYE

SEQ ID NO: 842500 - protein, 88 aa, Homo sapiens
ECAVVAAATTVAMNSVGEACTDMKREYDQCFNRWFAEKFLKGDSSGDPCTDLFKRYQQCVQKAIKEKEIPIEGLEFMGHGKEKPENSS

SEQ ID NO: 842501 - protein, 133 aa, Homo sapiens
MSLLFTETYLRYRMGLAPDDVPPQSLTSGLHMTEPIYINHDLTPPWFLPRSVALVRSEYSVGEACTDMKREYDQCFNRWFAEKFLKGDSSGDPCTDLFKRYQQCVQKAIKEKEIPIEGLEFMGHGKEKPENSS

SEQ ID NO: 842502 - protein, 133 aa, Homo sapiens; identical to SEQ ID NO: 842501

SEQ ID NO: 842503 - protein, 88 aa, Homo sapiens; identical to SEQ ID NO: 842500

SEQ ID NO: 842504 - protein, 144 aa, Homo sapiens
MSLLFTETYLRYRMGLAPDDVPPQSLTSGLHMTEPIYINHDLTPPWFLPRSVALVRSEYSVGEACTDMKREYDQCFNRWFAEKFLKGDSSGDPCTDLFKRYQQCVQVSPPASVPRPCILGAVSHHTHRILRGLGLDWKGGEKSQ

SEQ ID NO: 842505 - protein, 95 aa, Homo sapiens
RSGSECAEVSRLPGQCQYLGLPVADYFKQWINLKKAYSFAMGCWPKNGLLDMNKGLSLQHIGRPHSGIDDCKNIANIMKTLAYRGFIFKQTSKPF

SEQ ID NO: 842506 - protein, 422 aa, Homo sapiens
VGVRVRGGESVCCGLVVLAAAVQAAGNGRWGAGGAGPASAWPAPQSARAAPAAANCPERLLRPRETSGPAPGGSLPRWPRGGGVAMATASPAADGGRGRPWEGGLVSWPPAPPLTLPWTWMGPSWGQHPGHWGFPALTEPSASPAAGLGIFEVRRVLDASGCSMLAPLQTGAARFSSYLLSRARKVLGSHLFSPCGVPEFCSISTRKLAAHGFGASMAAMVSFPPQRYHYFLVLDFEATCDKPQIHPQEIIEFPILKLNGRTMEIESTFHMYVQPVVHPQLTPFCTELTGIIQAMVDGQPSLQQVLERVDEWMAKEGLLDPNVKSIFVTCGDWDLKVMLPGQCQYLGLPVADYFKQWINLKKAYSFAMGCWPKNGLLDMNKGLSLQHIGRPHSGIDDCKNIANIMKTLAYRGFIFKQTSKPF

SEQ ID NO: 842507 - protein, 259 aa, Homo sapiens
MLAPLQTGAARFSSYLLSRARKVLGSHLFSPCGVPEFCSISTRKLAAHGFGASMAAMVSFPPQRYHYFLVLDFEATCDKPQIHPQEIIEFPILKLNGRTMEIESTFHMYVQPVVHPQLTPFCTELTGIIQAMVDGQPSLQQVLERVDEWMAKEGLLDPNVKSIFVTCGDWDLKVMLPGQCQYLGLPVADYFKQWINLKKAYSFAMGCWPKNGLLDMNKGLSLQHIGRPHSGIDDCKNIANIMKTLAYRGFIFKQTSKPF

SEQ ID NO: 842508 - protein, 414 aa, Homo sapiens
VGVRVRGGESVCCGLVVLAAAVQAAGNGRWGAGGAGPASAWPAPQSARAAPAAANCPERLLRPRETSGPAPGGSLPRWPRGGGVAMATASPAADGGRGRPWEGGLVSWPPAPPLTLPWTWMGPSWGQHPGHWGFPALTEPSASPAAGLGIFEVRRVLDASGCSMLAPLQTGAARFSSYLLSRARKVLGSHLFSPCGVPEFCSISTRKLAAHGFGASMAAMVSFPPQRYHYFLVLDFEATCDKPQIHPQEIIEFPILKLNGRTMEIESTFHMYVQPVVHPQLTPFCTELTGIIQAMVDGQPSLQQVLERVDEWMAKEGLLDPNVKSIFVTCGDWDLKVMLPGQCQYLGLPVADYFKQWINLKKAYSFAMGCWPKNGLLDMNKGLSLQHIGRPHSGIGPRRLMRLPGMADLLSCSQ

SEQ ID NO: 842509 - protein, 371 aa, Homo sapiens
VGVRVRGGESVCCGLVVLAAAVQAAGNGRWGAGGAGPASAWPAPQSARAAPAAANCPERLLRPRETSGPAPGGSLPRWPRGGGVAMATASPAADGGRGRPWEGGLVSWPPAPPLTLPWTWMGPSWGQHPGHWGFPALTEPSASPAAGLGIFEVRRVLDASGCSMLAPLQTGAARFSSYLLSRARKVLGSHLFSPCGVPEFCSISTRKLAAHGFGASMAAMVSFPPQRYHYFLVLDFEATCDKPQIHPQEIIEFPILKLNGRTMEIESTFHMYVQPVVHPQLTPFCTELTGIIQAMVDGQPSLQQVLERVDEWMAKEGLLDPNVKSIFVTCGDWDLKVMLPGQCQYLGLPVADYFKQWINLKKTTARTLPTS

SEQ ID NO: 842510 - protein, 304 aa, Homo sapiens
VGVRVRGGESVCCGLVVLAAAVQAAGNGRWGAGGAGPASAWPAPQSARAAPAAANCPERLLRPRETSGPAPGGSLPRWPRGGGVAMATASPAADGGRGRPWEGGLVSWPPAPPLTLPWTWMGPSWGQHPGEIIEFPILKLNGRTMEIESTFHMYVQPVVHPQLTPFCTELTGIIQAMVDGQPSLQQVLERVDEWMAKEGLLDPNVKSIFVTCGDWDLKVMLPGQCQYLGLPVADYFKQWINLKKAYSFAMGCWPKNGLLDMNKGLSLQHIGRPHSGIDDCKNIANIMKTLAYRGFIFKQTSKPF

SEQ ID NO: 842511 - protein, 160 aa, Homo sapiens
MEIESTFHMYVQPVVHPQLTPFCTELTGIIQAMVDGQPSLQQVLERVDEWMAKEGLLDPNVKSIFVTCGDWDLKVMLPGQCQYLGLPVADYFKQWINLKKAYSFAMGCWPKNGLLDMNKGLSLQHIGRPHSGIDDCKNIANIMKTLAYRGFIFKQTSKPF

SEQ ID NO: 842512 - protein, 188 aa, Homo sapiens
NLARYEAGGVIGRGEIIEFPILKLNGRTMEIESTFHMYVQPVVHPQLTPFCTELTGIIQAMVDGQPSLQQVLERVDEWMAKEGLLDPNVKSIFVTCGDWDLKVMLPGQCQYLGLPVADYFKQWINLKKAYSFAMGCWPKNGLLDMNKGLSLQHIGRPHSGIDDCKNIANIMKTLAYRGFIFKQTSKPF

SEQ ID NO: 842513 - protein, 222 aa, Homo sapiens [sequence omitted]

SEQ ID NO: 842514 - protein, 113 aa, Homo sapiens
MAQELLILFSTQKLHCPQGPSDSAGEAKKSESKKEKTPPENTRDHNTWDQTELAYSFAMGCWPKNGLLDMNKGLSLQHIGRPHSGIDDCKNIANIMKTLAYRGFIFKQTSKPF

SEQ ID NO: 842515 - protein, 233 aa, Homo sapiens
VGVRVRGGESVCCGLVVLAAAVQAAGNGRWGAGGAGPASAWPAPQSARAAPAAANCPERLLRPRETSGPAPGGSLPRWPRGGGVAMATASPAADGGRGRPWEGGLVSWPPAPPLTLPWTWMGPSWGQHPGHWGFPALTEPSASPAAGLGIFEVRRVLDASGCSMLAPLQTGAARFSSYLLSRARKVLGSHLFSPCGVPEFCSISTRKLAAHGFGASMAAMVSFPPEDESVACR

SEQ ID NO: 842516 - protein, 123 aa, Homo sapiens
  misc_feature (1)..(1): Xaa can be any naturally occurring amino acid
  misc_feature (8)..(9): Xaa can be any naturally occurring amino acid
  misc_feature (20)..(20): Xaa can be any naturally occurring amino acid
  misc_feature (32)..(32): Xaa can be any naturally occurring amino acid
XKKGFRRXXNGQRKGLFEIXNVKVKFFVNLVXNWDLKVMLPGQCQYLGLPVADYFKQWINLKKAYSFAMGCWPKNGLLDMNKGLSLQHIGRPHSGIDDCKNIANIMKTLAYRGFIFKQTSKPF

SEQ ID NO: 842517 - protein, 422 aa, Homo sapiens; identical to SEQ ID NO: 842506

SEQ ID NO: 842518 - protein, 627 aa, Homo sapiens
VGVRVRGGESVCCGLVVLAAAVQAAGNGRWGAGGAGPASAWPAPQSARAAPAAANCPERLLRPRETSGPAPGGSLPRWPRGGGVAMATASPAADGGRGRPWEGGLVSWPPAPPLTLPWTWMGPSWGQHPGHWGFPALTEPSASPAAGLGIFEVRRVLDASGCSMLAPLQTGAARFSSYLLSRARKVLGSHLFSPCGVPEFCSISTRKLAAHGFGASMAAMVSFPPQRYHYFLVLDFEATCDKPQIHPQEIIEFPILKLNGRTMEIESTFHMYVQPVVHPQLTPFCTELTGIIQAMVDGQPSLQQVLERVDEWMAKEGLLDPNVKSIFVTCGDWDLKVMLPGQCQYLGLPVADYFKQWINLKKAYSFAMGCWPKNGLLDMNKGLSLQHIGRPHSGIGSALACLDSAWGEGAGSFLPELTPLEPQRHLRNWFLPDTRLFFSSNHRWKNGYMDGRLQEHCQHHEDTRLSRLHLQADIEAVLIGRGQDGAGQGSCLAQPRILLSLTRGEEGEWHSSVSRVSPAALWAHALGVGLCPCKGLATWPFWSRHFVPPIPTPQSQPSISPSHCGPGLGGPRHSPPPPWYTGFCGATKPLLCPLPSIVHGVWCPQGSRTDQAPPCVYPHPRCERATE

SEQ ID NO: 842519 - protein, 450 aa, Homo sapiens
VGVRVRGGESVCCGLVVLAAAVQAAGNGRWGAGGAGPASAWPAPQSARAAPAAANCPERLLRPRETSGPAPGGSLPRWPRGGGVAMATASPAADGGRGRPWEGGLVSWPPAPPLTLPWTWMGPSWGQHPGHWGFPALTEPSASPAAGLGIFEVRRVLDASGCSMLAPLQTGAARFSSYLLSRARKVLGSHLFSPCGVPEFCSISTRKLAAHGFGASMAAMVSFPPQRYHYFLVLDFEATCDKPQIHPQEIIEFPILKLNGRTMEIESTFHMYVQPVVHPQLTPFCTELTGIIQAMVDGQPSLQQVLERVDEWMAKEGLLDPNVKSIFVTCGDWDLKVMLPGQCQYLGLPVADYFKQWINLKKGSSPGTASGTSCYQSEEAQRKENTPGVKAYSFAMGCWPKNGLLDMNKGLSLQHIGRPHSGIDDCKNIANIMKTLAYRGFIFKQTSKPF

SEQ ID NO: 842520 - protein, 477 aa, Homo sapiens
VGVRVRGGESVCCGLVVLAAAVQAAGNGRWGAGGAGPASAWPAPQSARAAPAAANCPERLLRPRETSGPAPGGSLPRWPRGGGVAMATASPAADGGRGRPWEGGLVSWPPAPPLTLPWTWMGPSWGQHPGHWGFPALTEPSASPAAGLGIFEVRRVLDASGCSMLAPLQTGAARFSSYLLSRARKVLGSHLFSPCGVPEFCSISTRKLAAHGFGASMAAMVSFPPQRYHYFLVLDFEATCDKPQIHPQEIIEFPILKLNGRTMEIESTFHMYVQPVVHPQLTPFCTELTGIIQAMVDGQPSLQQVLERVDEWMAKEGLLDPNVKSIFVTCGDWDLKVMLPGQCQYLGLPVADYFKQWINLKKAYSFAMGCWPKNGLLDMNKGLSLQHIGRPHSGIGSALACLDSAWGEGAGSFLPELTPLEPQRHLRNWFLPDTRLFFSSNHRWKNGRWMDDCKNIANIMKTLAYRGFIFKQTSKPF

SEQ ID NO: 842521 - protein, 188 aa, Homo sapiens
DAWVDPRVGSECAEEIIEFPILKLNGRTMEIESTFHMYVQPVVHPQLTPFCTELTGIIQAMVDGQPSLQQVLERVDEWMAKEGLLDPNVKSIFVTCGDWDLKVMLPGQCQYLGLPVADYFKQWINLKKAYSFAMGCWPKNGLLDMNKGLSLQHIGRPHSGIDDCKNIANIMKTLAYRGFIFKQTSKPF

SEQ ID NO: 842522 - protein, 146 aa, Homo sapiens
RSGSECAEVSRLTGIIQAMVDGQPSLQQVLERVDEWMAKEGLLDPNVKSIFVTCGDWDLKVMLPGQCQYLGLPVADYFKQWINLKKAYSFAMGCWPKNGLLDMNKGLSLQHIGRPHSGIDDCKNIANIMKTLAYRGFIFKQTSKPF

SEQ ID NO: 842523 - protein, 131 aa, Homo sapiens
VGVRVRGGESVCCGLVVLAAAVQAAGNGRWGAGGAGPASAWPAPQSARAAPAAANCPERLLRPRETSGPAPGGSLPRWPRGGGVAMATASPAADGGRGRPWEGGLVSWPPAPPLTLPWTWMGPSWGQHPGF

SEQ ID NO: 842524 - protein, 182 aa, Homo sapiens
VGVRVRGGESVCCGLVVLAAAVQAAGNGRWGAGGAGPASAWPAPQSARAAPAAANCPERLLRPRETSGPAPGGSLPRWPRGGGVAMATASPAADGGRGRPWEGGLVSWPPAPPLTLPWTWMGPSWGQHPGVGDAEWPRQDWALVNACGVRVAVRRIYATWGAGPCAYPGCLLNLLSNVLAEG

SEQ ID NO: 842525 - protein, 37 aa, Homo sapiens
MLATQRLLGIQWHTSGSVAGGALSSPFQASQPPGRRW

SEQ ID NO: 842526 - protein, 143 aa, Homo sapiens
ANAGSSRRGRREQEFLHMAPGEVTITVRLIRSFEHRNFKPVVYHGVNLDQTVKEFIVFLKQDVPLRTNLPPPFRNYKYDALKIIHQAHKSKTNELVLSLEDDERLLLKEDSTLKAAGIASETEIAFFCEEDYRNYKANPISSW

SEQ ID NO: 842527 - protein, 110 aa, Homo sapiens
RELGSVLARCGDGTRGKGRGRRPKNGGPYVSFLSLNLARPEEAGSCISGQVNSETWEWRAGPAPPLGSRGDPRRWSLMSSVMVESWTGLPKGEAEASSSELLGQLRGPRT

SEQ ID NO: 842528 - protein, 81 aa, Homo sapiens
ANAGSSRRGRREQEFLHMAPGEVTITVRLIRSFEHRNFKPVVYHGVNLDQTVKEFIVFLKQDKLQEQDKEFLDVLHTDSLC

SEQ ID NO: 842529 - protein, 126 aa, Homo sapiens
MLLSLWRSACQPLGMVGVKVHYSGAWSSLCPLRGPLWQTWKTLPTAAAPCSCPLTLPRAGAPQLQRHCQGVAATAAAPSILWCRRPGLYPNGLGAPVCCRKHRSLGRLERPLSQPGRHRRPLFFLK

SEQ ID NO: 842530 - protein, 550 aa, Homo sapiens
MVPKADSGAFLLLFLLVLTVTEPLRPELRCNPGQFACRSGTIQCIPLPWQCDGWATCEDESDEANCPEVTGEVRPHHGKEAVDPRQGRARGGDPSHFHAVNVAQPVRFSSFLGKCPTGWHHYEGTASCYRVYLSGENYWDAAQTCQRLNGSLATFSTDQELRFVLAQEWDQPERSFGWKDQRKLWVGYQYVITGRNRSLEGRWEVAFKGSSEVFLPPDPIFASAMSENDNVFCAQLQCFHFPTLRHHDLHSWHAESCYEKSSFLCKRSQTCVDIKDNVVDEGFYFTPKGDDPCLSCTCHGGEPEMCVAALCERPQGCQQYRKDPKECCKFMCLDPDGNSLFDSMASGMRLVVSCISSFLILSLLLFMVHRLRQRRRERIESLIGANLHHFNLGRRIPGFDYGPDGFGTGLTPLHLSDDGEGGTFHFHDPPPPYTAYKYPDIGQPDDPPPPYEASIHPDSVFYDPADDDAFEPVEVSLPAPGDGGSEGALLRRLEQPLPTAGASLADLEDSADSSSALLVPPDPAQSGSTPAAEALPGGGRHSRSSLNTVV

SEQ ID NO: 842531 - protein, 420 aa, Homo sapiens
MVPKADSGAFLLLFLLVLTVTEPLRPELRCNPGQFACRSGTIQCIPLPWQCDGWATCEDESDEANCPEVTGEVRPHHGKEAVDPRQGRARGGDPSHFHAVNVAQPVRFSSFLGKCPTGWHHYEGTASCYRVYLSGENYWDAAQTCQRLNGSLATFSTDQELRFVLAQEWDQPERSFGWKDQRKLWVGYQYVITGRNRSLEGRWEVAFKGSSEVFLPPDPIFASAMSENDNVFCAQLQCFHFPTLRHHDLHSWHAESCYEKSSFLCKRSQTCVDIKDNVVDEGFYFTPKGDDPCLSCTCHGGEPEMCVAALCERPQGCQQYRKDPKECCKFMCLDPDDDAFEPVEVSLPAPGDGGSEGALLRRLEQPLPTAGASLADLEDSADSSSALLVPPDPAQSGSTPAAEALPGGGRHSRSSLNTVV

SEQ ID NO: 842532 - protein, 509 aa, Homo sapiens
MVPKADSGAFLLLFLLVLTVTEPLRPEVTGEVRPHHGKEAVDPRQGRARGGDPSHFHAVNVAQPVRFSSFLGKCPTGWHHYEGTASCYRVYLSGENYWDAAQTCQRLNGSLATFSTDQELRFVLAQEWDQPERSFGWKDQRKLWVGYQYVITGRNRSLEGRWEVAFKGSSEVFLPPDPIFASAMSENDNVFCAQLQCFHFPTLRHHDLHSWHAESCYEKSSFLCKRSQTCVDIKDNVVDEGFYFTPKGDDPCLSCTCHGGEPEMCVAALCERPQGCQQYRKDPKECCKFMCLDPDGNSLFDSMASGMRLVVSCISSFLILSLLLFMVHRLRQRRRERIESLIGANLHHFNLGRRIPGFDYGPDGFGTGLTPLHLSDDGEGGTFHFHDPPPPYTAYKYPDIGQPDDPPPPYEASIHPDSVFYDPADDDAFEPVEVSLPAPGDGGSEGALLRRLEQPLPTAGASLADLEDSADSSSALLVPPDPAQSGSTPAAEALPGGGRHSRSSLNTVV

SEQ ID NO: 842533 - protein, 550 aa, Homo sapiens; identical to SEQ ID NO: 842530

SEQ ID NO: 842534 - protein, 550 aa, Homo sapiens; identical to SEQ ID NO: 842530

SEQ ID NO: 842535 - protein, 550 aa, Homo sapiens; identical to SEQ ID NO: 842530

SEQ ID NO: 842536 - protein, 406 aa, Homo sapiens
MVPKADSGAFLLLFLLVLTVTEPLRPELRCNPGQFACRSGTIQCIPLPWQCDGWATCEDESDEANCPEVTGEVRPHHGKEAVDPRQGRARGGDPSHFHAVNVAQPVRFSSFLGKCPTGWHHYEGTASCYRVYLSGENYWDAAQTCQRLNGSLATFSTDQELRFVLAQEWDQPERSFGWKDQRKLWVGYQYVITGRNRSLEGRWEVAFKGSSEVFLPPDPIFASAMSENDNVFCAQLQCFHFPTLRHHDLHSWHAESCYEKSSFLCKRSQTCVDIKDNVVDEGFYFTPKGDDPCLSCTCHGGEPEMCVAALCERPQGCQQYRKDPKECCKFMCLDPDGNSLFDSMASGMRLVVSCISSFLILSLLLFMVHRLRQRRRERIESLIGANLHHLTSPQILLIRQRYDGLT

SEQ ID NO: 842537 - protein, 103 aa, Homo sapiens
GGAGRRGAGRAGRPPSCAQLESVPEVAAESVRQPAAQPKLFPAASPRLAQVQPRLTLRLARSPDPQSGLVRPPSRPGDDERRINGCQVASEGPRTTQQSPPRA

SEQ ID NO: 842538 - protein, 240 aa, Homo sapiens
MVPKADSGAFLLLFLLVLTVTEPLRPEVTGEVRPHHGKEAVDPRQGRARGGDPSHFHAVNVAQPVRFSSFLGKCPTGWHHYEGTASCYRVYLSGENYWDAAQTCQRLNGSLATFSTDQELRFVLAQEWDQPERSFGWKDQRKLWVGYQYVITGRNRSLEGRWEVAFKGSSEVFLPPDPIFASAMSENDNVFCAQLQCFHFPTLRHHDLHSWHAESCYEKSSFLCKRKAGFRYVAQAGLKL

SEQ ID NO: 842539 - protein, 550 aa, Homo sapiens; identical to SEQ ID NO: 842530

SEQ ID NO: 842540 - protein, 405 aa, Homo sapiens
DDQAHPAGHGVKQTVAIWVQTHELAALFGVLAVLLAALGPLTESSHTHLRLPSLEGRWEVAFKGSSEVFLPPDPIFASAMSENDNVFCAQLQCFHFPTLRHHDLHSWHAESCYEKSSFLCKRSQTCVDIKDNVVDEGFYFTPKGDDPCLSCTCHGGEPEMCVAALCERPQGCQQYRKDPKECCKFMCLDPDGNSLFDSMASGMRLVVSCISSFLILSLLLFMVHRLRQRRRERIESLIGANLHHFNLGRRIPGFDYGPDGFGTGLTPLHLSDDGEGGTFHFHDPPPPYTAYKYPDIGQPDDPPPPYEASIHPDSVFYDPADDDAFEPVEVSLPAPGDGGSEGALLRRLEQPLPTAGASLADLEDSADSSSALLVPPDPAQSGSTPAAEALPGGGRHSRSSLNTVV

SEQ ID NO: 842541 - protein, 180 aa, Homo sapiens
MLLSLWRSACQPLGMVGVKVHYSGAWSSLCPLRGPLWQTWKTLPTAAAPCSCPLTLPRAGAPQLQRHCQGVAATAAAPSILWCRRPGLYPNGLGAPVCCRKHRSLGRLERPLSQPGRHALPHVTGGLACVHRDHSPPSAKRSDGLHRASLRASETCIALDHCLLLYKWQKSDKIHSDRTC

SEQ ID NO: 842542 - protein, 550 aa, Homo sapiens; identical to SEQ ID NO: 842530

SEQ ID NO: 842543 - protein, 362 aa, Homo sapiens [sequence omitted]

SEQ ID NO: 842544 - protein, 183 aa, Homo sapiens [sequence omitted]

SEQ ID NO: 842545 - protein, 175 aa, Homo sapiens
MVPKADSGAFLLLFLLVLTVTEPLRPGAPRDGGGVGAGRRAGPGSPRDLLSPAAPSCRGRAWGRGGRGLARGPPGTLCGRLLELTWARGASDFVQLCCPGCCLWALPGSGGGQELRHGRTLSPVQRRSRAGDSGSQGHLVSQTSSQQWPSASLSVLETPRLDSGGCGCHSVRRCA

SEQ ID NO: 842546 - protein, 507 aa, Homo sapiens
SFPPLLSSPSAVGEGKVAVAAPCPGRSECARAKMAYIQLEPLNEGFLSRISGLLLCRWTCRHCCQKCYESSCCQSSEDEVEILGPFPAQTPPWLMASRSSDKDGDSVHTASEVPLTPRTNSPDGRRSSSDTSKSTYSLTRRISSLESRRPSSPLIDIKPIEFGVLSAKKEPIQPSVLRRTYNPDDYFRKFEPHLYSLDSNSDDVDSLTDEEILSKYQLGMLHFSTQYDLLHNHLTVRVIEARDLPPPISHDGSRQDMAHSNPYVKICLLPDQKNSKQTGVKRKTQKPVFEERYTFEIPFLEAQRRTLLLTVVDFDKFSRHCVIGKVSVPLCEVDLVKGGHWWKALIPSSQNEVELGELLLSLNYLPSAGRLNVDVIRAKQLLQTDVSQGSDPFVKIQLVHGLKLVKTKKTSFLRGTIDPFYNESFSFKVPQEELENASLVFTVFGHNMKSSNDFIGRIVIGQYSSGPSETNHWRRMLNTHRTAVEQWHSLRSRAECDRVSPASLEVT

SEQ ID NO: 842547 - protein, 470 aa, Homo sapiens
MLEPLNEGFLSRISGLLLCRWTCRHCCQKCYESSCCQSSEDEVEILGPFPAQTPPWLMASRSSDKDGDSVHTASEVPLTPRTNSPDGRRSSSDTSKSTYSLTRRISSLESRRPSSPLIDIKPIEFGVLSAKKEPIQPSVLRRTYNPDDYFRKFEPHLYSLDSNSDDVDSLTDEEILSKYQLGMLHFSTQYDLLHNHLTVRVIEARDLPPPISHDGSRQDMAHSNPYVKICLLPDQKNSKQTGVKRKTQKPVFEERYTFEIPFLEAQRRTLLLTVVDFDKFSRHCVIGKVSVPLCEVDLVKGGHWWKALIPSSQNEVELGELLLSLNYLPSAGRLNVDVIRAKQLLQTDVSQGSDPFVKIQLVHGLKLVKTKKTSFLRGTIDPFYNESFSFKVPQEELENASLVFTVFGHNMKSSNDFIGRIVIGQYSSGPSETNHWRRMLNTHRTAVEQWHSLRSRAECDRVSPASLEVT

SEQ ID NO: 842548 - protein, 168 aa, Homo sapiens
MGTFFAFMEKKNEVELGELLLSLNYLPSAGRLNVDVIRAKQLLQTDVSQGSDPFVKIQLVHGLKLVKTKKTSFLRGTIDPFYNESFSFKVPQEELENASLVFTVFGHNMKSSNDFIGRIVIGQYSSGPSETNHWRRMLNTHRTAVEQWHSLRSRAECDRVSPASLEVT

SEQ ID NO: 842549 - protein, 373 aa, Homo sapiens
MLEPLNEGFLSRISGLLLCRWTCRHCCQKCYESSCCQSSEDEVEILGPFPAQTPPWLMASRSSDKDGDSVHTASEVPLTPRTNSPDGRRSSSDTSKSTYSLTRRISSLESRRPSSPLIDIKPIEFGVLSAKKEPIQPSVLRRTYNPDDYFRKFEPHLYSLDSNSDDVDSLTDEEILSKYQLGMLHFSTQYDLLHNHLTVRVIEARDLPPPISHDGSRQDMAHSNPYVKICLLPDQKNSKQTGVKRKTQKPVFEERYTFEIPFLEAQRRTLLLTVVDFDKFSRHCVIGKVSVPLCEVDLVKGGHWWKALIPSSQNEVELGELLLSLNYLPSAGRLNVDVIRAKQLLQTDVSQGSAGAWTQTCENQEDVLLKGHN

SEQ ID NO: 842550 - protein, 507 aa, Homo sapiens; identical to SEQ ID NO: 842546

SEQ ID NO: 842551 - protein, 474 aa, Homo sapiens
MAYIQLEPLNEGFLSRISGLLLCRWTCRHCCQKCYESSCCQSSEDEVEILGPFPAQTPPWLMASRSSDKDGDSVHTASEVPLTPRTNSPDGRRSSSDTSKSTYSLTRRISSLESRRPSSPLIDIKPIEFGVLSAKKEPIQPSVLRRTYNPDDYFRKFEPHLYSLDSNSDDVDSLTDEEILSKYQLGMLHFSTQYDLLHNHLTVRVIEARDLPPPISHDGSRQDMAHSNPYVKICLLPDQKNSKQTGVKRKTQKPVFEERYTFEIPFLEAQRRTLLLTVVDFDKFSRHCVIGKVSVPLCEVDLVKGGHWWKALIPSSQNEVELGELLLSLNYLPSAGRLNVDVIRAKQLLQTDVSQGSDPFVKIQLVHGLKLVKTKKTSFLRGTIDPFYNESFSFKVPQEELENASLVFTVFGHNMKSSNDFIGRIVIGQYSSGPSETNHWRRMLNTHRTAVEQWHSLRSRAECDRVSPASLEVT

SEQ ID NO: 842552 - protein, 413 aa, Homo sapiens
MASRSSDKDGDSVHTASEVPLTPRTNSPDGRRSSSDTSKSTYSLTRRISSLESRRPSSPLIDIKPIEFGVLSAKKEPIQPSVLRRTYNPDDYFRKFEPHLYSLDSNSDDVDSLTDEEILSKYQLGMLHFSTQYDLLHNHLTVRVIEARDLPPPISHDGSRQDMAHSNPYVKICLLPDQKNSKQTGVKRKTQKPVFEERYTFEIPFLEAQRRTLLLTVVDFDKFSRHCVIGKVSVPLCEVDLVKGGHWWKALIPSSQNEVELGELLLSLNYLPSAGRLNVDVIRAKQLLQTDVSQGSDPFVKIQLVHGLKLVKTKKTSFLRGTIDPFYNESFSFKVPQEELENASLVFTVFGHNMKSSNDFIGRIVIGQYSSGPSETNHWRRMLNTHRTAVEQWHSLRSRAECDRVSPASLEVT

SEQ ID NO: 842553 - protein, 433 aa, Homo sapiens
MLEPLNEGFLSRISGLLLCRWTCRHCCQKCYESSCCQSSEDEVEILGPFPAQTPPWLMASRSSDKDGDSVHTASEVPLTPRTNSPDGRRSSSDTSKSTYSLTRRISSLESRRPSSPLIDIKPIEFGVLSAKKEPIQPSVLRRTYNPDDYFRKFEPHLYSLDSNSDDVDSLTDEEILSKYQLGMLHFSTQYDLLHNHLTVRVIEARDLPPPISHDGSRQDMAHSNPYVKICLLPDQKNSKQTGVKRKTQKPVFEERYTFEIPFLEAQRRTLLLTVVDFDKFSRHCVIGKVSVPLCEVDLVKGGHWWKALIPSSQNEVELGELLLSLNYLPSAGRLNVDVIRAKQLLQTDVSQGSDPFVKIQLVHGLKLVKTKKTSFLRGTIDPFYNESFSFKVPQEELENASLVFTGSNSPIPACELSSHPAHGISPWIPSPGN

SEQ ID NO: 842554 - protein, 121 aa, Homo sapiens
SHNFMLRMNKAPTAGFEAAAGSKTAHHLVYPESFRELGDNVSMVLVPLKTMNLEWVVSTTTTGAISHTYTPVLVKIRVKQDKILIYHPAFIKYVFDNWLQSHRRYPLTSILSVIFSMHVCD

SEQ ID NO: 842555 - protein, 1504 aa, Homo sapiens [sequence omitted]

SEQ ID NO: 842556 - protein, 1504 aa, Homo sapiens [sequence omitted]

SEQ ID NO: 842557 - protein, 1391 aa, Homo sapiens
MNSPVDPGARQALRKKPPERTPEDLNTIYSYLHGMEILSNLREHQLRLMSARARYERYSGNQVLFCSETIARCWYILLSGSVLVKGSMVLPPCSFGKQFGGKRGCDCLVLEPSEMIVVENAKDNEDSILQREIPARQSRRRFRKINYKGERQTITDDVEVNSYLSLPADLTKMHLTENPHPQVTHVSSSQSGCSIASDSGSSSLSDIYQATESEVGDVDLTRLPEGPVDSEDDEEEDEEIDRTDPLQGRDLVRECLEKEPADKTDDDIEQLLEFMHQLPAFANMTMSVRRELCSVMIFEVVEQAGAIILEDGQELDSWYVILNGTVEISHPDGKVENLFMGNSFGITPTLDKQYMHGIVRTKVDDCQFVCIAQQDYWRILNHVEKNTHKVEEEGEIVMVHEHRELDRSGTRKGHIVIKATPERLIMHLIEEHSIVDPTYIEDFLLTYRTFLESPLDVGIKLLEWFKIDSLRDKVTRIVLLWVNNHFNDFEGDPAMTRFLEEFEKNLEDTKMNGHLRLLNIACAAKAKWRQVVLQKASRESPLQFSLNGGSEKGFGIFVEGVEPGSKAADSGLKRGDQIMEVNGQNFENITFMKAVEILRNNTHLALTVKTNIFVFKELLFRTEQEKSGVPHIPKIAEKKSNRHSIQHVPGDIEQTSQEKGSKKVKANTVSGGRNKIRKILDKTRFSILPPKLFSDGGLSQSQDDSIVGTRHCRHSLAIMPIPGTLSSSSPDLLQPTTSMLDFSNPSDIPDQVIRVFKVDQQSCYIIISKDTTAKEVVFHAVHEFGLTGASDTYSLCEVSVTPEGVIKQRRLPDQFSKLADRIQLNGRYYLKNNMETETLCSDEDAQELVKESQLSMLQLSTIEVATQLSMRDFDLFRNIEPTEYIDDLFKLNSKTGNTHLKRFEDIVNQETFWVASEILTEANQLKRMKIIKHFIKIALHCRECKNFNSMFAIISGLNLASVARLRGTWEKLPSKYEKHLQDLQDIFDPSRNMAKYRNILSSQSMQPPIIPLFPVVKKDMTFLHEGNDSKVDGLVNFEKLRMISKEIRQVVRMTSANMDPAMMFRQRSLSQGSTNSNMLDVQGGAHKKRARRSSLLNAKKLYEDAQMARKVKQYLSSLDVETDEEKFQMMSLQWEPAYGTLTKNLSEKRSAKSSEMSPVPMRSAGQTTKAHLHQPHRVSQVLQVPAVNLHPIRKKGQTKDPALNTSLPQKVLGTTEEISGKKHTEDTISVASSLHSSPPASPQGSPHKVGSIISDHSSKISGQSCPGIGGAYLQKKILQITRSTAKRTDSTEKATEENRDRTSCENTTRKRMTSPFRRLRERMLSRERLVNSQKEDTDHNQATESCEKVKDVGSNIKDEKGSAIFNSNSQGNSNTLNCFYTRFKSKRRKTL

SEQ ID NO: 842558 - protein, 509 aa, Homo sapiens
MNSPVDPGARQALRKKPPERTPEDLNTIYSYLHGMEILSNLREHQLRLMSARARYERYSGNQVLFCSETIARCWYILLSGSVLVKGSMVLPPCSFGKQFGGKRGCDCLVLEPSEMIVVENAKDNEDSILQREIPARQSRRRFRKINYKGERQTITDDVEVNSYLSLPADLTKMHLTENPHPQVTHVSSSQSGCSIASDSGSSSLSDIYQATESEVGDVDLTRLPEGPVDSEDDEEEDEEIDRTDPLQGRDLVRECLEKEPADKTDDDIEQLLEFMHQLPAFANMTMSVRRELCSVMIFEVVEQAGAIILEDGQELDSWYVILNGTVEISHPDGKVENLFMGNSFGITPTLDKQYMHGIVRTKVDDCQFVCIAQQDYWRILNHVEKNTHKVEEEGEIVMVHEHRELDRSGTRKGHIVIKATPERLIMHLIEEHSIVDPTYIEDFLLTYRTFLESPLDVGIKLLEWFKIDSLRDKVGFIRGMKVILTQNFIHETFIVDRLPVYYDNKIQYT

SEQ ID NO: 842559 - protein, 397 aa, Homo sapiens
MNSPVDPGARQALRKKPPERTPEDLNTIYSYLHGMEILSNLREHQLRLMSARARYERYSGNQVLFCSETIARCWYILLSGSVLVKGSMVLPPCSFGKQFGGKRGCDCLVLEPSEMIVVENAKDNEDSILQREIPARQSRRRFRKINYKGERQTITDDVEVNSYLSLPADLTKMHLTENPHPQVTHVSSSQSGCSIASDSGSSSLSDIYQATESEVGDVDLTRLPEGPVDSEDDEEEDEEIDRTDPLQGRDLVRECLEKEPADKTDDDIEQLLEFMHQLPAFANMTMSVRRELCSVMIFEVVEQAGAIILEDGQELDSWYVILNGTVEISHPDGKVENLFMGNSFGITPTLDKQYMHGIVRTKVDDCQVRLSLWSSLLVCWFKVAEPVLSSSKENSFI

SEQ ID NO: 842560 - protein, 1674 aa, Homo sapiens
GTSCRSRGLASAQRSDPCLAVASMAPTLFQKLFSKRTGLGAPGRDARDPDCGFSWPLPEFDPSQIRLIVYQDCERRGRNVLFDSSVKRRNEDISVSDLNTIYSYLHGMEILSNLREHQLRLMSARARYERYSGNQVLFCSETIARCWYILLSGSVLVKGSMVLPPCSFGKQFGGKRGCDCLVLEPSEMIVVENAKDNEDSILQREIPARQSRRRFRKINYKGERQTITDDVEVNSYLSLPADLTKMHLTENPHPQVTHVSSSQSGCSIASDSGSSSLSDIYQATESEVGDVDLTRLPEGPVDSEDDEEEDEEIDRTDPLQGRDLVRECLEKEPADKTDDDIEQLLEFMHQLPAFANMTMSVRRELCSVMIFEVVEQAGAIILEDGQELDSWYVILNGTVEISHPDGKVENLFMGNSFGITPTLDKQYMHGIVRTKVDDCQFVCIAQQDYWRILNHVEKNTHKVEEEGEIVMVHEHRELDRSGTRKGHIVIKATPERLIMHLIEEHSIVDPTYIEDFLLTYRTFLESPLDVGIKLLEWFKIDSLRDKVTRIVLLWVNNHFNDFEGDPAMTRFLEEFEKNLEDTKMNGHLRLLNIACAAKAKWRQVVLQKASRESPLQFSLNGGSEKGFGIFVEGVEPGSKAADSGLKRGDQIMEVNGQNFENITFMKAVEILRNNTHLALTVKTNIFVFKELLFRTEQEKSGVPHIPKIAEKKSNRHSIQHVPGDIEQTSQEKGSKKVKANTVSGGRNKIRKILDKTRFSILPPKLFSDGGLSQSQDDSIVGTRHCRHSLAIMPIPGTLSSSSPDLLQPTTSMLDFSNPSDIPDQVIRVFKVDQQSCYIIISKDTTAKEVVFHAVHEFGLTGASDTYSLCEVSVTPEGVIKQRRLPDQFSKLADRIQLNGRYYLKNNMETETLCSDEDAQELVKESQLSMLQLSTIEVATQLSMRDFDLFRNIEPTEYIDDLFKLNSKTGNTHLKRFEDIVNQETFWVASEILTEANQLKRMKIIKHFIKIALHCRECKNFNSMFAIISGLNLASVARLRGTWEKLPSKYEKHLQDLQDIFDPSRNMAKYRNILSSQSMQPPIIPLFPVVKKDMTFLHEGNDSKVDGLVNFEKLRMISKEIRQVVRMTSANMDPAMMFRQRSLSQGSTNSNMLDVQGGAHKKRARRSSLLNAKKLYEDAQMARKVKQYLSSLDVETDEEKFQMMSLQWEPAYGTLTKNLSEKRSAKSSEMSPVPMRSAGQTTKAHLHQPHRVSQVLQVPAVNLHPIRKKGQTKDPALNTSLPQKVLGTTEEISGKKHTEDTISVASSLHSSPPASPQGSPHKGYTLIPSAKSDNLSDSSHSEISSRSSIVSNCSVDSMSAALQDERCSSQALAVPESTGALEKTEHASGIGDHSQHGPGWTLLKPSLIKCLAVSSSVSNEEISQEHIIIEAADSGRGSWTSCSSSSHDNFQSLPNPKSWDFLNSYRHTHLDDPIAEVEPTDSEPYSCSKSCSRTCGQCKGSLERKSWTSSSSLSDTYEPNYGTVKRRVLESTPAESSEGLDPKDATDPVYKTVTSSTEKGLIVYCVTSPKKDDRYREPPPTPPGYLGISLADLKEGPHTHLKPPDYSVAVQRSKMMHNSLSRLPPASLSSNLVACVPSKIVTQPQRHNLQPFHPKLGDVTDADSEADENEQVSAV

SEQ ID NO: 842561 - protein, 1588 aa, Homo sapiens
MNSPVDPGARQALRKKPPERTPEDLNTIYSYLHGMEILSNLREHQLRLMSARARYERYSGNQVLFCSETIARCWYILLSGSVLVKGSMVLPPCSFGKQFGGKRGCDCLVLEPSEMIVVENAKDNEDSILQREIPARQSRRRFRKINYKGERQTITDDVEVNSYLSLPADLTKMHLTENPHPQVTHVSSSQSGCSIASDSGSSSLSDIYQATESEVGDVDLTRLPEGPVDSEDDEEEDEEIDRTDPLQGRDLVRECLEKEPADKTDDDIEQLLEFMHQLPAFANMTMSVRRELCSVMIFEVVEQAGAIILEDGQELDSWYVILNGTVEISHPDGKVENLFMGNSFGITPTLDKQYMHGIVRTKVDDCQFVCIAQQDYWRILNHVEKNTHKVEEEGEIVMVHEHRELDRSGTRKGHIVIKATPERLIMHLIEEHSIVDPTYIEDFLLTYRTFLESPLDVGIKLLEWFKIDSLRDKVTRIVLLWVNNHFNDFEGDPAMTRFLEEFEKNLEDTKMNGHLRLLNIACAAKAKWRQVVLQKASRESPLQFSLNGGSEKGFGIFVEGVEPGSKAADSGLKRGDQIMEVNGQNFENITFMKAVEILRNNTHLALTVKTNIFVFKELLFRTEQEKSGVPHIPKIAEKKSNRHSIQHVPGDIEQTSQEKGSKKVKANTVSGGRNKIRKILDKTRFSILPPKLFSDGGLSQSQDDSIVGTRHCRHSLAIMPIPGTLSSSSPDLLQPTTSMLDFSNPSDIPDQVIRVFKVDQQSCYIIISKDTTAKEVVFHAVHEFGLTGASDTYSLCEVSVTPEGVIKQRRLPDQFSKLADRIQLNGRYYLKNNMETETLCSDEDAQELVKESQLSMLQLSTIEVATQLSMRDFDLFRNIEPTEYIDDLFKLNSKTGNTHLKRFEDIVNQETFWVASEILTEANQLKRMKIIKHFIKIALHCRECKNFNSMFAIISGLNLASVARLRGTWEKLPSKYEKHLQDLQDIFDPSRNMAKYRNILSSQSMQPPIIPLFPVVKKDMTFLHEGNDSKVDGLVNFEKLRMISKEIRQVVRMTSANMDPAMMFRQRSLSQGSTNSNMLDVQGGAHKKRARRSSLLNAKKLYEDAQMARKVKQYLSSLDVETDEEKFQMMSLQWEPAYGTLTKNLSEKRSAKSSEMSPVPMRSAGQTTKAHLHQPHRVSQVLQVPAVNLHPIRKKGQTKDPALKISGKKHTEDTISVASSLHSSPPASPQGSPHKGYTLIPSAKSDNLSDSSHSEISSRSSIVSNCSVDSMSAALQDERCSSQALAVPESTGALEKTEHASGIGDHSQHGPGWTLLKPSLIKCLAVSSSVSNEEISQEHIIIEAADSGRGSWTSCSSSSHDNFQSLPNPKSWDFLNSYRHTHLDDPIAEVEPTDSEPYSCSKSCSRTCGQCKGSLERKSWTSSSSLSDTYEPNYGTVKRRVLESTPAESSEGLDPKDATDPVYKTVTSSTEKGLIVYCVTSPKKDDRYREPPPTPPGYLGISLADLKEGPHTHLKPPDYSVAVQRSKMMHNSLSRLPPASLSSNLVACVPSKIVTQPQRHNLQPFHPKLGDVTDADSEADENEQVSAV

SEQ ID NO: 842562 - protein, 1148 aa, Homo sapiens
MNSPVDPGARQALRKKPPERTPEDLNTIYSYLHGMEILSNLREHQLRLMSARARYERYSGNQVLFCSETIARCWYILLSGSVLVKGSMVLPPCSFGKQFGGKRGCDCLVLEPSEMIVVENAKDNEDSILQREIPARQSRRRFRKINYKGERQTITDDVEVNSYLSLPADLTKMHLTENPHPQVTHVSSSQSGCSIASDSGSSSLSDIYQATESEVGDVDLTRLPEGPVDSEDDEEEDEEIDRTDPLQGRDLVRECLEKEPADKTDDDIEQLLEFMHQLPAFANMTMSVRRELCSVMIFEVVEQAGAIILEDGQELDSWYVILNGTVEISHPDGKVENLFMGNSFGITPTLDKQYMHGIVRTKVDDCQFVCIAQQDYWRILNHVEKNTHKVEEEGEIVMVHEHRELDRSGTRKGHIVIKATPERLIMHLIEEHSIVDPTYIEDFLLTYRTFLESPLDVGIKLLEWFKIDSLRDKVTRIVLLWVNNHFNDFEGDPAMTRFLEEFEKNLEDTKMNGHLRLLNIACAAKAKWRQVVLQKASRESPLQFSLNGGSEKGFGIFVEGVEPGSKAADSGLKRGDQIMEVNGQNFENITFMKAVEILRNNTHLALTVKTNIFVFKELLFRTEQEKSGVPHIPKIAEKKSNRHSIQHVPGDIEQTSQEKGSKKVKANTVSGGRNKIRKILDKTRFSILPPKLFSDGGLSQSQDDSIVGTRHCRHSLAIMPIPGTLSSSSPDLLQPTTSMLDFSNPSDIPDQVIRVFKVDQQSCYIIISKDTTAKEVVFHAVHEFGLTGASDTYSLCEVSVTPEGVIKQRRLPDQFSKLADRIQLNGRYYLKNNMETETLCSDEDAQELVKESQLSMLQLSTIEVATQLSMRDFDLFRNIEPTEYIDDLFKLNSKTGNTHLKRFEDIVNQETFWVASEILTEANQLKRMKIIKHFIKIALHCRECKNFNSMFAIISGLNLASVARLRGTWEKLPSKYEKHLQDLQDIFDPSRNMAKYRNILSSQSMQPPIIPLFPVVKKDMTFLHEGNDSKVDGLVNFEKLRMISKEIRQVVRMTSANMDPAMMFRQRSLSQGSTNSNMLDVQGGAHKKRARRSSLLNAKKLYEDAQMARKVKQYLSSLDVETDEEKFQMMSLQWEPAYGTCEYKFSFM

SEQ ID NO: 842563 - protein, 1067 aa, Homo sapiens
MNSPVDPGARQALRKKPPERTPEDLNTIYSYLHGMEILSNLREHQLRLMSARARYERYSGNQVLFCSETIARCWYILLSGSVLVKGSMVLPPCSFGKQFGGKRGCDCLVLEPSEMIVVENAKDNEDSILQREIPARQSRRRFRKINYKGERQTITDDVEVNSYLSLPADLTKMHLTENPHPQVTHVSSSQSGCSIASDSGSSSLSDIYQATESEVGDVDLTRLPEGPVDSEDDEEEDEEIDRTDPLQGRDLVRECLEKEPADKTDDDIEQLLEFMHQLPAFANMTMSVRRELCSVMIFEVVEQAGAIILEDGQELDSWYVILNGTVEISHPDGKVENLFMGNSFGITPTLDKQYMHGIVRTKVDDCQFVCIAQQDYWRILNHVEKNTHKVEEEGEIVMVHEHRELDRSGTRKGHIVIKATPERLIMHLIEEHSIVDPTYIEDFLLTYRTFLESPLDVGIKLLEWFKIDSLRDKVTRIVLLWVNNHFNDFEGDPAMTRFLEEFEKNLEDTKMNGHLRLLNIACAAKAKWRQVVLQKASRESPLQFSLNGGSEKGFGIFVEGVEPGSKAADSGLKRGDQIMEVNGQNFENITFMKAVEILRNNTHLALTVKTNIFVFKELLFRTEQEKSGVPHIPKIAEKKSNRHSIQHVPGDIEQTSQEKGSKKVKANTVSGGRNKIRKILDKTRFSILPPKLFSDGGLSQSQDDSIVGTRHCRHSLAIMPIPGTLSSSSPDLLQPTTSMLDFSNPSDIPDQVIRVFKVDQQSCYIIISKDTTAKEVVFHAVHEFGLTGASDTYSLCEVSVTPEGVIKQRRLPDQFSKLADRIQLNGRYYLKNNMETETLCSDEDAQELVKESQLSMLQLSTIEVATQLSMRDFDLFRNIEPTEYIDDLFKLNSKTGNTHLKRFEDIVNQETFWVASEILTEANQLKRMKIIKHFIKIALHCRECKNFNSMFAIISGLNLASVARLRGTWEKLPSKYEKHLQDLQDIFDPSRNMAKYRNILSSQSMQPPIIPLFPVVKKDMTFLHEGNDSKVDGLVNFEKLRMISKEIRQVVRMTSANMDPAMMFRQR

SEQ ID NO: 842564 - protein, 101 aa, Homo sapiens
DAQSFYQGRWSGRGCRDCENSWSRRQSFINISSRSCGAVLMRWACDFTKLLSSTWTLIQYPENAMIIARWALLADCPEKTKALRTTGVTAKREFNHRASHV

SEQ ID NO: 842565 - protein, 131 aa, Homo sapiens
NLVQDTLGSLPTILHVDDSLQAIKLQCIGKTVESQLYTNPDSRYILLPVVLHHLHIHLQEQKDLIMCARILSNVFCLIKKNSSEKSVLEEIDVIVASLLDILLRTILEITSRPQPSSSAMRFQFQDVTVRS

SEQ ID NO: 842566 - protein, 911 aa, Homo sapiens
MDSRPRAGCCEWLRCCGGGEARPRTVWLGHPEKRDQRYPRNVINNQKYNFFTFLPGVLFNQFKYFFNLYFLLLACSQFVPEMRLGALYTYWVPLGFVLAVTVIREAVEEIRCYVRDKEVNSQVYSRLTARGTVVGVVLYTGRELRSVMNTSNPRSKIGLFDLEVNCLTKILFGALVVVSLVMVALQHFAGRWYLQIIRFLLLFSNIIPISLRVNLDMGKIVYSWVIRRDSKIPGTVVRSSTIPEQLGRISYLLTDKTGTLTQNEMIFKRLHLGTVAYGLDSMDEVQSHIFSIYTQQSQDPPAQKGPTLTTKVRRTMSSRVHEAVKAIALCHNVTPVYESNGVTDQAEAEKQYEDSCRVYQASSPDEVALVQWTESVGLTLVGRDQSSMQLRTPGDQILNFTILQIFPFTYESKRMGIIVRDESTGEITFYMKGADVVMAGIVQYNDWLEEECGNMAREGLRVLVVAKKSLAEEQYQDFEARYVQAKLSVHDRSLKVATVIESLEMEMELLCLTGVEDQLQADVRPTLETLRNAGIKVWMLTGDKLETATCTAKNAHLVTRNQDIHVFRLVTNRGEAHLELNAFRRKHDCALVISGDSLEVCLKYYEYEFMELACQCPAVVCCRCAPTQKAQIVRLLQERTGKLTCAVGDGGNDVSMIQESDCGVGVEGKEGKQASLAADFSITQFKHLGRLLMVHGRNSYKRSAALSQFVIHRSLCISTMQAVFSSVFYFASVPLYQGFLIIGYSTIYTMFPVFSLVLDKDVKSEVAMLYPELYKDLLKGRPLSYKTFLIWVLISIYQGSTIMYGALLLFESEFVHIVAISFTSLILTELLMVALTIQTWHWLMTVAELLSLACYIASLVFLHEFIDVYFIATLSFLWKVSVITLVSCLPLYVLKYLRRRFSPPSYSKLTS

SEQ ID NO: 842567 - protein, 862 aa, Homo sapiens
ESNGVTDQAEAEKQYEDSCRVYQASSPDEDLLQIRSYVYAEEPNIDIHNFVGTFTREDSDPPISESLSIENTLWAGTVVASGTVVGVVLYTGRELRSVMNTSNPRSKIGLFDLEVNCLTKILFGALVVVSLVMVALQHFAGRWYLQIIRFLLLFSNIIPISLRVNLDMGKIVYSWVIRRDSKIPGTVVRSSTIPEQLGRISYLLTDKTGTLTQNEMIFKRLHLGTVAYGLDSMDEVQSHIFSIYTQQSQDPPAQKGPTLTTKVRRTMSSRVHEAVKAIALCHNVTPVYESNGVTDQAEAEKQYEDSCRVYQASSPDEVALVQWTESVGLTLVGRDQSSMQLRTPGDQILNFTILQIFPFTYESKRMGIIVRDESTGEITFYMKGADVVMAGIVQYNDWLEEECGNMAREGLRVLVVAKKSLAEEQYQDFEARYVQAKLSVHDRSLKVATVIESLEMEMELLCLTGVEDQLQADVRPTLETLRNAGIKVWMLTGDKLETATCTAKNAHLVTRNQDIHVFRLVTNRGEAHLELNAFRRKHDCALVISGDSLEVCLKYYEYEFMELACQCPAVVCCRCAPTQKAQIVRLLQERTGKLTCAVGDGGNDVSMIQESDCGVGVEGKEGKQASLAADFSITQFKHLGRLLMVHGRNSYKRSAALSQFVIHRSLCISTMQAVFSSVFYFASVPLYQGFLIIGYSTIYTMFPVFSLVLDKDVKSEVAMLYPELYKDLLKGRPLSYKTFLIWVLISIYQGSTIMYGALLLFESEFVHIVAISFTSLILTELLMVALTIQTWHWLMTVAELLSLACYIASLVFLHEFIDVYFIATLSFLWKVSVITLVSCLPLYVLKYLRRRFSPPSYSKLTS

SEQ ID NO: 842568 - protein, 602 aa, Homo sapiens
MTRLFGSTNPCAAPVKAIALCHNVTPVYESNGVTDQAEAEKQYEDSCRVYQASSPDEVALVQWTESVGLTLVGRDQSSMQLRTPGDQILNFTILQIFPFTYESKRMGIIVRDESTGEITFYMKGADVVMAGIVQYNDWLEEECGNMAREGLRVLVVAKKSLAEEQYQDFEARYVQAKLSVHDRSLKVATVIESLEMEMELLCLTGVEDQLQADVRPTLETLRNAGIKVWMLTGDKLETATCTAKNAHLVTRNQDIHVFRLVTNRGEAHLELNAFRRKHDCALVISGDSLEVCLKYYEYEFMELACQCPAVVCCRCAPTQKAQIVRLLQERTGKLTCAVGDGGNDVSMIQESDCGVGVEGKEGKQASLAADFSITQFKHLGRLLMVHGRNSYKRSAALSQFVIHRSLCISTMQAVFSSVFYFASVPLYQGFLIIGYSTIYTMFPVFSLVLDKDVKSEVAMLYPELYKDLLKGRPLSYKTFLIWVLISIYQGSTIMYGALLLFESEFVHIVAISFTSLILTELLMVALTIQTWHWLMTVAELLSLACYIASLVFLHEFIDVYFIATLSFLWKVSVITLVSCLPLYVLKYLRRRFSPPSYSKLTS

SEQ ID NO: 842569 - protein, 507 aa, Homo sapiens
HSAGNSTGSRFGLSCGDESTGEITFYMKGADVVMAGIVQYNDWLEEECGNMAREGLRVLVVAKKSLAEEQYQDFEARYVQAKLSVHDRSLKVATVIESLEMEMELLCLTGVEDQLQADVRPTLETLRNAGIKVWMLTGDKLETATCTAKNAHLVTRNQDIHVFRLVTNRGEAHLELNAFRRKHDCALVISGDSLEVCLKYYEYEFMELACQCPAVVCCRCAPTQKAQIVRLLQERTGKLTCAVGDGGNDVSMIQESDCGVGVEGKEGKQASLAADFSITQFKHLGRLLMVHGRNSYKRSAALSQFVIHRSLCISTMQAVFSSVFYFASVPLYQGFLIIGYSTIYTMFPVFSLVLDKDVKSEVAMLYPELYKDLLKGRPLSYKTFLIWVLISIYQGSTIMYGALLLFESEFVHIVAISFTSLILTELLMVALTIQTWHWLMTVAELLSLACYIASLVFLHEFIDVYFIATLSFLWKVSVITLVSCLPLYVLKYLRRRFSPPSYSKLTS

SEQ ID NO: 842570 - protein, 219 aa, Homo sapiens
MVHGRNSYKRSAALSQFVIHRSLCISTMQAVFSSVFYFASVPLYQGFLIIGYSTIYTMFPVFSLVLDKDVKSEVAMLYPELYKDLLKGRPLSYKTFLIWVLISIYQGSTIMYGALLLFESEFVHIVAISFTSLILTELLMVALTIQTWHWLMTVAELLSLACYIASLVFLHEFIDVYFIATLSFLWKVSVITLVSCLPLYVLKYLRRRFSPPSYSKLTS

SEQ ID NO: 842571 - protein, 1032 aa, Homo sapiens
MDSRPRAGCCEWLRCCGGGEARPRTVWLGHPEKRDQRYPRNVINNQKYNFFTFLPGVLFNQFKYFFNLYFLLLACSQFVPEMRLGALYTYWVPLGFVLAVTVIREAVEEIRCYVRDKEVNSQVYSRLTARGTVKVKSSNIQVGDLIIVEKNQRVPADMIFLRTSEKNGSCFLRTDQLDGETDWKLRLPVACTQRLPTAADLLQIRSYVYAEEPNIDIHNFVGTFTREDSDPPISESLSIENTLWAGTVVASGTVVGVVLYTGRELRSVMNTSNPRSKIGLFDLEVNCLTKILFGALVVVSLVMVALQHFAGRWYLQIIRFLLLFSNIIPISLRVNLDMGKIVYSWVIRRDSKIPGTVVRSSTIPEQLGRISYLLTDKTGTLTQNEMIFKRLHLGTVAYGLDSMDEVQSHIFSIYTQQSQDPPAQKGPTLTTKVRRTMSSRVHEAVKAIALCHNVTPVYESNGVTDQAEAEKQYEDSCRVYQASSPDEVALVQWTESVGLTLVGRDQSSMQLRTPGDQILNFTILQIFPFTYESKRMGIIVRDESTGEITFYMKGADVVMAGIVQYNDWLEEECGNMAREGLRVLVVAKKSLAEEQYQDFEARYVQAKLSVHDRSLKVATVIESLEMEMELLCLTGVEDQLQADVRPTLETLRNAGIKVWMLTGDKLETATCTAKNAHLVTRNQDIHVFRLVTNRGEAHLELNAFRRKHDCALVISGDSLEVCLKYYEYEFMELACQCPAVVCCRCAPTQKAQIVRLLQERTGKLTCAVGDGGNDVSMIQESDCGVGVEGKEGKQASLAADFSITQFKHLGRLLMVHGRNSYKRSAALSQFVIHRSLCISTMQAVFSSVFYFASVPLYQGFLIIGYSTIYTMFPVFSLVLDKDVKSEVAMLYPELYKDLLKGRPLSYKTFLIWVLISIYQGSTIMYGALLLFESEFVHIVAISFTSLILTELLMVALTIQTWHWLMTVAELLSLACYIASLVFLHEFIDVYFIATLSFLWKVSVITLVSCLPLYVLKYLRRRFSPPSYSKLTS

SEQ ID NO: 842572 - protein, 1032 aa, Homo sapiens; identical to SEQ ID NO: 842571

SEQ ID NO: 842573 - protein, 1032 aa, Homo sapiens; identical to SEQ ID NO: 842571

SEQ ID NO: 842574 - protein, 109 aa, Homo sapiens
CFLLPFSFARFVLTSKNDQWIDFWRHLVIASGLIGSFNAKGGSGSGLLWYDDLMPLTATSYNLFVTSSGFSVKERFSGVDIRVRVKVCCHVAQSLCYPSVHAPNPKGAS

SEQ ID NO: 842575 - protein, 1032 aa, Homo sapiens; identical to SEQ ID NO: 842571

SEQ ID NO: 842576 - protein, 576 aa, Homo sapiens
MDSRPRAGCCEWLRCCGGGEARPRTVWLGHPEKRDQRYPRNVINNQKYNFFTFLPGVLFNQFKYFFNLYFLLLACSQFVPEMRLGALYTYWVPLGFVLAVTVIREAVEEIRCYVRDKEVNSQVYSRLTARGTVKVKSSNIQVGDLIIVEKNQRVPADMIFLRTSEKNGSCFLRTDQLDGETDWKLRLPVACTQRLPTAADLLQIRSYVYAEEPNIDIHNFVGTFTREDSDPPISESLSIENTLWAGTVVASGTVVGVVLYTGRELRSVMNTSNPRSKIGLFDLEVNCLTKILFGALVVVSLVMVALQHFAGRWYLQIIRFLLLFSNIIPISLRVNLDMGKIVYSWVIRRDSKIPGTVVRSSTIPEQLGRISYLLTDKTGTLTQNEMIFKRLHLGTVAYGLDSMDEVQSHIFSIYTQQSQDPPAQKGPTLTTKVRRTMSSRVHEAVKAIALCHNVTPVYESNGVTDQAEAEKQYEDSCRVYQASSPDEVALVQWTESVGLTLVGRDQSSMQLRTPGDQILNFTILQIFPFTYESKRMGIIVREGCVPVLFLWRTRCSSAFSPFPRGATGLDRGCRSS

SEQ ID NO: 842577 - protein, 296 aa, Homo sapiens
MDSRPRAGCCEWLRCCGGGEARPRTVWLGHPEKRDQRYPRNVINNQKYNFFTFLPGVLFNQFKYFFNLYFLLLACSQFVPEMRLGALYTYWVPLGFVLAVTVIREAVEEIRCYVRDKEVNSQVYSRLTARGTVKVKSSNIQVGDLIIVEKNQRVPADMIFLRTSEKNGSCFLRTDQLDGETDWKLRLPVACTQRLPTAADLLQIRSYVYAEEPNIDIHNFVGTFTREDSDPPISESLSIENTLWAGTVVASGTVVGVVLYTGRELRSVMNTSNPRSKVCTRSWGTLTGCGLVGSGG

SEQ ID NO: 842578 - protein, 1032 aa, Homo sapiens; identical to SEQ ID NO: 842571

SEQ ID NO: 842579 - protein, 730 aa, Homo sapiens
MVALQHFAGRWYLQIIRFLLLFSNIIPISLRVNLDMGKIVYSWVIRRDSKIPGTVVRSSTIPEQLGRISYLLTDKTGTLTQNEMIFKRLHLGTVAYGLDSMDEVQSHIFSIYTQQSQDPPAQKGPTLTTKVRRTMSSRVHEAVKAIALCHNVTPVYESNGVTDQAEAEKQYEDSCRVYQASSPDEVALVQWTESVGLTLVGRDQSSMQLRTPGDQILNFTILQIFPFTYESKRMGIIVRDESTGEITFYMKGADVVMAGIVQYNDWLEEECGNMAREGLRVLVVAKKSLAEEQYQDFEARYVQAKLSVHDRSLKVATVIESLEMEMELLCLTGVEDQLQADVRPTLETLRNAGIKVWMLTGDKLETATCTAKNAHLVTRNQDIHVFRLVTNRGEAHLELNAFRRKHDCALVISGDSLEVCLKYYEYEFMELACQCPAVVCCRCAPTQKAQIVRLLQERTGKLTCAVGDGGNDVSMIQESDCGVGVEGKEGKQASLAADFSITQFKHLGRLLMVHGRNSYKRSAALSQFVIHRSLCISTMQAVFSSVFYFASVPLYQGFLIIGYSTIYTMFPVFSLVLDKDVKSEVAMLYPELYKDLLKGRPLSYKTFLIWVLISIYQGSTIMYGALLLFESEFVHIVAISFTSLILTELLMVALTIQTWHWLMTVAELLSLACYIASLVFLHEFIDVYFIATLSFLWKVSVITLVSCLPLYVLKYLRRRFSPPSYSKLTS

SEQ ID NO: 842580 - protein, 481 aa, Homo sapiens
MKGADVVMAGIVQYNDWLEEECGNMAREGLRVLVVAKKSLAEEQYQDFEARYVQAKLSVHDRSLKVATVIESLEMEMELLCLTGVEDQLQADVRPTLETLRNAGIKVWMLTGDKLETATCTAKNAHLVTRNQDIHVFRLVTNRGEAHLELNAFRRKHDCALVISGDSLEVCLKYYEYEFMELACQCPAVVCCRCAPTQKAQIVRLLQERTGKLTCAVGDGGNDVSMIQESDCGVGVEGKEGKQASLAADFSITQFKHLGRLLMVHGRNSYKRSAALSQFVIHRSLCISTMQAVFSSVFYFASVPLYQGFLIIGYSTIYTMFPVFSLVLDKDVKSEVAMLYPELYKDLLKGRPLSYKTFLIWVLISIYQGSTIMYGALLLFESEFVHIVAISFTSLILTELLMVALTIQTWHWLMTVAELLSLACYIASLVFLHEFIDVYFIATLSFLWKVSVITLVSCLPLYVLKYLRRRFSPPSYSKLTS

SEQ ID NO: 842581 - protein, 1032 aa, Homo sapiens; identical to SEQ ID NO: 842571

SEQ ID NO: 842582 - protein, 1032 aa, Homo sapiens; identical to SEQ ID NO: 842571

SEQ ID NO: 842583 - protein, 1032 aa, Homo sapiens; identical to SEQ ID NO: 842571

SEQ ID NO: 842584 - protein, 864 aa, Homo sapiens
MDSRPRAGCCEWLRCCGGGEARPRTVWLGHPEKRDQRYPRNVINNQKYNFFTFLPGVLFNQFKYFFNLYFLLLACSQFVPEMRLGALYTYWVPLGFVLAVTVIREAVEEIRCYVRDKEVNSQVYSRLTARGTVKVKSSNIQVGDLIIVEKNQRVPADMIFLRTSEKNGSCFLRTDQLDGETDWKLRLPVACTQRLPTAADLLQIRSYVYAEEPNIDIHNFVGTFTREDSDPPISESLSIENTLWAGTVVASGTVVGVVLYTGRELRSVMNTSNPRSKIGLFDLEVNCLTKILFGALVVVSLVMVALQHFAGRWYLQIIRFLLLFSNIIPISLRVNLDMGKIVYSWVIRRDSKIPGTVVRSSTIPEQLGRISYLLTDKTGTLTQNEMIFKRLHLGTVAYGLDSMDEVQSHIFSIYTQQSQDPPAQKGPTLTTKVRRTMSSRVHEAVKAIALCHNVTPVYESNGVTDQAEAEKQYEDSCRVYQASSPDEVALVQWTESVGLTLVGRDQSSMQLRTPGDQILNFTILQIFPFTYESKRMGIIVRDESTGEITFYMKGADVVMAGIVQYNDWLEEECGNMAREGLRVLVVAKKSLAEEQYQDFEARYVQAKLSVHDRSLKVATVIESLEMEMELLCLTGVEDQLQADVRPTLETLRNAGIKVWMLTGDKLETATCTAKNAHLVTRNQDIHVFRLVTNRGEAHLELNAFRRKHDCALVISGDSLEVCLKYYEYEFMELACQCPAVVCCRCAPTQKAQIVRLLQERTGKLTCAVGDGGNDVSMIQESDCGVGVEGKEGKQASLAADFSITQFKHLGRLLMVHGRNSYKRSAALSQFVIHRSLCISTMQAVFSSVFYFASVPLYQGFLIIG

SEQ ID NO: 842585 - protein, 343 aa, Homo sapiens
MDSRPRAGCCEWLRCCGGGEARPRTVWLGHPEKRDQRYPRNVINNQKYNFFTFLPGVLFNQFKYFFNLYFLLLACSQFVPEMRLGALYTYWVPLGFVLAVTVIREAVEEIRCYVRDKEVNSQVYSRLTARGTVKVKSSNIQVGDLIIVEKNQRVPADMIFLRTSEKNGSCFLRTDQLDGETDWKLRLPVACTQRLPTAADLLQIRSYVYAEEPNIDIHNFVGTFTREDSDPPISESLSIENTLWAGTVVASGTVVGVVLYTGRELRSVMNTSNPRSKIGLFDLEVNCLTKILFGALVVVSLVMVALQHFAGRWYLQIIRFLLLFSNIIPISLRVNSRMGYSSV

SEQ ID NO: 842586 - protein, 127 aa, Homo sapiens
LVISGDSLEVSLGTPESQSSQQPGSYPASAGALQARQRPPPTHHLSLHQRTTSPSTLQVCLKYYEYEFMELACQCPAVVCCRCAPTQKAQIVRLLQERTGKLTCAVGRRGSGCAAGPGLPVHQAPFP

SEQ ID NO: 842587 - protein, 450 aa, Homo sapiens
MEDTGIQRGIWDGDAKAVQQCLTDIFTSVYTTCDIPENAIFGPCVLSHTSLYDSIAFIALKSTDKRTVPYIFRVDTSAANGSSEGLMWLRLVQSARDKEEQNLEAYIKNGQLFYRSLRRIAKDEELLVWYGKELTELLLLCPSRSHNKMNGSSPYTCLECSQRFQFEFPYVAHLRFRCPKRLHSADISPQDEQGGGVGTKDHGGGGGGGKDQQQQQQEAPLGPGPKFCKAGPLHHYPSPSPESSNPSAAAGGSSAKPSTDFHNLARELENSRGGSSCSPAQSLSSGSGSGGGGGHQEAELSPDGIATGGGKGKRKFPEEAAEGGGGAGLVGGRGRFVERPLPASKEDLVCTPQQYRASGSYFGLEENGRLFAPPSPETGEAKRSAFVEVKKAARAASLQEEGTADGAGVASEDQDAGGGGGSSTPAAASPVGAEKLLAPRPGGPLPSRLE

SEQ ID NO: 842588 - protein, 504 aa, Homo sapiens
SQSLHRVHLYNSLRFSVSLPPSLPPPPQSFSPHLSISLLSLQEEPKRRQHQHLLTWKYTDTIGKRKHSIASSRFQVALFGRFYTDLIPVMEDTGIQRGIWDGDAKAVQQCLTDIFTSVYTTCDIPENAIFGPCVLSHTSLYDSIAFIALKSTDKRTVPYIFRVDTSAANGSSEGLMWLRLVQSARDKEEQNLEAYIKNGQLFYRSLRRIAKDEELLVWYGKELTELLLLCPSRSHNKMNGSSPYTCLECSQRFQFEFPYVAHLRFRCPKRLHSADISPQDEQGGGVGTKDHGGGGGGGKDQQQQQQEAPLGPGPKFCKAGPLHHYPSPSPESSNPSAAAGGSSAKPSTDFHNLARELENSRGGSSCSPAQSLSSGSGSAAAAACLKQSPFLYATAFWPKSSAAAAAAAAAAAAGPLQLQLPSALTLLPPSFTSLCLPAQNWCAKCNASFRMTSDLVYHMRSHHKKEYAMEPLVKRRREEKLKCPICNESFRERHHLSRHMTSHN

SEQ ID NO: 842589 - protein, 450 aa, Homo sapiens; identical to SEQ ID NO: 842587

SEQ ID NO: 842590 - protein, 450 aa, Homo sapiens; identical to SEQ ID NO: 842587

SEQ ID NO: 842591 - protein, 450 aa, Homo sapiens; identical to SEQ ID NO: 842587

SEQ ID NO: 842592 - protein, 106 aa, Homo sapiens
MVRIADLRHGVPPPPRGTLPLPQRCPLPLESGASLGARESSPENGSSQRLKSFFSGDGARRLFDWGTCFPTISQKASLEECARTEGKSSAPSAMSPSGSATTSPGT

SEQ ID NO: 842593 - protein, 129 aa, Homo sapiens
ARDSPATWCCSPVEGVNLQAVKDLKSLASAAALKGQVSASKWLSAQTRLPRRPRQLHPLLHHPLDVKSFPEPILVIIFIFNHPCPPTPRPQSANSTHYRLPLGLRRTHQAEGGKNPTKTKTNKKKTGTV

SEQ ID NO: 842594 - protein, 539 aa, Homo sapiens
SQSLHRVHLYNSLRFSVSLPPSLPPPPQSFSPHLSISLLSLQEEPKRRQHQHLLTWKYTDTIGKRKHSIASSRFQVALFGRFYTDLIPVMEDTGIQRGIWDGDAKAVQQCLTDIFTSVYTTCDIPENAIFGPCVLSHTSLYDSIAFIALKSTDKRTVPYIFRVDTSAANGSSEGLMWLRLVQSARDKEEQNLEAYIKNGQLFYRSLRRIAKDEELLVWYGKELTELLLLCPSRSHNKMNGSSPYTCLECSQRFQFEFPYVAHLRFRCPKRLHSADISPQDEQGGGVGTKDHGGGGGGGKDQQQQQQEAPLGPGPKFCKAGPLHHYPSPSPESSNPSAAAGGSSAKPSTDFHNLARELENSRGGSSCSPAQSLSSGSGSGGGGGHQEAELSPDGIATGGGKGKRKFPEEAAEGGGGAGLVGGRGRFVERPLPASKEDLVCTPQQYRASGSYFGLEENGRLFAPPSPETGEAKRSAFVEVKKAARAASLQEEGTADGAGVASEDQDAGGGGGSSTPAAASPVGAEKLLAPRPGGPLPSRLE

SEQ ID NO: 842595 - protein, 450 aa, Homo sapiens; identical to SEQ ID NO: 842587

SEQ ID NO: 842596 - protein, 450 aa, Homo sapiens; identical to SEQ ID NO: 842587

SEQ ID NO: 842597 - protein, 255 aa, Homo sapiens
DLSRGWWQTGLGAMLSNHVVCVCVCVCVRACVWCLLTKQGRPLTHAWNAANVSSLSSPLSDERKSAFSQPARSFSQLSPLVLGQKLGALEPCHPADGVGPTRLYPAAADPLAVKLQGAADLNGGCGSLPSGGGGLPKQSPFLYATAFWPKSSAAAAAAAAAAAAGPLQLQLPSALTLLPPSFTSLCLPAQNWCAKCNASFRMTSDLVYHMRSHHKKEYAMEPLVKRRREEKLKCPICNESFRERHHLSRHMTSHN

SEQ ID NO: 842598 - protein, 125 aa, Homo sapiens
MEDTGIQRGIWDGDAKAVQQCLTDIFTSVYTTSHSRPGSTHTTAFPGSTTMPGVSQESTASHSSPGSTDTTLSPGSTTASSLGPESTTFHSSPGSTETTLLPDNTTPQASLKHLRPSTMHVIRIL

SEQ ID NO: 842599 - protein, 424 aa, Homo sapiens
MDQPSGRSFMQVLCEKYSPENFPYRRGPGMGVHVPATPQGSPMKDRLNLPSVLVLNSCGITCAGDEKEIAAFCAHVSELDLSDNKLEDWHEVSKIVSNVPQLEFLNLSSNPLNLSVLERTCAGSFSGVRKLVLNNSKASWETVHMILQELPDLEELFLCLNDYETVSCPSICCHSLKLLHITDNNLQDWTEIRKLGVMFPSLDTLVLANNHLNAIEEPDDSLARLFPNLRSISLHKSGLQSWEDIDKLNSFPKLEEVRLLGIPLLQPYTTEERRKLVIARLPSVSKLNGSVVTDGEREDSERFFIRYYVDVPQEEVPFRYHELITKYGKLEPLAEVDLRPQSSAKVEVHFNDQVEEMSIRLDQTVAELKKQLKTLVQLPTSNMLLYYFDHEAPFGPEEMKYSSRALHSFGIRDGDKIYVESKTK

SEQ ID NO: 842600 - protein, 398 aa, Homo sapiens
MDQPSGRSFMQVLCEKYSPENFPYRRGPGMGVHVPATPQGSPMKDRLNLPSVLVLNSCGITCAGDEKEIAAFCAHVSELDLSDNKLEDWHEKEHAAGSFSGVRKLVLNNSKASWETVHMILQELPDLEELFLCLNDYETVSCPSICCHSLKLLHITDNNLQDWTEIRKLGVMFPSLDTLVLANNHLNAIEEPDDSLARLFPNLRSISLHKSGLQSWEDIDKLNSFPKLEEVRLLGIPLLQPYTTEERRKLVIARLPSVSKLNGSVVTDGEREDSERFFIRYYVDVPQEEVPFRYHELITKYGKLEPLAEVDLRPQSSAKVEVHFNDQVEEMSIRLDQTVAELKKQLKTLVQLPTSNMLLYYFDHEAPFGPEEMKYSSRALHSFGIRDGDKIYVESKTK

SEQ ID NO: 842601 - protein, 424 aa, Homo sapiens; identical to SEQ ID NO: 842599

SEQ ID NO: 842602 - protein, 278 aa, Homo sapiens
MDQPSGRSFMQVLCEKYSPENFPYRRGPGMGVHVPATPQGSPMKDRLNLPSVLVLNSCGITCAGDEKEIAAFCAHVSELDLSDNKLEDWHEVCSPGKTIDKLNSFPKLEEVRLLGIPLLQPYTTEERRKLVIARLPSVSKLNGSVVTDGEREDSERFFIRYYVDVPQEEVPFRYHELITKYGKLEPLAEVDLRPQSSAKVEVHFNDQVEEMSIRLDQTVAELKKQLKTLVQLPTSNMLLYYFDHEAPFGPEEMKYSSRALHSFGIRDGDKIYVESKTK

SEQ ID NO: 842603 - protein, 424 aa, Homo sapiens; identical to SEQ ID NO: 842599

SEQ ID NO: 842604 - protein, 118 aa, Homo sapiens
MDQPSGRSFMQVLCEKYSPENFPYRRGPGMGVHVPATPQGSPMKDRLNLPSVLVLNSCGITCAGDEKEIAAFCAHVSELDLSDNKLEDWHEKEHVLGPSLGFANLSSTTAKLLGRRST

SEQ ID NO: 842605 - protein, 127 aa, Homo sapiens
MDQPSGRSFMQVLCEKYSPENFPYRRGPGMGVHVPATPQGSPMKDRLNLPSVLVLNSCGITCAGDEKEIAAFCAHVSELDLSDNKLEDWHEVKFLYCYILVKSSNNHCVIVYVIICSAKFCSHLMSV

SEQ ID NO: 842606 - protein, 434 aa, Homo sapiens
MLWFQGAIPAAIATAKRSGAVFVVFVAGDDEQSTQMAASWEDDKVTEASSNSFVAIKIDTKSEACLQFSQIYPVVCVPSSFFIGDSGIPLEVIAGSVSADELVTRIHKVRQMHLLKSETSVANGSQSESSVSTPSASFEPNNTCENSQSRNAELCEIPPTSDTKSDTATGGESAGHATSSQEPSGCSDQRPAEDLNIRVERLTKKLEERREEKRKEEEQREIKKEIERRKTGKEMLDYKRKQEEELTKRMLEERNREKAEDRAARERIKQQIALDRAERAARFAKTKEEVEAAKAAALLAKQAEMEVKRESYARERSTVARIQFRLPDGSSFTNQFPSDAPLEEARQFAAQTVGNTYGNFSLATMFPRREFTKEDYKKKLLDLELAPSASVVLLPVCLLISRQEDQLHPLYTLPAETFGPCWEQCFIHSLPSGD

SEQ ID NO: 842607 - protein, 397 aa, Homo sapiens [sequence omitted]

SEQ ID NO: 842608 - protein, 250 aa, Homo sapiens
MLWFQGAIPAAIATAKRSGAVFVVFVAGDDEQSTQMAASWEDDKVTEASSNSFVAIKIDTKSEACLQFSQIYPVVCVPSSFFIGDSGIPLEVIAGSVSADELVTRIHKVRQMHLLKSETSVANGSQSESSVSTPSASFEPNNTCENSQSRNAELCEIPPTSDTKSDTATGGESAGHATSSQEPSGCSDQRPAEDLNIRVERLTKKLEERREEKRKEEEQREIKKEIERRKTGKEMLDYKRKQEEELTKRM

SEQ ID NO: 842609 - protein, 490 aa, Homo sapiens
MLWFQGAIPAAIATAKRSGAVFVVFVAGDDEQSTQMAASWEDDKVTEASSNSFVAIKIDTKSFFIGDSGIPLEVIAGSVSADELVTRIHKVRQMHLLKSETSVANGSQSESSVSTPSASFEPNNTCENSQSRNAELCEIPPTSDTKSDTATGGESAGHATSSQEPSGCSDQRPAEDLNIRVERLTKKLEERREEKRKEEEQREIKKEIERRKTGKEMLDYKRKQEEELTKRMLEERNREKAEDRAARERIKQQIALDRAERAARFAKTKEEVEAAKAAALLAKQAEMEVKRESYARERSTVARIQFRLPDGSSFTNQFPSDAPLEEARQFAAQTVGNTYGNFSLATMFPRREFTKEDYKKKLLDLELAPSASVVLLPAGRPTASIVHSSSGDIWTLLGTVLYPFLAIWRLISNFLFSNPPPTQTSVRVTSSEPPNPASSSKSEKREPVRKRVLEKRGDDFKKEGKIYRLRTQDDGEDENNTWNGNSTQQM

SEQ ID NO: 842610 - protein, 397 aa, Homo sapiens [sequence omitted]

SEQ ID NO: 842611 - protein, 274 aa, Homo sapiens
MLDYKRKQEEELTKRMLEERNREKAEDRAARERIKQQIALDRAERAARFAKTKEEVEAAKAAALLAKQAEMEVKRESYARERSTVARIQFRLPDGSSFTNQFPSDAPLEEARQFAAQTVGNTYGNFSLATMFPRREFTKEDYKKKLLDLELAPSASVVLLPAGRPTASIVHSSSGDIWTLLGTVLYPFLAIWRLISNFLFSNPPPTQTSVRVTSSEPPNPASSSKSEKREPVRKRVLEKRGDDFKKEGKIYRLRTQDDGEDENNTWNGNSTQQM

SEQ ID NO: 842612 - protein, 274 aa, Homo sapiens; identical to SEQ ID NO: 842611

SEQ ID NO: 842613 - protein, 144 aa, Homo sapiens
MFPRREFTKEDYKKKLLDLELAPSASVVLLPAGRPTASIVHSSSGDIWTLLGTVLYPFLAIWRLISNFLFSNPPPTQTSVRVTSSEPPNPASSSKSEKREPVRKRVLEKRGDDFKKEGKIYRLRTQDDGEDENNTWNGNSTQQM

SEQ ID NO: 842614 - protein, 508 aa, Homo sapiens
MLWFQGAIPAAIATAKRSGAVFVVFVAGDDEQSTQMAASWEDDKVTEASSNSFVAIKIDTKSEACLQFSQIYPVVCVPSSFFIGDSGIPLEVIAGSVSADELVTRIHKVRQMHLLKSETSVANGSQSESSVSTPSASFEPNNTCENSQSRNAELCEIPPTSDTKSDTATGGESAGHATSSQEPSGCSDQRPAEDLNIRVERLTKKLEERREEKRKEEEQREIKKEIERRKTGKEMLDYKRKQEEELTKRMLEERNREKAEDRAARERIKQQIALDRAERAARFAKTKEEVEAAKAAALLAKQAEMEVKRESYARERSTVARIQFRLPDGSSFTNQFPSDAPLEEARQFAAQTVGNTYGNFSLATMFPRREFTKEDYKKKLLDLELAPSASVVLLPAGRPTASIVHSSSGDIWTLLGTVLYPFLAIWRLISNFLFSNPPPTQTSVRVTSSEPPNPASSSKSEKREPVRKRVLEKRGDDFKKEGKIYRLRTQDDGEDENNTWNGNSTQQM

SEQ ID NO: 842615 - protein, 413 aa, Homo sapiens
MLWFQGAIPAAIATAKRSGAVFVVFVAGDDEQSTQMAASWEDDKVTEASSNSFVAIKIDTKSEACLQFSQIYPVVCVPSSFFIGDSGIPLEVIAGSVSADELVTRIHKVRQMHLLKSETSVANGSQSESSVSTPSASFEPNNTCENSQSRNAELCEIPPTSDTKSDTATGGESAGHATSSQEPSGCSDQRPAEDLNIRVERLTKKLEERREEKRKEEEQREIKKEIERRKTGKEMLDYKRKQEEELTKRMLEERNREKAEDRAARERIKQQIALDRAERAARFAKTKEEVEAAKAAALLAKQAEMEVKRESYARERSTVARIQFRLPDGSSFTNQFPSDAPLEEARQFAAQTVGNTYGNFSLATMFPRREFTKEDYKKKLLDLELAPSASVVLLPQEDQLHPLTLYLLVTRCR

SEQ ID NO: 842616 - protein, 322 aa, Homo sapiens
MLWFQGAIPAAIATAKRSGAVFVVFVAGDDEQSTQMAASWEDDKVTEASSNSFVAIKIDTKSEACLQFSQIYPVVCVPSSFFIGDSGIPLEVIAGSVSADELVTRIHKVRQMHLLKSETSVANGSQSESSVSTPSASFEPNNTCENSQSRNAELCEIPPTSDTKSDTATGGESAGHATSSQEPSGCSDQRPAEDLNIRVERLTKKLEERREEKRKEEEQREIKKEIERRKTGKEMLDYKRKQEEELTKRMLEERNREKAEDRAARERIKQQIALDRAERAARFAKTKEEVEAAKAAALLAKQAEMEVKRESYARERRYYISC

SEQ ID NO: 842617 - protein, 508 aa, Homo sapiens; identical to SEQ ID NO: 842614

SEQ ID NO: 842618 - protein, 246 aa, Homo sapiens
MLWFQGAIPAAIATAKRSGAVFVVFVAGDDEQSTQMAASWEDDKVTEASSNSFVAIKIDTKSEACLQFSQIYPVVCVPSSFFIGDSGIPLEVIAGSVSADELVTRIHKVRQMHLLKSETSVANGSQSESSVSTPSASFEPNNTCENSQSRNAELCEIPPTSDTKSDTATGGESAGHATSSQEPSGCSDQRPAEDLNIRVERLTKKLEERRRREVTEEEKTKEEKPEAKGVKEEVKLAWMDLSSSGF

SEQ ID NO: 842619 - protein, 508 aa, Homo sapiens; identical to SEQ ID NO: 842614

SEQ ID NO: 842620 - protein, 508 aa, Homo sapiens; identical to SEQ ID NO: 842614

SEQ ID NO: 842621 - protein, 274 aa, Homo sapiens; identical to SEQ ID NO: 842611

SEQ ID NO: 842622 - protein, 257 aa, Homo sapiens
MLDYKRKQEEELTKRMLEERNREKAEDRAARERIKQQIALDRAERAARFAKTKEEVEAAKAAALLATVARIQFRLPDGSSFTNQFPSDAPLEEARQFAAQTVGNTYGNFSLATMFPRREFTKEDYKKKLLDLELAPSASVVLLPAGRPTASIVHSSSGDIWTLLGTVLYPFLAIWRLISNFLFSNPPPTQTSVRVTSSEPPNPASSSKSEKREPVRKRVLEKRGDDFKKEGKIYRLRTQDDGEDENNTWNGNSTQQM

SEQ ID NO: 842623 - protein, 508 aa, Homo sapiens; identical to SEQ ID NO: 842614

SEQ ID NO: 842624 - protein, 508 aa, Homo sapiens; identical to SEQ ID NO: 842614

SEQ ID NO: 842625 - protein, 305 aa, Homo sapiens
MLWFQGAIPAAIATAKRSGAVFVVFVAGDDEQSTQMAASWEDDKVTEASSNSFVAIKIDTKSEACLQFSQIYPVVCVPSSFFIGDSGIPLEVIAGSVSADELVTRIHKVRQMHLLKSETSVANGSQSESSVSTPSASFEPNNTCENSQSRNAELCEIPPTSDTKSDTATGGESAGHATSSQEPSGCSDQRPAEDLNIRVERLTKKLEERREEKRKEEEQREIKKEIERRKTGKEMLDYKRKQEEELTKRMLEERNREKAEDRAARERIKQQIALDRAERAARFAKTKEEVEAAKAAALLAYYISC

SEQ ID NO: 842626 - protein, 182 aa, Homo sapiens
MNSLHRWLQVGKMIKLQKHLQTVLLLLKSIPKVKPAYSFHKSTSLNCTDPVVCVPSSFFIGDSGIPLEVIAGSVSADELVTRIHKVRQMHLLKSETSVANGSQSESSVSTPSASFEPNNTCENSQSRNAELCEIPPTSDTKSDTATGGESAGHATSSQEPSGCSDQRPAEDLNIRVERLYPR

SEQ ID NO: 842627 - protein, 117 aa, Homo sapiens
MSPSCKPRAAEAPRAEPKKDEAGDGERSAACRDPQPLSPGRSSPSGQEKALLCRCPSPRPKRCFLTAWTQLDGGERALGAGLRASSRLLPTRSGKVPNLPEPQLPNLANMTTKVLLF

SEQ ID NO: 842628 - protein, 74 aa, Homo sapiens
LVLLCCCCYAGRAAPCSPGVLPFYRHSYPVHLTTGHLRLGVFSLNTPKPSTKPLCFRLPVSVSASTAHPSAQAP

SEQ ID NO: 842629 - protein, 224 aa, Homo sapiens
MPGSPRPAPSWVLLLRLLALLRPPGLGEACSCAPAHPQQHICHSALVIRAKISSEKVVPASADPADTEKMLRYEIKQIKMFKGFEKVKDVQYIYTPFDSSLCGVKLEANSQKQYLLTGQVLSDGKVFIHLCNYIEPWEDLSLVQRESLNHHYHLNCGCQITTCYTVPCTISAPNECLWTDWLLERKLYGYQAQHYVCMKHVDGTCSWYRGHLPLRKEFVDIVQP

SEQ ID NO: 842630 - protein, 224 aa, Homo sapiens; identical to SEQ ID NO: 842629

SEQ ID NO: 842631 - protein, 224 aa, Homo sapiens; identical to SEQ ID NO: 842629

SEQ ID NO: 842632 - protein, 145 aa, Homo sapiens
MFKGFEKVKDVQYIYTPFDSSLCGVKLEANSQKQYLLTGQVLSDGKVFIHLCNYIEPWEDLSLVQRESLNHHYHLNCGCQITTCYTVPCTISAPNECLWTDWLLERKLYGYQAQHYVCMKHVDGTCSWYRGHLPLRKEFVDIVQP

SEQ ID NO: 842633 - protein, 80 aa, Homo sapiens
CQLLQKNSHTALLSTVLPVPTTPHDTYEGTTSREEKQCESFSVEAELSACALRLPERVRWRSPSFHASGNLAVYRSNPVW

SEQ ID NO: 842634 - protein, 77 aa, Homo sapiens
NPCLGNLSSSGREAFRAERQPVPGSAIALSVGRAHHGASSGLISLSTPFLYFCLPRSCSENVLHVGRFIPFTSSSFI

SEQ ID NO: 842635 - protein, 117 aa, Homo sapiens
LPPAFLSARLSSARLLCAHAGLAARRGRSRGPARAAGTLPAQPSGPFSLRPPPGVGPGCVLANCASGIRSGMPSCLAKGVTPSSTQSLSSVTCCRRLFPRGAGSPRFVCQQLGGEYL

SEQ ID NO: 842636 - protein, 117 aa, Homo sapiens; identical to SEQ ID NO: 842635

SEQ ID NO: 842637 - protein, 123 aa, Homo sapiens
NDFLKLSPVPKFCHKCRVHLKMTFPKTIHVKFSFQILNSDMRMRNKKDPDELPGNPISQSWFKKKKDLNTFTQVCLSSYNILGTMDRDKDSDLKLSLLRREQYGVVSEKEKHRMQTSIQIAVN

SEQ ID NO: 842638 - protein, 31 aa, Homo sapiens
RWHSGEKHKKEKSHMSGKTQQSSLLLKPEVL

SEQ ID NO: 842639 - protein, 164 aa, Homo sapiens
DQEHHFQDKYLFYRFLDDEHEDAPLPTEEEKKECDEELQDTMLLLSQMGPDAHMRMILRKPPGQRTVDDLEIIYEELLHIKALSHLSTTVKRELAGVLIFESHAKGGTVLFNQGEEGTSWYIILKGSVNVVIYGKGVVCTLHEGDDFGKLALVNDAPRAASIVL

SEQ ID NO: 842640 - protein, 88 aa, Homo sapiens [sequence omitted]

SEQ ID NO: 842641 - protein, 110 aa, Homo sapiens
MATAALWPPLHPDGAWPGRSILESEASTCVSLKPLRACPAVLLPSSTSGSSLSSQHCGRPRRVDHLRTGVQDQPGQHGYMESTGVSASGEAPGSFQPWWKAKREQVSHMA

SEQ ID NO: 842642 - protein, 281 aa, Homo sapiens
SLSSLFPAPAPPPAPAFAPPPKVPSPERSAPRVPLPSPQPSYPFRPAASGGTPPPACLPPAQPCQGSPAMNLFRFLGDLSHLLAIILLLLKIWKSRSCAGISGKSQVLFAVVFTARYLDLFTNYISLYNTCMKVVYIACSFTTVWLIYSKFKATYDGNHDTFRVEFLVVPTAILAFLVNHDFTPLEILWTFSIYLESVAILPQLFMVSKTGEAETITSHYLFALGVYRTLYLFNWIWRYHFEGFFDLIAIVAGLVQTVLYCDFFYLYITKVLKGKKLSLPA

SEQ ID NO: 842643 - protein, 281 aa, Homo sapiens; identical to SEQ ID NO: 842642

SEQ ID NO: 842644 - protein, 208 aa, Homo sapiens
MLARYSVDHRVLLHAYKICRSPRSCAGISGKSQVLFAVVFTARYLDLFTNYISLYNTCMKVVYIACSFTTVWLIYSKFKATYDGNHDTFRVEFLVVPTAILAFLVNHDFTPLEILWTFSIYLESVAILPQLFMVSKTGEAETITSHYLFALGVYRTLYLFNWIWRYHFEGFFDLIAIVAGLVQTVLYCDFFYLYITKVLKGKKLSLPA

SEQ ID NO: 842645 - protein, 155 aa, Homo sapiens
PNPGSVILELAEPMAIRYYVKQQGILHMQDGNHDTFRVEFLVVPTAILAFLVNHDFTPLEILWTFSIYLESVAILPQLFMVSKTGEAETITSHYLFALGVYRTLYLFNWIWRYHFEGFFDLIAIVAGLVQTVLYCDFFYLYITKVLKGKKLSLPA

SEQ ID NO: 842646 - protein, 154 aa, Homo sapiens
CVSAVMECPRYTLVVEICGSVSVTKRDSEGTLVVPTKKSPDLFSRPVPSHLIMSPASLQILWTFSIYLESVAILPQLFMVSKTGEAETITSHYLFALGVYRTLYLFNWIWRYHFEGFFDLIAIVAGLVQTVLYCDFFYLYITKVLKGKKLSLPA

SEQ ID NO: 842647 - protein, 149 aa, Homo sapiens
MALQPPNMRRICLKYLLLTTHCCFWLAVLAVMAVGIWTLALKSDYISLLPQAPTWPQPTILGVGGERPLSTQPMVSKTGEAETITSHYLFALGVYRTLYLFNWIWRYHFEGFFDLIAIVAGLVQTVLYCDFFYLYITKVLKGKKLSLPA

SEQ ID NO: 842648 - protein, 281 aa, Homo sapiens; identical to SEQ ID NO: 842642

SEQ ID NO: 842649 - protein, 281 aa, Homo sapiens; identical to SEQ ID NO: 842642

SEQ ID NO: 842650 - protein, 150 aa, Homo sapiens
MKVVYIACSFTTVWLIYSKFKATYDGNHDTFRVEFLVVPTAILAFLVNHDFTPLEILWTFSIYLESVAILPQLFMVSKTGEAETITSHYLFALGVYRTLYLFNWIWRYHFEGFFDLIAIVAGLVQTVLYCDFFYLYITKVLKGKKLSLPA

SEQ ID NO: 842651 - protein, 303 aa, Homo sapiens
SLSSLFPAPAPPPAPAFAPPPKVPSPERSAPRVPLPSPQPSYPFRPAASGGTPPPACLPPAQPCQGSPAMNLFRFLGDLSHLLAIILLLLKIWKSRSCAGISGKSQVLFAVVFTARYLDLFTNYISLYNTCMKVVYIACSFTTVWLIYSKFKATYDGNHDTFRVEFLVVPTAILAFLVNHDFTPLEEDRPGWPDVLIFSTEAIIQEFQILWTFSIYLESVAILPQLFMVSKTGEAETITSHYLFALGVYRTLYLFNWIWRYHFEGFFDLIAIVAGLVQTVLYCDFFYLYITKVLKGKKLSLPA

SEQ ID NO: 842652 - protein, 281 aa, Homo sapiens; identical to SEQ ID NO: 842642

SEQ ID NO: 842653 - protein, 281 aa, Homo sapiens; identical to SEQ ID NO: 842642

SEQ ID NO: 842654 - protein, 80 aa, Homo sapiens
MNEHVESRRQCSLVVGSTDPFQTTWIQIPALPFGQPTNLCVSVPFSVEWREQQHLPYGTAVQMKQGRMFKALSTQWALRK

SEQ ID NO: 842655 - protein, 413 aa, Homo sapiens
RTWDWAGALADGDMLPLLLLPLLWGGSLQEKPVYELQVQKSVTVQEGLCVLVPCSFSYPWRSWYSSPPLYVYWFRDGEIPYYAEVVATNNPDRRVKPETQGRFRLLGDVQKKNCSLSIGDARMEDTGSYFFRVERGRDVKYSYQQNKLNLEVTALIEKPDIHFLEPLESGRPTRLSCSLPGSCEAGPPLTFSWTGNALSPLDPETTRSSELTLTPRPEDHGTNLTCQMKRQGAQVTTERTVQLNVSYAPQTITIFRNGIALEILQNTSYLPVLEGQALRLLCDAPSNPPAHLSWFQGSPALNATPISNTGILELRRVRSAEEGGFTCRAQHPLGFLQIFLNLSVYSLPQLLGPSCSWEAEGLHCRCSFRARPAPSLCWRLEEKPLEGNSSQGSFKVNSSSAGPWANSSLILHG

SEQ ID NO: 842656 - protein, 141 aa, Homo sapiens
DVQKKNCSLSIGDARMEDTGSYFFRVERGRDVKYSYQQNKLNLEVTGMAGTPGEDPGTWRPPYENRDRSWAGAAGGGVGLGAGRGLRPGHSRGHTLRPQAPGAQVSPCLLLSPDRETRHPLSGASGVRPPHKAELQPSRIL

SEQ ID NO: 842657 - protein, 107 aa, Homo sapiens
MSHHWGYGKHNGPEHWHKDFPIAKGERQSPLRHPTTSRARRTLLSLAPERGSGAPGATRGSSDRRPGYPSGPSDRAPGSAWAWTDRSCGASGRAAADGGSWAHVPPR

SEQ ID NO: 842658 - protein, 242 aa, Homo sapiens
MSHHWGYGKHNGPEHWHKDFPIAKGERQSPVDIDTHTAKYDPSLKPLSVSYDQATSLRILNNGHAFNVEFDDSQDKAVLKGGPLDGTYRLIQFHFHWGSLDGQGSEHTVDNFGKAVQQPDGLAVLGIFLKVGSAKPGLQKVVDVLDSIKTKGKSADFTNFDPRGLLPESLDYWTYPGSLTTPPLLECVTWIVLKEPISVSSEQVLKFRKLNFNGEGEPEELMVDNWRPAQPLKNRQIKASFK

SEQ ID NO: 842659 - protein, 246 aa, Homo sapiens
MSHHWGYGKHNGPEHWHKDFPIAKGERQSPVDIDTHTAKYDPSLKPLSVSYDQATSLRILNNGHAFNVEFDDSQDKAVLKGGPLDGTYRLIQFHFHWGSLDGQGSEHTVDKKKYAAELHLVHWNTKYGDFGKAVQQPDGLAVLGIFLKVGSAKPGLQKVVDVLDSIKTKLPESLDYWTYPGSLTTPPLLECVTWIVLKEPISVSSEQVLKFRKLNFNGEGEPEELMVDNWRPAQPLKNRQIKASFK

SEQ ID NO: 842660 - protein, 137 aa, Homo sapiens
  misc_feature (15)..(15): Xaa can be any naturally occurring amino acid
GIVGESCATACSVTXAVAYDHCPVKVGSAKPGLQKVVDVLDSIKTKGKSADFTNFDPRGLLPESLDYWTYPGSLTTPPLLECVTWIVLKEPISVSSEQVLKFRKLNFNGEGEPEELMVDNWRPAQPLKNRQIKASFK

SEQ ID NO: 842661 - protein, 117 aa, Homo sapiens
ARIMIDWPSLLKVRCQYRLQNYVDLTGKSADFTNFDPRGLLPESLDYWTYPGSLTTPPLLECVTWIVLKEPISVSSEQVLKFRKLNFNGEGEPEELMVDNWRPAQPLKNRQIKASFK

SEQ ID NO: 842662 - protein, 125 aa, Homo sapiens
MSHHWGYGKHNGPEHWHKDFPIAKGERQSPVDIDTHTAKYDPSLKPLSVSYDQATSLRILNNGHAFNVEFDDSQDKAGQCLENNLCLLASSCFPSLMEGARNSGRNPLNNTVCLRTQGCHPDHFH

SEQ ID NO: 842663 - protein, 125 aa, Homo sapiens; identical to SEQ ID NO: 842662

SEQ ID NO: 842664 - protein, 260 aa, Homo sapiens
MSHHWGYGKHNGPEHWHKDFPIAKGERQSPVDIDTHTAKYDPSLKPLSVSYDQATSLRILNNGHAFNVEFDDSQDKAVLKGGPLDGTYRLIQFHFHWGSLDGQGSEHTVDKKKYAAELHLVHWNTKYGDFGKAVQQPDGLAVLGIFLKVGSAKPGLQKVVDVLDSIKTKGKSADFTNFDPRGLLPESLDYWTYPGSLTTPPLLECVTWIVLKEPISVSSEQVLKFRKLNFNGEGEPEELMVDNWRPAQPLKNRQIKASFK

SEQ ID NO: 842665 - protein, 105 aa, Homo sapiens
MSHHWGYGKHNGPEHWHKDFPIAKGERQSPVDIDTHTAKYDPSLKPLSVSYAFQGNLWRLLSPRTVYPSGTTDMGTQYVTEHIGSRSNRSSGRVARLRWILGSSD

SEQ ID NO: 842666 - protein, 260 aa, Homo sapiens; identical to SEQ ID NO: 842664

SEQ ID NO: 842667 - protein, 244 aa, Homo sapiens
TSAERRDRVLSDKEGRVASLGRVRTPAQRPSNGREEGRCSQGKVETHFPDHRRRVLPGELWAVRPPCRVASYRLIQFHFHWGSLDGQGSEHTVDKKKYAAELHLVHWNTKYGDFGKAVQQPDGLAVLGIFLKVGSAKPGLQKVVDVLDSIKTKGKSADFTNFDPRGLLPESLDYWTYPGSLTTPPLLECVTWIVLKEPISVSSEQVLKFRKLNFNGEGEPEELMVDNWRPAQPLKNRQIKASFK

SEQ ID NO: 842668 - protein, 131 aa, Homo sapiens
ARIMIDWPFNKHCVKGWAYAQIQGTSEKVVDVLASNSKRTGKSADFTNFDPRGLLPESLDYWTYPGSLTTPPLLECVTWIVLKEPISVSSEQVLKFRKLNFNGEGEPEELMVDNWRPAQPLKNRQIKASFK

SEQ ID NO: 842669 - protein, 106 aa, Homo sapiens
ILEYPRSSCYTIKTNGKSADFTNFDPRGLLPESLDYWTYPGSLTTPPLLECVTWIVLKEPISVSSEQVLKFRKLNFNGEGEPEELMVDNWRPAQPLKNRQIKASFK

SEQ ID NO: 842670 - protein, 102 aa, Homo sapiens
LFVETGSCYSAQAGLKLFASRDPSASASQSAGITGSGHLLLLPFLCGQSPTLEISIIGGRVSITAHWVHSMASSLGSEFPPVQCSSPASVTSISYLDYCNGS

SEQ ID NO: 842671 - protein, 985 aa, Homo sapiens
MDKRKLGRRPSSSEIITEGKRKKSSSDLSEIRKMLNAKPEDVHVQSPLSKFRSSERWTLPLQWERSLRNKVISLDHKNKKHIRGCPVTSKSSPERQLKVMLTNVLWTDLGRKFRKTLPRNDANLCDANKVQSDSLPSTSVDSLETCQKLEPLRQSLNLSERGSQRSKTVDDNSAKQTAHNKEKRRKDDGISLLISDTQPEDLNSGSRGCDHLEQESRNKDVKYSDSKVELTLISRKTKRRLRNNLPDSQYCTSLDKSTEQTKKQEDDSTISTEFEKPSENYHQDPKLPEEITTKPTKSDFTKLSSLNSQELTLSNATKSASAGSTTETVENSNSIDIVGISSLVEKDENELNTIEKPILRGHNEGNQSLISAEPIVVSSDEEGPVEHKSSEILKLQSKQDRETTNENESTSESALLELPLITCESVQMSSELCPYNPVMENISSIMPSNEMDLQLDFIFTSVYIGKIKGASKGCVTITKKYIKIPFQVSLNEISLLVDTTHLKRFGLWKSKDDNHSKRSHAILFFWVSSDYLQEIQTQLEHSVLSQQSKSSEFIFLELHNPVSQREELKLKDIMTEISIISGELELSYPLSWVQAFPLFQNLSSKESSFIHYYCVSTCSFPAGVAVAEEMKLKSVSQPSNTDAAKPTYTFLQKQSSGCYSLSITSNPDEEWREVRHTGLVQKLIVYPPPPTKGGLGVTNEDLECLEEGEFLNDVIIDFYLKYLILEKASDELVERSHIFSSFFYKCLTRKENNLTEDNPNLSMAQRRHKRVRTWTRHINIFNKDYIFVPVNESSHWYLAVICFPWLEEAVYEDFPQTVSQQSQAQQSQNDNKTIDNDLRTTSTLSLSAEDSQSTESNMSVPKKMCKRPCILILDSLKAASVQNTVQNLREYLEVEWEVKLKTHRQFSKTNMVDLCPKVPKQDNSSDCGVYLLQYVESFFKDPIVNFELPIHLEKWFPRHVIKTKREDIRELILKLHLQQQKGSSS

SEQ ID NO: 842672 - protein, 1050 aa, Homo sapiens
MDKRKLGRRPSSSEIITEGKRKKSSSDLSEIRKMLNAKPEDVHVQSPLSKFRSSERWTLPLQWERSLRNKVISLDHKNKKHIRGCPVTSKSSPERQLKVMLTNVLWTDLGRKFRKTLPRNDANLCDANKVQSDSLPSTSVDSLETCQKLEPLRQSLNLSERIPRVILTNVLGTELGRKYIRTPPVTEGSLSDTDNLQSEQLSSSSDGSLESYQNLNPHKSCYLSERGSQRSKTVDDNSAKQTAHNKEKRRKDDGISLLISDTQPEDLNSGSRGCDHLEQESRNKDVKYSDSKVELTLISRKTKRRLRNNLPDSQYCTSLDKSTEQTKKQEDDSTISTEFEKPSENYHQDPKLPEEITTKPTKSDFTKLSSLNSQELTLSNATKSASAGSTTETVENSNSIDIVGISSLVEKDENELNTIEKPILRGHNEGNQSLISAEPIVVSSDEEGPVEHKSSEILKLQSKQDRETTNENESTSESALLELPLITCESVQMSSELCPYNPVMENISSIMPSNEMDLQLDFIFTSVYIGKIKGASKGCVTITKKYIKIPFQVSLNEISLLVDTTHLKRFGLWKSKDDNHSKRSHAILFFWVSSDYLQEIQTQLEHSVLSQQSKSSEFIFLELHNPVSQREELKLKDIMTEISIISGELELSYPLSWVQAFPLFQNLSSKESSFIHYYCVSTCSFPAGVAVAEEMKLKSVSQPSNTDAAKPTYTFLQKQSSGCYSLSITSNPDEEWREVRHTGLVQKLIVYPPPPTKGGLGVTNEDLECLEEGEFLNDVIIDFYLKYLILEKASDELVERSHIFSSFFYKCLTRKENNLTEDNPNLSMAQRRHKRVRTWTRHINIFNKDYIFVPVNESSHWYLAVICFPWLEEAVYEDFPQTVSQQSQAQQSQNDNKTIDNDLRTTSTLSLSAEDSQSTESNMSVPKKMCKRPCILILDSLKAASVQNTVQNLREYLEVEWEVKLKTHRQFSKTNMVDLCPKVPKQDNSSDCGVYLLQYVESFFKDPIVNFELPIHLEKWFPRHVIKTKREDIRELILKLHLQQQKGSSS

SEQ ID NO: 842673 - protein, 985 aa, Homo sapiens; identical to SEQ ID NO: 842671

SEQ ID NO: 842674 - protein, 267 aa, Homo sapiens
MDKRKLGRRPSSSEIITEGKRKKSSSDLSEIRKMLNAKPEDVHVQSPLSKFRSSERWTLPLQWERSLRNKVISLDHKNKKHIRGCPVTSKSSPERQLKVMLTNVLWTDLGRKFRKTLPRNDANLCDANKVQSDSLPSTSVDSLETCQKLEPLRQSLNLSERIPRVILTNVLGTELGRKYIRTPPVTEGSLSDTDNLQSEQLSSSSDGSLESYQNLNPHKSCYLSERGSQRSKTVDDNSAKQTAHNKEKRRKDDGISLLISDTQPEGL

SEQ ID NO: 842675 - protein, 648 aa, Homo sapiens
MDKRKLGRRPSSSEIITEGKRKKSSSDLSEIRKMLNAKPEDVHVQSPLSKFRSSERWTLPLQWERSLRNKVISLDHKNKKHIRGCPVTSKSSPERQLKVMLTNVLWTDLGRKFRKTLPRNDANLCDANKVQSDSLPSTSVDSLETCQKLEPLRQSLNLSERIPRVILTNVLGTELGRKYIRTPPVTEGSLSDTDNLQSEQLSSSSDGSLESYQNLNPHKSCYLSERGSQRSKTVDDNSAKQTAHNKEKRRKDDGISLLISDTQPEDLNSGSRGCDHLEQESRNKDVKYSDSKVELTLISRKTKRRLRNNLPDSQYCTSLDKSTEQTKKQEDDSTISTEFEKPSENYHQDPKLPEEITTKPTKSDFTKLSSLNSQELTLSNATKSASAGSTTETVENSNSIDIVGISSLVEKDENELNTIEKPILRGHNEGNQSLISAEPIVVSSDEEGPVEHKSSEILKLQSKQDRETTNENESTSESALLELPLITCESVQMSSELCPYNPVMENISSIMPSNEMDLQLDFIFTSVYIGKIKGASKGCVTITKKYIKIPFQVSLNEISLLVDTTHLKRFGLWKSKDDNHSKRSHAILFFWVSSDYLQEIQTQLEHSVLSQQYGVSLCHPGWSAVALSLLTASSASRVHAILLPQPPE

SEQ ID NO: 842676 - protein, 70 aa, Homo sapiens
RFYLVYLRLQLKFQQREKMDKRKLGRRPSSSDKKDVKCKTRGCPCSITTVQIQKLRTLDSPFAVGKKPKE

SEQ ID NO: 842677 - protein, 1017 aa, Homo sapiens
MLNAKPEDVHVQSPLSKFRSSERWTLPLQWERSLRNKVISLDHKNKKHIRGCPVTSKSSPERQLKVMLTNVLWTDLGRKFRKTLPRNDANLCDANKVQSDSLPSTSVDSLETCQKLEPLRQSLNLSERIPRVILTNVLGTELGRKYIRTPPVTEGSLSDTDNLQSEQLSSSSDGSLESYQNLNPHKSCYLSERGSQRSKTVDDNSAKQTAHNKEKRRKDDGISLLISDTQPEDLNSGSRGCDHLEQESRNKDVKYSDSKVELTLISRKTKRRLRNNLPDSQYCTSLDKSTEQTKKQEDDSTISTEFEKPSENYHQDPKLPEEITTKPTKSDFTKLSSLNSQELTLSNATKSASAGSTTETVENSNSIDIVGISSLVEKDENELNTIEKPILRGHNEGNQSLISAEPIVVSSDEEGPVEHKSSEILKLQSKQDRETTNENESTSESALLELPLITCESVQMSSELCPYNPVMENISSIMPSNEMDLQLDFIFTSVYIGKIKGASKGCVTITKKYIKIPFQVSLNEISLLVDTTHLKRFGLWKSKDDNHSKRSHAILFFWVSSDYLQEIQTQLEHSVLSQQSKSSEFIFLELHNPVSQREELKLKDIMTEISIISGELELSYPLSWVQAFPLFQNLSSKESSFIHYYCVSTCSFPAGVAVAEEMKLKSVSQPSNTDAAKPTYTFLQKQSSGCYSLSITSNPDEEWREVRHTGLVQKLIVYPPPPTKGGLGVTNEDLECLEEGEFLNDVIIDFYLKYLILEKASDELVERSHIFSSFFYKCLTRKENNLTEDNPNLSMAQRRHKRVRTWTRHINIFNKDYIFVPVNESSHWYLAVICFPWLEEAVYEDFPQTVSQQSQAQQSQNDNKTIDNDLRTTSTLSLSAEDSQSTESNMSVPKKMCKRPCILILDSLKAASVQNTVQNLREYLEVEWEVKLKTHRQFSKTNMVDLCPKVPKQDNSSDCGVYLLQYVESFFKDPIVNFELPIHLEKWFPRHVIKTKREDIRELILKLHLQQQKGSSS

SEQ ID NO: 842678 - protein, 858 aa, Homo sapiens
MDKRKLGRRPSSSEIITEGKRKKSSSDLSEIRKMLNAKPEDVHVQSPLSKFRSSERWTLPLQWERSLRNKVISLDHKNKKHIRGCPVTSKSSPERQLKVMLTNVLWTDLGRKFRKTLPRNDANLCDANKVQSDSLPSTSVDSLETCQKLEPLRQSLNLSERIPRVILTNVLGTELGRKYIRTPPVTEGSLSDTDNLQSEQLSSSSDGSLESYQNLNPHKSCYLSERGSQRSKTVDDNSAKQTAHNKEKRRKDDGISLLISDTQPEDLNSGSRGCDHLEQESRNKDVKYSDSKVELTLISRKTKRRLRNNLPDSQYCTSLDKSTEQTKKQEDDSTISTEFEKPSENYHQDPKLPEEITTKPTKSDFTKLSSLNSQELTLSNATKSASAGSTTETVENSNSIDIVGISSLVEKDENELNTIEKPILRGHNEGNQSLISAEPIVVSSDEEGPVEHKSSEILKLQSKQDRETTNENESTSESALLELPLITCESVQMSSELCPYNPVMENISSIMPSNEMDLQLDFIFTSVYIGKIKGASKGCVTITKKYIKIPFQVSLNEISLLVDTTHLKRFGLWKSKDDNHSKRSHAILFFWVSSDYLQEIQTQLEHSVLSQQSKSSEFIFLELHNPVSQREELKLKDIMTEISIISGELELSYPLSWVQAFPLFQNLSSKESSFIHYYCVSTCSFPAGVAVAEEMKLKSVSQPSNTDAAKPTYTFLQKQSSGCYSLSITSNPDEEWREVRHTGLVQKLIVYPPPPTKGGLGVTNEDLECLEEGEFLNDVIIDFYLKYLILEKASDELVERSHIFSSFFYKCLTRKENNLTEDNPNLSMAQRRHKRVRTWTRHINIFNKDYIFVPVNES

SEQ ID NO: 842679 - protein, 202 aa, Homo sapiens
MDKRKLGRRPSSSEIITEGKRKKSSSDLSEIRKMLNAKPEDVHVQSPLSKFRSSERWTLPLQWERSLRNKVISLDHKNKKHIRGCPVTSKSSPERQLKVMLTNVLWTDLGRKFRKTLPRNDANLCDANKVQSDSLPSTSVDSLETCQKLEPLRQSLNLSERGSQRSKTVDDNSAKQTAHNKEKRRKDDGISLLISDTQPEGL

SEQ ID NO: 842680 - protein, 238 aa, Homo sapiens
MKKFLYIKSVFHTLRMAQRRHKRVRTWTRHINIFNKDYIFVPVNESSHWYLAVICFPWLEEAVYEDFPQTVSQQSQAQQSQNDNKTIDNDLRTTSTLSLSAEDSQSTESNMSVPKKMCKRPCILILDSLKAASVQNTVQNLREYLEVEWEVKLKTHRQFSKTNMVDLCPKVPKQDNSSDCGVYLLQYVESFFKDPIVNFELPIHLEKWFPRHVIKTKREDIRELILKLHLQQQKGSSS

SEQ ID NO: 842681 - protein, 335 aa, Homo sapiens
PHRPGSLEPAACSPAPPAMVVSGAPPALGGGCLGTFTSLLLLASTAILNAARIPVPPACGKPQQLNRVVGGEDSTDSEWPWIVSIQKNGTHHCAGSLLTSRWVITAAHCFKDNLNKPYLFSVLLGAWQLGNPGSRSQKVGVAWVEPHPVYSWKEGACADIALVRLERSIQFSERVLPICLPDASIHLPPNTHCWISGWGSIQDGVPLPHPQTLQKLKVPIIDSEVCSHLYWRGAGQGPITEDMLCAGYLEGERDACLGDSGGPLMCQVDGAWLLAGIISWGEGCAERNRPGVYISLSAHRSWVEKIVQGVQLRGRAQGGGALRAPSQGSGAAARS

SEQ ID NO: 842682 - protein, 267 aa, Homo sapiens
FNLGAPRFYLEALLPSGAFTPMLFPQVPPPRPGLADPPLPFPSSNLNKPYLFSVLLGAWQLGNPGSRSQKVGVAWVEPHPVYSWKEGACADIALVRLERSIQFSERVLPICLPDASIHLPPNTHCWISGWGSIQDGVPLPHPQTLQKLKVPIIDSEVCSHLYWRGAGQGPITEDMLCAGYLEGERDACLGDSGGPLMCQVDGAWLLAGIISWGEGCAERNRPGVYISLSAHRSWVEKIVQGVQLRGRAQGGGALRAPSQGSGAAARS

SEQ ID NO: 842683 - protein, 320 aa, Homo sapiens
FNLGAPRFYLEALLPSGAFTPMLFPQVPPPRPGLADPPLPFPSSNLNKPYLFSVLLGAWQLGNPGSRSQKVGVAWVEPHPVYSWKEGACADIALVRLERSIQFSERVLPICLPDASIHLPPNTHCWISGWGSIQDGGASSRARIADFQSTICRPQSVDQLQQSQCWMKYAVSETGRALTICGYKKIYKRVPLPHPQTLQKLKVPIIDSEVCSHLYWRGAGQGPITEDMLCAGYLEGERDACLGDSGGPLMCQVDGAWLLAGIISWGEGCAERNRPGVYISLSAHRSWVEKIVQGVQLRGRAQGGGALRAPSQGSGAAARS

SEQ ID NO: 842684 - protein, 185 aa, Homo sapiens
PHRPGSLEPAACSPAPPAMVVSGAPPALGGGCLGTFTSLLLLASTAILNAARIPVPPACGKPQQLNRVVGGEDSTDSEWPWIVSIQKNGTHHCAGSLLTSRWVITAAHCFKDNLNKPYLFSVLLGAWQLGNPGSRSQKVGVAWVEPHPVYSWVEKIVQGVQLRGRAQGGGALRAPSQGSGAAARS

SEQ ID NO: 842685 - protein, 232 aa, Homo sapiens
LSPSWPCLSHLLSASALFISCSLTALCLGFFYGCEDETENAASTQRASVSSYRRRRHRLLPLASVFSHLLVLRCLPLGKHRFVLFLPQEVRGGPPAAAASRAEGLRSVPPSRSRSWSPEGRLDGKLREGRVTAVQPGPGQAPGNAPPVGALGLRDLRVSLGTGGLEVPHHQVLKGTPSSLGAGTPAHWALGPLLTGRWDPLLTERWDPLVTGRWGPLLTGRWGALLTGRWGP

SEQ ID NO: 842686 - protein, 175 aa, Homo sapiens
MLVWATPGAPSCARWTAPGCWPASSAGARAVPSATGPGSTSASLRTAPGWRRSCKGCSSAGALRGVGPSGHRARALGPPRAPRAQRDAGLGSERRPDPHLDLDLRRPRAVSPAVNRLIYLYLWGPGRLLRKGNPLPDPPDGLRPRLQGIRPRPTASCPRPHDFRPRPRAPALLCI

SEQ ID NO: 842687 - protein, 66 aa, Homo sapiens
IALGLSSLLPAPPPHQPWWFLERPQPWVGAVSAPSPPCCCWRRQVRPEAAPPSSLSPPPSFPPSLP

SEQ ID NO: 842688 - protein, 130 aa, Homo sapiens
MYNNKDHLHAFIIQYYRCVKYLCHMQGDAPSSQQVSPTAQQIPPTTDSVRRALTCESTLFAKFQCVTQFLAKHIGFGFCYVLFKAFSQIHMHTIGWGLSNICWIQARSLYYPTPHLDGSSVHQLAEFCLS

SEQ ID NO: 842689 - protein, 107 aa, Homo sapiens
MIISYTPNIPLGVSGTAVLQSPRLWDPACLPLMAAARGLPRTPPKADAVWTMCGQHLSRSEACVPWPVLWACLVAAHLSGMRPRTRRVPNAVCFFSPSAQGFFRGMF

SEQ ID NO: 842690 - protein, 255 aa, Homo sapiens
KITIFGDEGVPVQVDGEAWVQPPGIIKIVHKNRAQMLTRDRAFESTLKSWEDKQKCDSGKPVLRTHLYIHHAIDLATEEVSQMQLCSQAAEELITRICDAATIHCLLEQELAHAVNACSHALNKANPRCPESLTRDTATEIAINVKALYNETESLLVGRVPLQLESPHEERVSNALHSVEVELQKLTEIPWLYYILHPNEDEEPPMDCTKRNNRSTVFRIVPKFKKEKVQKQKTSSQPGSGDTESGSCEANSPGN

SEQ ID NO: 842691 - protein, 197 aa, Homo sapiens
KITIFGDEGVPVQVDGEAWVQPPGIIKIVHKNRAQMLTRDRAFESTLKSWEDKQKCDSGKPVLRTHLYIHHAIDLATEEVSQMQLCSQAAEELITRICDAATIHCLLEQELAHAVNACSHALNKANPRCPESLTRDTATEIAINVKALYNETESLLVGRVPLKSATFGASFALRREAERLHESHRSYLPPPRKAFRS

SEQ ID NO: 842692 - protein, 115 aa, Homo sapiens
SFYFILQGVSNLENAKPKKRKLFRRFMSENKIFEGKTVNDKIWQEHSKHKNDSHIRRPCQLKDLNEDDFLSNNIHTYQGKTLQGTSYQVTSECWSPFHYQRHVETTVDELAQEFM

SEQ ID NO: 842693 - protein, 181 aa, Homo sapiens
QSYFSKQGNKRVKLVKMNLFCISLEGSMDSLYEPIPEQQANQENMSSRTDSPIPPFGESEQTPNNLFVGVSNLENAKPKKRKLFRRFMSENKIFEGKTVNDKIWQEHSKHKNDSHIRRPCQLKDLNEDDFLSNNIHTYQGKTLQGTSYQVTSECWSPFHYQRHVETTVDELVRHFFPDVTI

SEQ ID NO: 842694 - protein, 249 aa, Homo sapiens
RLCEFSQTVREERRSSVADRLALHELLAGTSSACKGVEGQALGWPGPPAPHAAPAQPSCSPLLFHRQLDNNHISCIEDGAFRALRDLEILTLNNNNISRILVTSFNHMPKIRTLRLHSNHLYCDCHLAWLSDWLRQRRTVGQFTLCMAPVHLRGFNVADVQKKEYVCPAPHSEPPSCNANSISCPSPCTCSNNIVDCRGKGLMEIPANLPEGIVEIRLEQNSIKAIPAGAFTQYKKLKRIDSQNRFGMP

SEQ ID NO: 842695 - protein, 106 aa, Homo sapiens
MQQQGAPRPPQRHAQGCDRAVSTPSCLQAPCHLTISSILHTLPQNLKQGYMAKLPGGRPYLNGIPASMAVEPSPSMAAMVFDKGTGNMAPTVSLPGRGGVSDPVIL

SEQ ID NO: 842696 - protein, 1523 aa, Homo sapiens
MAPGWAGVGAAVRARLALALALASVLSGPPAVACPTKCTCSAASVDCHGLGLRAVPRGIPRNAERLDLDRNNITRITKMDFAGLKNLRVLHLEDNQVSVIERGAFQDLKQLERLRLNKNKLQVLPELLFQSTPKLTRLDLSENQIQGIPRKAFRGITDVKNLQLDNNHISCIEDGAFRALRDLEILTLNNNNISRILVTSFNHMPKIRTLRLHSNHLYCDCHLAWLSDWLRQRRTVGQFTLCMAPVHLRGFNVADVQKKEYVCPAPHSEPPSCNANSISCPSPCTCSNNIVDCRGKGLMEIPANLPEGIVEIRLEQNSIKAIPAGAFTQYKKLKRIDISKNQISDIAPDAFQGLKSLTSLVLYGNKITEIAKGLFDGLVSLQLLLLNANKINCLRVNTFQDLQNLNLLSLYDNKLQTISKGLFAPLQSIQTLHLAQNPFVCDCHLKWLADYLQDNPIETSGARCSSPRRLANKRISQIKSKKFRCSGSEDYRSRFSSECFMDLVCPEKCRCEGTIVDCSNQKLVRIPSHLPEYVTDLRLNDNEVSVLEATGIFKKLPNLRKINLSNNKIKEVREGAFDGAASVQELMLTGNQLETVHGRVFRGLSGLKTLMLRSNLIGCVSNDTFAGLSSVRLLSLYDNRITTITPGAFTTLVSLSTINLLSNPFNCNCHLAWLGKWLRKRRIVSGNPRCQKPFFLKEIPIQDVAIQDFTCDGNEESSCQLSPRCPEQCTCMETVVRCSNKGLRALPRGMPKDVTELYLEGNHLTAVPRELSALRHLTLIDLSNNSISMLTNYTFSNMSHLSTLILSYNRLRCIPVHAFNGLRSLRVLTLHGNDISSVPEGSFNDLTSLSHLALGTNPLHCDCSLRWLSEWVKAGYKEPGIARCSSPEPMADRLLLTTPTHRFQCKGPVDINIVAKCNACLSSPCKNNGTCTQDPVELYRCACPYSYKGKDCTVPINTCIQNPCQHGGTCHLSDSHKDGFSCSCPLGFEGQRCEINPDDCEDNDCENNATCVDGINNYVCICPPNYTGELCDEVIDHCVPELNLCQHEAKCIPLDKGFSCECVPGYSGKLCETDNDDCVAHKCRHGAQCVDTINGYTCTCPQGFSGPFCEHPPPMVLLQTSPCDQYECQNGAQCIVVQQEPTCRCPPGFAGPRCEKLITVNFVGKDSYVELASAKVRPQANISLQVATDKDNGILLYKGDNDPLALELYQGHVRLVYDSLSSPPTTVYSVETVNDGQFHSVELVTLNQTLNLVVDKGTPKSLGKLQKQPAVGINSPLYLGGIPTSTGLSALRQGTDRPLGGFHGCIHEVRINNELQDFKALPPQSLGVSPGCKSCTVCKHGLCRSVEKDSVVCECRPGWTGPLCDQEARDPCLGHRCHHGKCVATGTSYMCKCAEGYGGDLCDNKNDSANACSAFKCHHGQCHISDQGEPYCLCQPGFSGEHCQQENPCLGQVVREVIRRQKGYASCATASKVPIMECRGGCGPQCCQPTRSKRRKYVFQCTDGSSFVEEVERHLECGCLACS

SEQ ID NO: 842697 - protein, 1427 aa, Homo sapiens
RLCEFSQTVREERRSSVADRLALHELLAGTSSACKGVEGQALGWPGPPAPHAAPAQPSCSPLLFHRQLDNNHISCIEDGAFRALRDLEILTLNNNNISRILVTSFNHMPKIRTLRLHSNHLYCDCHLAWLSDWLRQRRTVGQFTLCMAPVHLRGFNVADVQKKEYVCPAPHSEPPSCNANSISCPSPCTCSNNIVDCRGKGLMEIPANLPEGIVEIRLEQNSIKAIPAGAFTQYKKLKRIDISKNQISDIAPDAFQGLKSLTSLVLYGNKITEIAKGLFDGLVSLQLLLLNANKINCLRVNTFQDLQNLNLLSLYDNKLQTISKGLFAPLQSIQTLHLAQNPFVCDCHLKWLADYLQDNPIETSGARCSSPRRLANKRISQIKSKKFRCSGSEDYRSRFSSECFMDLVCPEKCRCEGTIVDCSNQKLVRIPSHLPEYVTDLRLNDNEVSVLEATGIFKKLPNLRKINLSNNKIKEVREGAFDGAASVQELMLTGNQLETVHGRVFRGLSGLKTLMLRSNLIGCVSNDTFAGLSSVRLLSLYDNRITTITPGAFTTLVSLSTINLLSNPFNCNCHLAWLGKWLRKRRIVSGNPRCQKPFFLKEIPIQDVAIQDFTCDGNEESSCQLSPRCPEQCTCMETVVRCSNKGLRALPRGMPKDVTELYLEGNHLTAVPRELSALRHLTLIDLSNNSISMLTNYTFSNMSHLSTLILSYNRLRCIPVHAFNGLRSLRVLTLHGNDISSVPEGSFNDLTSLSHLALGTNPLHCDCSLRWLSEWVKAGYKEPGIARCSSPEPMADRLLLTTPTHRFQCKGPVDINIVAKCNACLSSPCKNNGTCTQDPVELYRCACPYSYKGKDCTVPINTCIQNPCQHGGTCHLSDSHKDGFSCSCPLGFEGQRCEINPDDCEDNDCENNATCVDGINNYVCICPPNYTGELCDEVIDHCVPELNLCQHEAKCIPLDKGFSCECVPGYSGKLCETDNDDCVAHKCRHGAQCVDTINGYTCTCPQGFSGPFCEHPPPMVLLQTSPCDQYECQNGAQCIVVQQEPTCRCPPGFAGPRCEKLITVNFVGKDSYVELASAKVRPQANISLQVATDKDNGILLYKGDNDPLALELYQGHVRLVYDSLSSPPTTVYSVETVNDGQFHSVELVTLNQTLNLVVDKGTPKSLGKLQKQPAVGINSPLYLGGIPTSTGLSALRQGTDRPLGGFHGCIHEVRINNELQDFKALPPQSLGVSPGCKSCTVCKHGLCRSVEKDSVVCECRPGWTGPLCDQEARDPCLGHRCHHGKCVATGTSYMCKCAEGYGGDLCDNKNDSANACSAFKCHHGQCHISDQGEPYCLCQPGFSGEHCQQENPCLGQVVREVIRRQKGYASCATASKVPIMECRGGCGPQCCQPTRSKRRKYVFQCTDGSSFVEEVERHLECGCLACS

SEQ ID NO: 842698 - protein, 1327 aa, Homo sapiens
RLCEFSQTVREERRSSVADRLALHELLAGTSSACKGVEGQALGWPGPPAPHAAPAQPSCSPLLFHRQLDNNHISCIEDGAFRALRDLEILTLNNNNISRILVTSFNHMPKIRTLRLHSNHLYCDCHLAWLSDWLRQRRTVGQFTLCMAPVHLRGFNVADVQKKEYVCPAPHSEPPSCNANSISCPSPCTCSNNIVDCRGKGLMEIPANLPEGIVEIRLEQNSIKAIPAGAFTQYKKLKRIDISKNQISDIAPDAFQGLKSLTSLVLYGNKITEIAKGLFDGLVSLQLLLLNANKINCLRVNTFQDLQNLNLLSLYDNKLQTISKGLFAPLQSIQTLHLAQNPFVCDCHLKWLADYLQDNPIETSGARCSSPRRLANKRISQIKSKKFRCSGSEDYRSRFSSECFMDLVCPEKCRCEGTIVDCSNQKLVRIPSHLPEYVTDLRLNDNEVSVLEATGIFKKLPNLRKINLSNNKIKEVREGAFDGAASVQELMLTGNQLETVHGRVFRGLSGLKTLMLRSNLIGCVSNDTFAGLSSVRLLSLYDNRITTITPGAFTTLVSLSTINLLSNPFNCNCHLAWLGKWLRKRRIVSGNPRCQKPFFLKEIPIQDVAIQDFTCDGNEESSCQLSPRCPEQCTCMETVVRCSNKGLRALPRGMPKDVTELYLEGNHLTAVPRELSALRHLTLIDLSNNSISMLTNYTFSNMSHLSTLILSYNRLRCIPVHAFNGLRSLRVLTLHGNDISSVPEGSFNDLTSLSHLALGTNPLHCDCSLRWLSEWVKAGYKEPGIARCSSPEPMADRLLLTTPTHRFQCKGPVDINIVAKCNACLSSPCKNNGTCTQDPVELYRCACPYSYKGKDCTVPINTCIQNPCQHGGTCHLSDSHKDGFSCSCPLGFEGQRCEINPDDCEDNDCENNATCVDGINNYVCICPPNYTGELCDEVIDHCVPELNLCQHEAKCIPLDKGFSCECVPGYSGKLCETDNDDCVAHKCRHGAQCVDTINGYTCTCPQGFSGPFCEHPPPMVYDSLSSPPTTVYSVETVNDGQFHSVELVTLNQTLNLVVDKGTPKSLGKLQKQPAVGINSPLYLGGIPTSTGLSALRQGTDRPLGGFHGCIHEVRINNELQDFKALPPQSLGVSPGCKSCTVCKHGLCRSVEKDSVVCECRPGWTGPLCDQEARDPCLGHRCHHGKCVATGTSYMCKCAEGYGGDLCDNKNDSANACSAFKCHHGQCHISDQGEPYCLCQPGFSGEHCQQENPCLGQVVREVIRRQKGYASCATASKVPIMECRGGCGPQCCQPTRSKRRKYVFQCTDGSSFVEEVERHLECGCLACS

SEQ ID NO: 842699 - protein, 492 aa, Homo sapiens
SPPSVPGELCDEVIDHCVPELNLCQHEAKCIPLDKGFSCECVPGYSGKLCETDNDDCVAHKCRHGAQCVDTINGYTCTCPQGFSGPFCEHPPPMVLLQTSPCDQYECQNGAQCIVVQQEPTCRCPPGFAGPRCEKLITVNFVGKDSYVELASAKVATDKDNGILLYKGDNDPLALELYQGHVRLVYDSLSSPPTTVYSVETVNDGQFHSVELVTLNQTLNLVVDKGTPKSLGKLQKQPAVGINSPLYLGGIPTSTGLSALRQGTDRPLGGFHGCIHEVRINNELQDFKALPPQSLGVSPGCKSCTVCKHGLCRSVEKDSVVCECRPGWTGPLCDQEARDPCLGHRCHHGKCVATGTSYMCKCAEGYGGDLCDNKNDSANACSAFKCHHGQCHISDQGEPYCLCQPGFSGEHCQQENPCLGQVVREVIRRQKGYASCATASKVPIMECRGGCGPQCCQPTRSKRRKYVFQCTDGSSFVEEVERHLECGCLACS

SEQ ID NO: 842700 - protein, 1364 aa, Homo sapiens
RLCEFSQTVREERRSSVADRLALHELLAGTSSACKGVEGQALGWPGPPAPHAAPAQPSCSPLLFHRQLDNNHISCIEDGAFRALRDLEILTLNNNNISRILVTSFNHMPKIRTLRLHSNHLYCDCHLAWLSDWLRQRRTVGQFTLCMAPVHLRGFNVADVQKKEYVCPAPHSEPPSCNANSISCPSPCTCSNNIVDCRGKGLMEIPANLPEGIVEIRLEQNSIKAIPAGAFTQYKKLKRIDISKNQISDIAPDAFQGLKSLTSLVLYGNKITEIAKGLFDGLVSLQLLLLNANKINCLRVNTFQDLQNLNLLSLYDNKLQTISKGLFAPLQSIQTLHLAQNPFVCDCHLKWLADYLQDNPIETSGARCSSPRRLANKRISQIKSKKFRCSGSEDYRSRFSSECFMDLVCPEKCRCEGTIVDCSNQKLVRIPSHLPEYVTDLRLNDNEVSVLEATGIFKKLPNLRKINLSNNKIKEVREGAFDGAASVQELMLTGNQLETVHGRVFRGLSGLKTLMLRSNLIGCVSNDTFAGLSSVRLLSLYDNRITTITPGAFTTLVSLSTINLLSNPFNCNCHLAWLGKWLRKRRIVSGNPRCQKPFFLKEIPIQDVAIQDFTCDGNEESSCQLSPRCPEQCTCMETVVRCSNKGLRALPRGMPKDVTELYLEGNHLTAVPRELSALRHLTLIDLSNNSISMLTNYTFSNMSHLSTLILSYNRLRCIPVHAFNGLRSLRVLTLHGNDISSVPEGSFNDLTSLSHLALGTNPLHCDCSLRWLSEWVKAGYKEPGIARCSSPEPMADRLLLTTPTHRFQCKGPVDINIVAKCNACLSSPCKNNGTCTQDPVELYRCACPYSYKGKDCTVPINTCIQNPCQHGGTCHLSDSHKDGFSCSCPLGFEGQRCEINPDDCEDNDCENNATCVDGINNYVCICPPNYTGELCDEVIDHCVPELNLCQHEAKCIPLDKGFSCECVPGYSGKLCETDNDDCVAHKCRHGAQCVDTINGYTCTCPQGFSGPFCEHPPPMVLLQTSPCDQYECQNGAQCIVVQQEPTCRCPPGFAGPRCEKLITVNFVGKDSYVELASAKVRPQANISLQVATDKDNGILLYKGDNDPLALELYQGHVRLVYDSLSSPPTTVYSVETVNDGQFHSVELVTLNQTLNLVVDKGTPKSLGKLQKQPAVGINSPLYLGGIPTSTGLSALRQGTDRPLGGFHGCIHEVRINNELQDFKALPPQSLGVSPGCKSCTVCKHGLCRSVEKDSVVCECRPGWTGPLCDQEARDPCLGHRCHHGKCVATGTSYMCKCAEGYGGDLCDNKNDSANACSAFKCHHGQCHISDQGEPYCLCQPGFSGEHCQQDSSLMELGQPCGTPW

SEQ ID NO: 842701 - protein, 865 aa, Homo sapiens
RLCEFSQTVREERRSSVADRLALHELLAGTSSACKGVEGQALGWPGPPAPHAAPAQPSCSPLLFHRQLDNNHISCIEDGAFRALRDLEILTLNNNNISRILVTSFNHMPKIRTLRLHSNHLYCDCHLAWLSDWLRQRRTVGQFTLCMAPVHLRGFNVADVQKKEYVCPAPHSEPPSCNANSISCPSPCTCSNNIVDCRGKGLMEIPANLPEGIVEIRLEQNSIKAIPAGAFTQYKKLKRIDISKNQISDIAPDAFQGLKSLTSLVLYGNKITEIAKGLFDGLVSLQLLLLNANKINCLRVNTFQDLQNLNLLSLYDNKLQTISKGLFAPLQSIQTLHLAQNPFVCDCHLKWLADYLQDNPIETSGARCSSPRRLANKRISQIKSKKFRCSGSEDYRSRFSSECFMDLVCPEKCRCEGTIVDCSNQKLVRIPSHLPEYVTDLRLNDNEVSVLEATGIFKKLPNLRKINLSNNKIKEVREGAFDGAASVQELMLTGNQLETVHGRVFRGLSGLKTLMLRSNLIGCVSNDTFAGLSSVRLLSLYDNRITTITPGAFTTLVSLSTINLLSNPFNCNCHLAWLGKWLRKRRIVSGNPRCQKPFFLKEIPIQDVAIQDFTCDGNEESSCQLSPRCPEQCTCMETVVRCSNKGLRALPRGMPKDVTELYLEGNHLTAVPRELSALRHLTLIDLSNNSISMLTNYTFSNMSHLSTLILSYNRLRCIPVHAFNGLRSLRVLTLHGNDISSVPEGSFNDLTSLSHLALGTNPLHCDCSLRWLSEWVKAGYKEPGIARCSSPEPMADRLLLTTPTHRFQCKGPVDINIVAKCNACLSRLQLDGVGTAMWDPLVIQHEGNEAGEEGKEEENIKYIVK

SEQ ID NO: 842702 - protein, 333 aa, Homo sapiens [sequence omitted]

SEQ ID NO: 842703 - protein, 133 aa, Homo sapiens
TKNSWYLFELAEPALPGAVHLYGDSGAMQQQGAPRPPQRHAQGCDRAVSTPSCLQAPCHLTISSILHTLPQNLKQGYMAKLPGGRPYLNGIPASMAVEPSPSMAAMVFDKGTGNMAPTVSLPGRGGVSDPVIL

SEQ ID NO: 842704 - protein, 1075 aa, Homo sapiens
MAPGWAGVGAAVRARLALALALASVLSGPPAVACPTKCTCSAASVDCHGLGLRAVPRGIPRNAERLDLDRNNITRITKMDFAGLKNLRVLHLEDNQVSVIERGAFQDLKQLERLRLNKNKLQVLPELLFQSTPKLTRLDLSENQIQGIPRKAFRGITDVKNLQLDNNHISCIEDGAFRALRDLEILTLNNNNISRILVTSFNHMPKIRTLNLLSNPFNCNCHLAWLGKWLRKRRIVSGNPRCQKPFFLKEIPIQDVAIQDFTCDGNEESSCQLSPRCPEQCTCMETVVRCSNKGLRALPRGMPKDVTELYLEGNHLTAVPRELSALRHLTLIDLSNNSISMLTNYTFSNMSHLSTLILSYNRLRCIPVHAFNGLRSLRVLTLHGNDISSVPEGSFNDLTSLSHLALGTNPLHCDCSLRWLSEWVKAGYKEPGIARCSSPEPMADRLLLTTPTHRFQCKGPVDINIVAKCNACLSSPCKNNGTCTQDPVELYRCACPYSYKGKDCTVPINTCIQNPCQHGGTCHLSDSHKDGFSCSCPLGFEGQRCEINPDDCEDNDCENNATCVDGINNYVCICPPNYTGELCDEVIDHCVPELNLCQHEAKCIPLDKGFSCECVPGYSGKLCETDNDDCVAHKCRHGAQCVDTINGYTCTCPQGFSGPFCEHPPPMVLLQTSPCDQYECQNGAQCIVVQQEPTCRCPPGFAGPRCEKLITVNFVGKDSYVELASAKVRPQANISLQVATDKDNGILLYKGDNDPLALELYQGHVRLVYDSLSSPPTTVYSVETVNDGQFHSVELVTLNQTLNLVVDKGTPKSLGKLQKQPAVGINSPLYLGGIPTSTGLSALRQGTDRPLGGFHGCIHEVRINNELQDFKALPPQSLGVSPGCKSCTVCKHGLCRSVEKDSVVCECRPGWTGPLCDQEARDPCLGHRCHHGKCVATGTSYMCKCAEGYGGDLCDNKNDSANACSAFKCHHGQCHISDQGEPYCLCQPGFSGEHCQQENPCLGQVVREVIRRQKGYASCATASKVPIMECRGGCGPQCCQPTRSKRRKYVFQCTDGSSFVEEVERHLECGCLACS

SEQ ID NO: 842705 - protein, 736 aa, Homo sapiens
MVENRKTQQGTCLLFHRILSYNRLRCIPVHAFNGLRSLRVLTLHGNDISSVPEGSFNDLTSLSHLALGTNPLHCDCSLRWLSEWVKAGYKEPGIARCSSPEPMADRLLLTTPTHRFQCKGPVDINIVAKCNACLSSPCKNNGTCTQDPVELYRCACPYSYKGKDCTVPINTCIQNPCQHGGTCHLSDSHKDGFSCSCPLGFEGQRCEINPDDCEDNDCENNATCVDGINNYVCICPPNYTGELCDEVIDHCVPELNLCQHEAKCIPLDKGFSCECVPGYSGKLCETDNDDCVAHKCRHGAQCVDTINGYTCTCPQGFSGPFCEHPPPMVLLQTSPCDQYECQNGAQCIVVQQEPTCRCPPGFAGPRCEKLITVNFVGKDSYVELASAKVRPQANISLQVATDKDNGILLYKGDNDPLALELYQGHVRLVYDSLSSPPTTVYSVETVNDGQFHSVELVTLNQTLNLVVDKGTPKSLGKLQKQPAVGINSPLYLGGIPTSTGLSALRQGTDRPLGGFHGCIHEVRINNELQDFKALPPQSLGVSPGCKSCTVCKHGLCRSVEKDSVVCECRPGWTGPLCDQEARDPCLGHRCHHGKCVATGTSYMCKCAEGYGGDLCDNKNDSANACSAFKCHHGQCHISDQGEPYCLCQPGFSGEHCQQENPCLGQVVREVIRRQKGYASCATASKVPIMECRGGCGPQCCQPTRSKRRKYVFQCTDGSSFVEEVERHLECGCLACS

SEQ ID NO: 842706 - protein, 623 aa, Homo sapiens
MPKSKCLINRRARIWAQAVCLQNLLTQPLNHPASHGKETHPAFEDPTACDKNSHKNGQLPYYIKELLSGNTSNGSGCPEEGTSSPRSLRMNRSLPEGERELNFPGSGLLKSNEIWPGLACLGKSQNLGWQEYGKHTEEQREMEVGRKVGFSPQRAVHAKLGHRCQQGCLRKGESKTSSGLGRELWQHKGLKEETELSPKMDLRAPCGLLLWLENTAGQMDHKCLWWLRSSALEEDPGICPTPFPTSISPSPPPLPHPPSPPRQVDLSLIPPPMPLLASPHPAQSLLSLPSQEPHRGSLASWEESPGCQLSLCLPKEPETSLLLITLGPILNPAPINQDSKRARSVPYNFEPSPSSLEALTLRNAKCKDHEENSPRNEAPLTNDELKRSLLEQSHSRNRTFHEAEKSSVNLLLKKCGSVFVWQCTWAEEAAQAVSPLSRIQEREKKFSSTQPGAVRWPMRLCIYKFFVKCKLKTLNVRCCCYYYCCCCCYGHAKRPLLEDSFAFSIIIARNSSLMLQKDEKKGKKRDNSQAQREKKGGGKEPQGDLRKGQDQDDLTFPFTRNKAIARLNPKVKAVTHCLCWEQKPIATSDLAPQTQDPRYQSWRSHRALLVGRKTEGRTNGRMR

SEQ ID NO: 842707 - protein, 1028 aa, Homo sapiens
RLCEFSQTVREERRSSVADRLALHELLAGTSSACKGVEGQALGWPGPPAPHAAPAQPSCSPLLFHRQLDNNHISCIEDGAFRALRDLEILTLNNNNISRILVTSFNHMPKIRTLRLHSNHLYCDCHLAWLSDWLRQRRTVGQFTLCMAPVHLRGFNVADVQKKEYVCPAPHSEPPSCNANSISCPSPCTCSNNIVDCRGKGLMEIPANLPEGIVEIRLEQNSIKAIPAGAFTQYKKLKRIDISKNQISDIAPDAFQGLKSLTSLVLYGNKITEIAKGLFDGLVSLQLLLLNANKINCLRVNTFQDLQNLNLLSLYDNKLQTISKGLFAPLQSIQTLHLAQNPFVCDCHLKWLADYLQDNPIETSGARCSSPRRLANKRISQIKSKKFRCSGSEDYRSRFSSECFMDLVCPEKCRCEGTIVDCSNQKLVRIPSHLPEYVTDLRLNDNEVSVLEATGIFKKLPNLRKINLSNNKIKEVREGAFDGAASVQELMLTGNQLETVHGRVFRGLSGLKTLMLRSNLIGCVSNDTFAGLSSVRLLSLYDNRITTITPGAFTTLVSLSTINLLSNPFNCNCHLAWLGKWLRKRRIVSGNPRCQKPFFLKEIPIQDVAIQDFTCDGNEESSCQLSPRCPEQCTCMETVVRCSNKGLRALPRGMPKDVTELYLEGNHLTAVPRELSALRHLTLIDLSNNSISMLTNYTFSNMSHLSTLILSYNRLRCIPVHAFNGLRSLRVLTLHGNDISSVPEGSFNDLTSLSHLALGTNPLHCDCSLRWLSEWVKAGYKEPGIARCSSPEPMADRLLLTTPTHRFQCKGPVDINIVAKCNACLSSPCKNNGTCTQDPVELYRCACPYSYKGKDCTVPINTCIQNPCQHGGTCHLSDSHKDGFSCSCPLGFEGQRCEINPDDCEDNDCENNATCVDGINNYVCICPPNYTGELCDEVIDHCVPELNLCQHEAKCIPLDKGFSCECVPGYSGKLCETDNDDCVAHKCRHGAQCVDTINGYTCTCPQGFSRTMGGGCSQKGPLTALGAA

SEQ ID NO: 842708 - protein, 292 aa, Homo sapiens [sequence omitted]

SEQ ID NO: 842709 - protein, 387 aa, Homo sapiens
GRLAEESMASVAWAVLKVLLLLPTQTWSPVGAGNPPDCDAPLASALPRSSFSSSSELSSSHGPGFSRLNRRDGAGGWTPLVSNKYQWLQIDLGERMEVTAVATQGGYGSSDWVTSYLLMFSDGGRNWKQYRREESIWGFPGNTNADSVVHYRLQPPFEARFLRFLPLAWNPRGRIGMRIEVYGCAYKSEVVYFDGQSALLYTLDKKPLKPLRDVISLKFKAMQSNGILLHREGQHGNHITLELIKGKLVFFLNSGNAKLPSTIAPVTLTLGSLLDDQHWHSVLIELLDTQVNFTVDKHTHHFQAKGDSSNLDLNFEISFGGIPTPGRSRAFTRKSFHGCLENLYYNGVDVTELAKKHKPQILMMELAHGLQDQNLKISLTVCHQTTQ

SEQ ID NO: 842710 - protein, 186 aa, Homo sapiens
MELSAAAGRRRQAPWREFTGRHRTERSQERGSTPRKERSMGSRQPRKREREPRDCTPTCTNAASVSRSGARRAPGCAGRCITMKNCARAWRELSERACCFQAVPPSNMKQSWLIFLDTTLCSAWLLASSCPRLYAPLISFHCMCFNTVLLFPRLFGPTLSAKIQFNTDLSLRAIAWKCTKDTTTYC

SEQ ID NO: 842711 - protein, 114 aa, Homo sapiens
LVQCGHGGIDKHRVYRCHISAVPFPWTDVAPSIPLKSIKSSLTFVFHFFFQHFHELPRHSFLQRSTFLQIFIAILDTQLQTQNVSTGSTHNANNCFLRKSRVSRRQPTSDVSFS

SEQ ID NO: 842712 - protein, 121 aa, Homo sapiens
MDWSSWAPKALGAAFPETPRWKGGKEELSERACCFQAVPPSNMKQSWLIFLDTTLCSAWLLASSCPRLYAPLISFHCMCFNTVLLFPRLFGPTLSAKIQFNTDLSLRAIAWKCTKDTTTYC

SEQ ID NO: 842713 - protein, 106 aa, Homo sapiens
MDWSSWAPKALGAAFPETPRWKGGKEEPHTLAFCEKIGAHPRVPQAFGICLLSGARERGGQVPNLASGLSWQLALRSSPWNPGPTVLPAPCLFFSFSFSHCLFLNL

SEQ ID NO: 842714 - protein, 1657 aa, Homo sapiens
MSAADEVDGLGVARPHYGSVLDNERLTAEEMDERRRQNVAYEYLCHLEEAKRWMEACLGEDLPPTTELEEGLRNGVYLAKLGNFFSPKVVSLKKIYDREQTRYKATGLHFRHTDNVIQWLNAMDEIGLPKIFYPETTDIYDRKNMPRCIYCIHALSLYLFKLGLAPQIQDLYGKVDFTEEEINNMKTELEKYGIQMPAFSKIGGILANELSVDEAALHAAVIAINEAIDRRIPADTFAALKNPNAMLVNLEEPLASTYQDILYQAKQDKMTNAKNRTENSERERDVYEELLTQAEIQGNINKVNTFSALANIDLALEQGDALALFRALQSPALGLRGLQQQNSDWYLKQLLSDKQQKRQSGQTDPLQKEELQSGVDAANSAAQQYQRRLAAVALINAAIQKGVAEKTVLELMNPEAQLPQVYPFAADLYQKELATLQRQSPEHNLTHPELSVAVEMLSSVALINRALESGDVNTVWKQLSSSVTGLTNIEEENCQRYLDELMKLKAQAHAENNEFITWNDIQACVDHVNLVVQEEHERILAIGLINEALDEGDAQKTLQALQIPAAKLEGVLAEVAQHYQDTLIRAKREKAQEIQDESAVLWLDEIQGGIWQSNKDTQEAQKFALGIFAINEAVESGDVGKTLSALRSPDVGLYGVIPECGETYHSDLAEAKKKKLAVGDNNSKWVKHWVKGGYYYYHNLETQEGGWDEPPNFVQNSMQLSREEIQSSISGVTAAYNREQLWLANEGLITRLQARCRGYLVRQEFRSRMNFLKKQIPAITCIQSQWRGYKQKKAYQDRLAYLRSHKDEVVKIQSLARMHQARKRYRDRLQYFRDHINDIIKIQAFIRANKARDDYKTLINAEDPPMVVVRKFVHLLDQSDQDFQEELDLMKMREEVITLIRSNQQLENDLNLMDIKIGLLVKNKITLQDVVSHSKKLTKKNKEQLSDMMMINKQKGGLKALSKEKREKLEAYQHLFYLLQTNPTYLAKLIFQMPQNKSTKFMDSVIFTLYNYASNQREEYLLLRLFKTALQEEIKSKVDQIQEIVTGNPTVIKMVVSFNRGARGQNALRQILAPVVKEIMDDKSLNIKTDPVDIYKSWVNQMESQTGEASKLPYDVTPEQALAHEEVKTRLDSSIRNMRAVTDKFLSAIVSSVDKIPYGMRFIAKVLKDSLHEKFPDAGEDELLKIIGNLLYYRYMNPAIVAPDAFDIIDLSAGGQLTTDQRRNLGSIAKMLQHAASNKMFLGDNAHLSIINEYLSQSYQKFRRFFQTACDVPELQDKFNVDEYSDLVTLTKPVIYISIGEIINTHTLLLDHQDAIAPEHNDPIHELLDDLGEVPTIESLIGESSGNLNDPNKEALAKTEVSLTLTNKFDVPGDENAEMDARTILLNTKRLIVDVIRFQPGETLTEILETPATSEQEAEHQRAMQRRAIRDAKTPDKMKKSKSVKEDSNLTLQEKKEKIQTGLKKLTELGTVDPKNKYQELINDIARDIRNQRRYRQRRKAELVKLQQTYAALNSKATFYGEQVDYYKSYIKTCLDNLASKGKVSKKPREMKGKKSKKISLKYTAARLHEKGVLLEIEDLQVNQFKNVIFEISPTEEVGDFEVKAKFMGVQMETFMLHYQDLLQLQYEGVAVMKLFDRAKVNVNLLIFLLNKKFYGK

SEQ ID NO: 842715 - protein, 1657 aa, Homo sapiens; identical to SEQ ID NO: 842714

SEQ ID NO: 842716 - protein, 1657 aa, Homo sapiens; identical to SEQ ID NO: 842714

SEQ ID NO: 842717 - protein, 1166 aa, Homo sapiens
WSSLQSSANAALSPQALGCRHAVDSRCSAQRSVLVHLVQVEMRFPIVSKGVCTQQKALDEGDAQKTLQALQIPAAKLEGVLAEVAQHYQDTLIRAKREKAQEIQDESAVLWLDEIQGGIWQSNKDTQEAQKFALGIFAINEAVESGDVGKTLSALRSPDVGLYGVIPECGETYHSDLAEAKKKKLAVGDNNSKWVKHWVKGGYYYYHNLETQEGGWDEPPNFVQNSMQLSREEIQSSISGVTAAYNREQLWLANEGLITRLQARCRGYLVRQEFRSRMNFLKKQIPAITCIQSQWRGYKQKKAYQDRLAYLRSHKDEVVKIQSLARMHQARKRYRDRLQYFRDHINDIIKIQAFIRANKARDDYKTLINAEDPPMVVVRKFVHLLDQSDQDFQEELDLMKMREEVITLIRSNQQLENDLNLMDIKIGLLVKNKITLQDVVSHSKKLTKKNKEQLSDMMMINKQKGGLKALSKEKREKLEAYQHLFYLLQTNPTYLAKLIFQMPQNKSTKFMDSVIFTLYNYASNQREEYLLLRLFKTALQEEIKSKVDQIQEIVTGNPTVIKMVVSFNRGARGQNALRQILAPVVKEIMDDKSLNIKTDPVDIYKSWVNQMESQTGEASKLPYDVTPEQALAHEEVKTRLDSSIRNMRAVTDKFLSAIVSSVDKIPYGMRFIAKVLKDSLHEKFPDAGEDELLKIIGNLLYYRYMNPAIVAPDAFDIIDLSAGGQLTTDQRRNLGSIAKMLQHAASNKMFLGDNAHLSIINEYLSQSYQKFRRFFQTACDVPELQDKFNVDEYSDLVTLTKPVIYISIGEIINTHTLLLDHQDAIAPEHNDPIHELLDDLGEVPTIESLIGESSGNLNDPNKEALAKTEVSLTLTNKFDVPGDENAEMDARTILLNTKRLIVDVIRFQPGETLTEILETPATSEQEAEHQRAMQRRAIRDAKTPDKMKKSKSVKEDSNLTLQEKKEKIQTGLKKLTELGTVDPKNKYQELINDIARDIRNQRRYRQRRKAELVKLQQTYAALNSKATFYGEQVDYYKSYIKTCLDNLASKGKVSKKPREMKGKKSKKISLKYTAARLHEKGVLLEIEDLQVNQFKNVIFEISPTEEVGDFEVKAKFMGVQMETFMLHYQDLLQLQYEGVAVMKLFDRAKVNVNLLIFLLNKKFYGK

SEQ ID NO: 842718 - protein, 792 aa, Homo sapiens [sequence omitted]

SEQ ID NO: 842719 - protein, 333 aa, Homo sapiens
WRITICLGEVPTIESLIGESSGNLNDPNKEALAKTEVSLTLTNKFDVPGDENAEMDARTILLNTKRLIVDVIRFQPGETLTEILETPATSEQEAEHQRAMQRRAIRDAKTPDKMKKSKSVKEDSNLTLQEKKEKIQTGLKKLTELGTVDPKNKYQELINDIARDIRNQRRYRQRRKAELVKLQQTYAALNSKATFYGEQVDYYKSYIKTCLDNLASKGKVSKKPREMKGKKSKKISLKYTAARLHEKGVLLEIEDLQVNQFKNVIFEISPTEEVGDFEVKAKFMGVQMETFMLHYQDLLQLQYEGVAVMKLFDRAKVNVNLLIFLLNKKFYGK

SEQ ID NO: 842720 - protein, 1657 aa, Homo sapiens; identical to SEQ ID NO: 842714

SEQ ID NO: 842721 - protein, 1657 aa, Homo sapiens; identical to SEQ ID NO: 842714

SEQ ID NO: 842722 - protein, 1657 aa, Homo sapiens; identical to SEQ ID NO: 842714

SEQ ID NO: 842723 - protein, 1508 aa, Homo sapiens
MSAADEVDGLGVARPHYGSVLDNERLTAEEMDERRRQNVAYEYLCHLEEAKRWMEACLGEDLPPTTELEEGLRNGVYLAKLGNFFSPKVVSLKKIYDREQTRYKATGLHFRHTDNVIQWLNAMDEIGLPKIFYPETTDIYDRKNMPRCIYCIHALSLYLFKLGLAPQIQDLYGKVDFTEEEINNMKTELEKYGIQMPAFSKIGGILANELSVDEAALHAAVIAINEAIDRRIPADTFAALKNPNAMLVNLEEPLASTYQDILYQAKQDKMTNAKNRTENSERERDVYEELLTQAEIQGNINKVNTFSALANIDLALEQGDALALFRALQSPALGLRGLQQQNSDWYLKQLLSDKQQKRQSGQTDPLQKEELQSGVDAANSAAQQYQRRLAAVALINAAIQKGVAEKTVLELMNPEAQLPQVYPFAADLYQKELATLQRQSPEHNLTHPELSVAVEMLSSVALINRALESGDVNTVWKQLSSSVTGLTNIEEENCQRYLDELMKLKAQAHAENNEFITWNDIQACVDHVNLVVQEEHERILAIGLINEALDEGDAQKTLQALQIPAAKLEGVLAEVAQHYQDTLIRAKREKAQEIQDESAVLWLDEIQGGIWQSNKDTQEAQKFALGIFAINEAVESGDVGKTLSALRSPDVGLYGVIPECGETYHSDLAEAKKKKLAVGDNNSKWVKHWVKGGYYYYHNLETQEGGWDEPPNFVQNSMQLSREEIQSSISGVTAAYNREQLWLANEGLITRLQARCRGYLVRQEFRSRMNFLKKQIPAITCIQSQWRGYKQKKAYQDRLAYLRSHKDEVVKIQSLARMHQARKRYRDRLQYFRDHINDIIKIQAFIRANKARDDYKTLINAEDPPMVVVRKFVHLLDQSDQDFQEELDLMKMREEVITLIRSNQQLENDLNLMDIKIGLLVKNKITLQDVVSHSKKLTKKNKEQLSDMMMINKQKGGLKALSKEKREKLEAYQHLFYLLQTNPTYLAKLIFQMPQNKSTKFMDSVIFTLYNYASNQREEYLLLRLFKTALQEEIKSKVDQIQEIVTGNPTVIKMVVSFNRGARGQNALRQILAPVVKEIMDDKSLNIKTDPVDIYKSWVNQMESQTGEASKLPYDVTPEQALAHEEVKTRLDSSIRNMRAVTDKFLSAIVSSVDKIPYGMRFIAKVLKDSLHEKFPDAGEDELLKIIGNLLYYRYMNPAIVAPDAFDIIDLSAGGQLTTDQRRNLGSIAKMLQHAASNKMFLGDNAHLSIINEYLSQSYQKFRRFFQTACDVPELQDKFNVDEYSDLVTLTKPVIYISIGEIINTHTLLLDHQDAIAPEHNDPIHELLDDLGEVPTIESLIGESSGNLNDPNKEALAKTEVSLTLTNKFDVPGDENAEMDARTILLNTKRLIVDVIRFQPGETLTEILETPATSEQEAEHQRAMQRRAIRDAKTPDKMKKSKSVKEDSNLTLQEKKEKIQTGLKKLTELGTVDPKNKYQELINDIARVLHSGDRGDPALFKAERLERQ

SEQ ID NO: 842724 - protein, 1093 aa, Homo sapiens
MSAADEVDGLGVARPHYGSVLDNERLTAEEMDERRRQNVAYEYLCHLEEAKRWMEACLGEDLPPTTELEEGLRNGVYLAKLGNFFSPKVVSLKKIYDREQTRYKATGLHFRHTDNVIQWLNAMDEIGLPKIFYPETTDIYDRKNMPRCIYCIHALSLYLFKLGLAPQIQDLYGKVDFTEEEINNMKTELEKYGIQMPAFSKIGGILANELSVDEAALHAAVIAINEAIDRRIPADTFAALKNPNAMLVNLEEPLASTYQDILYQAKQDKMTNAKNRTENSERERDVYEELLTQAEIQGNINKVNTFSALANIDLALEQGDALALFRALQSPALGLRGLQQQNSDWYLKQLLSDKQQKRQSGQTDPLQKEELQSGVDAANSAAQQYQRRLAAVALINAAIQKGVAEKTVLELMNPEAQLPQVYPFAADLYQKELATLQRQSPEHNLTHPELSVAVEMLSSVALINRALESGDVNTVWKQLSSSVTGLTNIEEENCQRYLDELMKLKAQAHAENNEFITWNDIQACVDHVNLVVQEEHERILAIGLINEALDEGDAQKTLQALQIPAAKLEGVLAEVAQHYQDTLIRAKREKAQEIQDESAVLWLDEIQGGIWQSNKDTQEAQKFALGIFAINEAVESGDVGKTLSALRSPDVGLYGVIPECGETYHSDLAEAKKKKLAVGDNNSKWVKHWVKGGYYYYHNLETQEGGWDEPPNFVQNSMQLSREEIQSSISGVTAAYNREQLWLANEGLITRLQARCRGYLVRQEFRSRMNFLKKQIPAITCIQSQWRGYKQKKAYQDRLAYLRSHKDEVVKIQSLARMHQARKRYRDRLQYFRDHINDIIKIQAFIRANKARDDYKTLINAEDPPMVVVRKFVHLLDQSDQDFQEELDLMKMREEVITLIRSNQQLENDLNLMDIKIGLLVKNKITLQDVVSHSKKLTKKNKEQLSDMMMINKQKGGLKALSKEKREKLEAYQHLFYLLQTNPTYLAKLIFQMPQNKSTKFMDSVIFTLYNYASNQREEYLLLRLFKTALQEEIKSKVDQIQEIVTGNPTVIKMVVSFNRGARGQNALRQILAPVVVTHSRMCNNDNNKKQVI

SEQ ID NO: 842725 - protein, 944 aa, Homo sapiens
MSAADEVDGLGVARPHYGSVLDNERLTAEEMDERRRQNVAYEYLCHLEEAKRWMEACLGEDLPPTTELEEGLRNGVYLAKLGNFFSPKVVSLKKIYDREQTRYKATGLHFRHTDNVIQWLNAMDEIGLPKIFYPETTDIYDRKNMPRCIYCIHALSLYLFKLGLAPQIQDLYGKVDFTEEEINNMKTELEKYGIQMPAFSKIGGILANELSVDEAALHAAVIAINEAIDRRIPADTFAALKNPNAMLVNLEEPLASTYQDILYQAKQDKMTNAKNRTENSERERDVYEELLTQAEIQGNINKVNTFSALANIDLALEQGDALALFRALQSPALGLRGLQQQNSDWYLKQLLSDKQQKRQSGQTDPLQKEELQSGVDAANSAAQQYQRRLAAVALINAAIQKGVAEKTVLELMNPEAQLPQVYPFAADLYQKELATLQRQSPEHNLTHPELSVAVEMLSSVALINRALESGDVNTVWKQLSSSVTGLTNIEEENCQRYLDELMKLKAQAHAENNEFITWNDIQACVDHVNLVVQEEHERILAIGLINEALDEGDAQKTLQALQIPAAKLEGVLAEVAQHYQDTLIRAKREKAQEIQDESAVLWLDEIQGGIWQSNKDTQEAQKFALGIFAINEAVESGDVGKTLSALRSPDVGLYGVIPECGETYHSDLAEAKKKKLAVGDNNSKWVKHWVKGGYYYYHNLETQEGGWDEPPNFVQNSMQLSREEIQSSISGVTAAYNREQLWLANEGLITRLQARCRGYLVRQEFRSRMNFLKKQIPAITCIQSQWRGYKQKKAYQDRLAYLRSHKDEVVKIQSLARMHQARKRYRDRLQYFRDHINDIIKIQAFIRANKARDDYKTLINAEDPPMVVVRKFVHLLDQSDQDFQEELDLMKMREEVITLIRSNQQLENDLNLMDIKIGLLVKNKITLQVWPSASGGLGTVHPAL

SEQ ID NO: 842726 - protein, 944 aa, Homo sapiens; identical to SEQ ID NO: 842725

SEQ ID NO: 842727 - protein, 796 aa, Homo sapiens
MSAADEVDGLGVARPHYGSVLDNERLTAEEMDERRRQNVAYEYLCHLEEAKRWMEACLGEDLPPTTELEEGLRNGVYLAKLGNFFSPKVVSLKKIYDREQTRYKATGLHFRHTDNVIQWLNAMDEIGLPKIFYPETTDIYDRKNMPRCIYCIHALSLYLFKLGLAPQIQDLYGKVDFTEEEINNMKTELEKYGIQMPAFSKIGGILANELSVDEAALHAAVIAINEAIDRRIPADTFAALKNPNAMLVNLEEPLASTYQDILYQAKQDKMTNAKNRTENSERERDVYEELLTQAEIQGNINKVNTFSALANIDLALEQGDALALFRALQSPALGLRGLQQQNSDWYLKQLLSDKQQKRQSGQTDPLQKEELQSGVDAANSAAQQYQRRLAAVALINAAIQKGVAEKTVLELMNPEAQLPQVYPFAADLYQKELATLQRQSPEHNLTHPELSVAVEMLSSVALINRALESGDVNTVWKQLSSSVTGLTNIEEENCQRYLDELMKLKAQAHAENNEFITWNDIQACVDHVNLVVQEEHERILAIGLINEALDEGDAQKTLQALQIPAAKLEGVLAEVAQHYQDTLIRAKREKAQEIQDESAVLWLDEIQGGIWQSNKDTQEAQKFALGIFAINEAVESGDVGKTLSALRSPDVGLYGVIPECGETYHSDLAEAKKKKLAVGDNNSKWVKHWVKGGYYYYHNLETQEGGWDEPPNFVQNSMQLSREEIQSSISGVTAAYNREQLWLANEGLITRLQARCRGYLVRQEFRSRMNFLKKQIPAITCIQVFQNLSHRQQAGI

SEQ ID NO: 842728 - protein, 404 aa, Homo sapiens [sequence omitted]

SEQ ID NO: 842729 - protein, 407 aa, Homo sapiens
MSAADEVDGLGVARPHYGSVLDNERLTAEEMDERRRQNVAYEYLCHLEEAKRWMEACLGEDLPPTTELEEGLRNGVYLAKLGNFFSPKVVSLKKIYDREQTRYKATGLHFRHTDNVIQWLNAMDEIGLPKIFYPETTDIYDRKNMPRCIYCIHALSLYLFKLGLAPQIQDLYGKVDFTEEEINNMKTELEKYGIQMPAFSKIGGILANELSVDEAALHAAVIAINEAIDRRIPADTFAALKNPNAMLVNLEEPLASTYQDILYQAKQDKMTNAKNRTENSERERDVYEELLTQAEIQGNINKVNNADKRIKVAIARGGDGMVMDDPYYLAVHQGEATSCTHVDIQLKYYRPSRDIPNRDQTDDQVTIDSDTGHPEVHVWLSTCANNKHLDEARVEEYKLKKMWKSPT

SEQ ID NO: 842730 - protein, 1657 aa, Homo sapiens; identical to SEQ ID NO: 842714

SEQ ID NO: 842731 - protein, 1657 aa, Homo sapiens; identical to SEQ ID NO: 842714

SEQ ID NO: 842732 - protein, 843 aa, Homo sapiens
GSEVAGDLDSAFELGASCQDHINDIIKIQAFIRANKARDDYKTLINAEDPPMVVVRKFVHLLDQSDQDFQEELDLMKMREEVITLIRSNQQLENDLNLMDIKIGLLVKNKITLQDVVSHSKKLTKKNKEQLSDMMMINKQKGGLKALSKEKREKLEAYQHLFYLLQTNPTYLAKLIFQMPQNKSTKFMDSVIFTLYNYASNQREEYLLLRLFKTALQEEIKSKVDQIQEIVTGNPTVIKMVVSFNRGARGQNALRQILAPVVKEIMDDKSLNIKTDPVDIYKSWVNQMESQTGEASKLPYDVTPEQALAHEEVKTRLDSSIRNMRAVTDKFLSAIVSSVDKIPYGMRFIAKVLKDSLHEKFPDAGEDELLKIIGNLLYYRYMNPAIVAPDAFDIIDLSAGGQLTTDQRRNLGSIAKMLQHAASNKMFLGDNAHLSIINEYLSQSYQKFRRFFQTACDVPELQDKFNVDEYSDLVTLTKPVIYISIGEIINTHTLLLDHQDAIAPEHNDPIHELLDDLGEVPTIESLIGESSGNLNDPNKEALAKTEVSLTLTNKFDVPGDENAEMDARTILLNTKRLIVDVIRFQPGETLTEILETPATSEQEAEHQRAMQRRAIRDAKTPDKMKKSKSVKEDSNLTLQEKKEKIQTGLKKLTELGTVDPKNKYQELINDIARDIRNQRRYRQRRKAELVKLQQTYAALNSKATFYGEQVDYYKSYIKTCLDNLASKGKVSKKPREMKGKKSKKISLKYTAARLHEKGVLLEIEDLQVNQFKNVIFEISPTEEVGDFEVKAKFMGVQMETFMLHYQDLLQLQYEGVAVMKLFDRAKVNVNLLIFLLNKKFYGK

SEQ ID NO: 842733 - protein, 487 aa, Homo sapiens
LEDPGKTRGGDELLKIIGNLLYYRYMNPAIVAPDAFDIIDLSAGGQLTTDQRRNLGSIAKMLQHAASNKMFLGDNAHLSIINEYLSQSYQKFRRFFQTACDVPELQDKFNVDEYSDLVTLTKPVIYISIGEIINTHTLLLDHQDAIAPEHNDPIHELLDDLGEVPTIESLIGESSGNLNDPNKEALAKTEVSLTLTNKFDVPGDENAEMDARTILLNTKRLIVDVIRFQPGETLTEILETPATSEQEAEHQRAMQRRAIRDAKTPDKMKKSKSVKEDSNLTLQEKKEKIQTGLKKLTELGTVDPKNKYQELINDIARDIRNQRRYRQRRKAELVKLQQTYAALNSKATFYGEQVDYYKSYIKTCLDNLASKGKVSKKPREMKGKKSKKISLKYTAARLHEKGVLLEIEDLQVNQFKNVIFEISPTEEVGDFEVKAKFMGVQMETFMLHYQDLLQLQYEGVAVMKLFDRAKVNVNLLIFLLNKKFYGK

SEQ ID NO: 842734 - protein, 311 aa, Homo sapiens
MRASCSHQALAKTEVSLTLTNKFDVPGDENAEMDARTILLNTKRLIVDVIRFQPGETLTEILETPATSEQEAEHQRAMQRRAIRDAKTPDKMKKSKSVKEDSNLTLQEKKEKIQTGLKKLTELGTVDPKNKYQELINDIARDIRNQRRYRQRRKAELVKLQQTYAALNSKATFYGEQVDYYKSYIKTCLDNLASKGKVSKKPREMKGKKSKKISLKYTAARLHEKGVLLEIEDLQVNQFKNVIFEISPTEEVGDFEVKAKFMGVQMETFMLHYQDLLQLQYEGVAVMKLFDRAKVNVNLLIFLLNKKFYGK

SEQ ID NO: 842735 - protein, 1657 aa, Homo sapiens; identical to SEQ ID NO: 842714

SEQ ID NO: 842736 - protein, 1297 aa, Homo sapiens
MSAADEVDGLGVARPHYGSVLDNERLTAEEMDERRRQNVAYEYLCHLEEAKRWMEACLGEDLPPTTELEEGLRNGVYLAKLGNFFSPKVVSLKKIYDREQTRYKATGLHFRHTDNVIQWLNAMDEIGLPKIFYPETTDIYDRKNMPRCIYCIHALSLYLFKLGLAPQIQDLYGKVDFTEEEINNMKTELEKYGIQMPAFSKIGGILANELSVDEAALHAAVIAINEAIDRRIPADTFAALKNPNAMLVNLEEPLASTYQDILYQAKQDKMTNAKNRTENSERERDVYEELLTQAEIQGNINKVNTFSALANIDLALEQGDALALFRALQSPALGLRGLQQQNSDWYLKQLLSDKQQKRQSGQTDPLQKEELQSGVDAANSAAQQYQRRLAAVALINAAIQKGVAEKTVLELMNPEAQLPQVYPFAADLYQKELATLQRQSPEHNLTHPELSVAVEMLSSVALINRALESGDVNTVWKQLSSSVTGLTNIEEENCQRYLDELMKLKAQAHAENNEFITWNDIQACVDHVNLVVQEEHERILAIGLINEALDEGDAQKTLQALQIPAAKLEGVLAEVAQHYQDTLIRAKREKAQEIQDESAVLWLDEIQGGIWQSNKDTQEAQKFALGIFAINEAVESGDVGKTLSALRSPDVGLYGVIPECGETYHSDLAEAKKKKLAVGDNNSKWVKHWVKGGYYYYHNLETQEGGWDEPPNFVQNSMQLSREEIQSSISGVTAAYNREQLWLANEGLITRLQARCRGYLVRQEFRSRMNFLKKQIPAITCIQSQWRGYKQKKAYQDRLAYLRSHKDEVVKIQSLARMHQARKRYRDRLQYFRDHINDIIKIQAFIRANKARDDYKTLINAEDPPMVVVRKFVHLLDQSDQDFQEELDLMKMREEVITLIRSNQQLENDLNLMDIKIGLLVKNKITLQDVVSHSKKLTKKNKEQLSDMMMINKQKGGLKALSKEKREKLEAYQHLFYLLQTNPTYLAKLIFQMPQNKSTKFMDSVIFTLYNYASNQREEYLLLRLFKTALQEEIKSKVDQIQEIVTGNPTVIKMVVSFNRGARGQNALRQILAPVVKEIMDDKSLNIKTDPVDIYKSWVNQMESQTGEASKLPYDVTPEQALAHEEVKTRLDSSIRNMRAVTDKFLSAIVSSVDKIPYGMRFIAKVLKDSLHEKFPDAGEDELLKIIGNLLYYRYMNPAIVAPDAFDIIDLSAGGQLTTDQRRNLGSIAKMLQHAASNKMFLGDNAHLSIINEYLSQSYQKFRRFFQTACDVPELQDKFNVDEYSDLVTLTKPDPGK

SEQ ID NO: 842737 - protein, 747 aa, Homo sapiens
MSAADEVDGLGVARPHYGSVLDNERLTAEEMDERRRQNVAYEYLCHLEEAKRWMEACLGEDLPPTTELEEGLRNGVYLAKLGNFFSPKVVSLKKIYDREQTRYKATGLHFRHTDNVIQWLNAMDEIGLPKIFYPETTDIYDRKNMPRCIYCIHALSLYLFKLGLAPQIQDLYGKVDFTEEEINNMKTELEKYGIQMPAFSKIGGILANELSVDEAALHAAVIAINEAIDRRIPADTFAALKNPNAMLVNLEEPLASTYQDILYQAKQDKMTNAKNRTENSERERDVYEELLTQAEIQGNINKVNTFSALANIDLALEQGDALALFRALQSPALGLRGLQQQNSDWYLKQLLSDKQQKRQSGQTDPLQKEELQSGVDAANSAAQQYQRRLAAVALINAAIQKGVAEKTVLELMNPEAQLPQVYPFAADLYQKELATLQRQSPEHNLTHPELSVAVEMLSSVALINRALESGDVNTVWKQLSSSVTGLTNIEEENCQRYLDELMKLKAQAHAENNEFITWNDIQACVDHVNLVVQEEHERILAIGLINEALDEGDAQKTLQALQIPAAKLEGVLAEVAQHYQDTLIRAKREKAQEIQDESAVLWLDEIQGGIWQSNKDTQEAQKFALGIFAINEAVESGDVGKTLSALRSPDVGLYGVIPECGETYHSDLAEAKKKKLAVGDNNSKWVKHWVKGGYYYYHNLETQEGGWDEPPNFVQNSMQLSREEIQSSISGVTAAYNREQLWLANEA

SEQ ID NO: 842738 - protein, 135 aa, Homo sapiens
MSAADEVDGLGVARPHYGSVLDNERLTAEEMDERRRQNVAYEYLCHLEEAKRWMEACLGEDLPPTTELEEGLRNGVYLAKLGNFFSPKVVSLKKIYDREQTRYKATGLHFRHTDNVIQWLNAMDEIGLPKVTYLR

SEQ ID NO: 842739 - protein, 228 aa, Homo sapiens
MVGKPGSGKCWGARMRGRDGQGGQKSRFGSCPARPLTLLSCRPYASRAMTSHTGFGCLAVRLQDEGVYECRVSDYSDDDTQEHKAQAMLRVLSRFAPPNMQAAEAVSHIQSSGPRRHGPASAANANNAGAASRTTSEPGRGDKSPPPGSPPAAIDPAVPEAAAASAAHTPTTTVAAAAAASSASPPSGQAVLLRQRHGSGTGRSYTTDPLLSLLLLALHKFLRLLLGH

SEQ ID NO: 842740 - protein, 758 aa, Homo sapiens
GPGASMMEERAAAAVAAAASSCRPLGSGAGPGPTGAAPVSAPAPGPGPAGKGGGGGGSPGPTAGPEPLSLPGILHFIQHEWARFEAEKARWEAERAELQAQVAFLQGERKGQENLKTDLVRRIKMLEYALKQERAKYHKLKFGTDLNQGEKKADVSEQVSNGPVESVTLENSPLVWKEGRQLLRQYLEEVGYTDTILDMRSKRVRSLLGRSLELNGAVEPSEGAPRAPPGPAGLSGGESLLVKQIEEQIKRNAAGKDGKERLGGSVLGQIPFLQNCEDEDSDEDDELDSVQHKKQRVKLPSKALVPEMEDEDEEDDSEDAINEFDFLGSGEDGEGAPDPRRCTVDGSPHELESRRVKLQGILADLRDVDGLPPKVTGPPPGTPQPRPHEDVFIMDTIGGGEVSLGDLADLTVTNDNDLSCDLSDSKDAFKKTWNPKFTLRSHYDGIRSLAFHHSQSALLTASEDGTLKLWNLQKAVTAKKNAALDVEPIHAFRAHRGPVLAVAMGSNSEYCYSGGADACIHSWKIPDLSMDPYDGYDPSVLSHVLEGHGDAVWGLAFSPTSQRLASCSADGTVRIWDPSSSSPACLCTFPTASEHGVPTSVAFTSTEPAHIVASFRSGDTVLYDMEVGSALLTLESRGSSGPTQINQVVSHPNQPLTITAHDDRGIRFLDNRTGKPVHSMVAHLDAVTCLAVDPNGAFLMSGSHDCSLRLWSLDNKTCVQEITAHRKKHEEAIHAVACHPSKALIASAGADALAKVFV

SEQ ID NO: 842741 - protein, 67 aa, Homo sapiens
LGEAGLGGNDRGDHRGQHSPLGPSSGSLELHRLIRPLSSLCGWYFDPQFTDVGPDAQTLCNLAIEAL

SEQ ID NO: 842742 - protein, 644 aa, Homo sapiens
APSHIALCVCTRASTGNSLDGELLERGCAYVRFWCMLLSGPLRGCLGLHWPLWYMKKPRGCLTHVALHPCRYLEEVGYTDTILDMRSKRVRSLLGRSLELNGAVEPSEGAPRAPPGPAGLSGGESLLVKQIEEQIKRNAAGKDGKERLGGSVLGQIPFLQNCEDEDSDEDDELDSVQHKKQRVKLPSKALVPEMEDEDEEDDSEDAINEFDFLGSGEDGEGAPDPRRCTVDGSPHELESRRVKLQGILADLRDVDGLPPKVTGPPPGTPQPRPHEDVFIMDTIGGGEVSLGDLADLTVTNDNDLSCDLSDSKDAFKKTWNPKFTLRSHYDGIRSLAFHHSQSALLTASEDGTLKLWNLQKAVTAKKNAALDVEPIHAFRAHRGPVLAVAMGSNSEYCYSGGADACIHSWKIPDLSMDPYDGYDPSVLSHVLEGHGDAVWGLAFSPTSQRLASCSADGTVRIWDPSSSSPACLCTFPTASEHGVPTSVAFTSTEPAHIVASFRSGDTVLYDMEVGSALLTLESRGSSGPTQINQVVSHPNQPLTITAHDDRGIRFLDNRTGKPVHSMVAHLDAVTCLAVDPNGAFLMSGSHDCSLRLWSLDNKTCVQEITAHRKKHEEAIHAVACHPSKALIASAGADALAKVFV

SEQ ID NO: 842743 - protein, 428 aa, Homo sapiens
VTYARLGWNCWVTPALCLDPAESRRVKLQGILADLRDVDGLPPKVTGPPPGTPQPRPHEDVFIMDTIGGGEVSLGDLADLTVTNDNDLSCDLSDSKDAFKKTWNPKFTLRSHYDGIRSLAFHHSQSALLTASEDGTLKLWNLQKAVTAKKNAALDVEPIHAFRAHRGPVLAVAMGSNSEYCYSGGADACIHSWKIPDLSMDPYDGYDPSVLSHVLEGHGDAVWGLAFSPTSQRLASCSADGTVRIWDPSSSSPACLCTFPTASEHGVPTSVAFTSTEPAHIVASFRSGDTVLYDMEVGSALLTLESRGSSGPTQINQVVSHPNQPLTITAHDDRGIRFLDNRTGKPVHSMVAHLDAVTCLAVDPNGAFLMSGSHDCSLRLWSLDNKTCVQEITAHRKKHEEAIHAVACHPSKALIASAGADALAKVFV

SEQ ID NO: 842744 - protein, 758 aa, Homo sapiens; identical to SEQ ID NO: 842740

SEQ ID NO: 842745 - protein, 758 aa, Homo sapiens; identical to SEQ ID NO: 842740

SEQ ID NO: 842746 - protein, 353 aa, Homo sapiens
SIRLVRGRVLIGRGCDLSDSKDAFKKTWNPKFTLRSHYDGIRSLAFHHSQSALLTASEDGTLKLWNLQKAVTAKKNAALDVEPIHAFRAHRGPVLAVAMGSNSEYCYSGGADACIHSWKIPDLSMDPYDGYDPSVLSHVLEGHGDAVWGLAFSPTSQRLASCSADGTVRIWDPSSSSPACLCTFPTASEHGVPTSVAFTSTEPAHIVASFRSGDTVLYDMEVGSALLTLESRGSSGPTQINQVVSHPNQPLTITAHDDRGIRFLDNRTGKPVHSMVAHLDAVTCLAVDPNGAFLMSGSHDCSLRLWSLDNKTCVQEITAHRKKHEEAIHAVACHPSKALIASAGADALAKVFV

SEQ ID NO: 842747 - protein, 758 aa, Homo sapiens; identical to SEQ ID NO: 842740

SEQ ID NO: 842748 - protein, 714 aa, Homo sapiens
GPGASMMEERAAAAVAAAASSCRPLGSGAGPGPTGAAPVSAPAPGPGPAGKGGGGGGSPGPTAGPEPLSLPGILHFIQHEWARFEAEKARWEAERAELQAQVAFLQGERKGQENLKTDLVRRIKMLEYALKQERAKYHKLKFGTDLNQGEKKADVSEQVSNGPVESVTLENSPLVWKEGRQLLRQYLEEVGYTDTILDMRSKRVRSLLGRSLELNGAVEPSEGAPRAPPGPAGLSGGESLLVKQIEEQIKRNAAGKDGKERLGGSVLGQIPFLQNCEDEDSDEDDELDSVQHKKQRVKLPSKALVPEMEDEDEEDDSEDAINEFDFLGSGEDGEGAPDPRRCTVDGSPHELESRRVKLQGILADLRDVDGLPPKVTGPPPGTPQPRPHEDVFIMDTIGGGEVSLGDLADLTVTNDNDLSCDLSDSKDAFKKTWNPKFTLRSHYDGIRSLAFHHSQSALLTASEDGTLKLWNLQKAVTAKKNAALDVEPIHAFRAHRGPVLAVAMGSNSEYCYSGGADACIHSWKIPDLSMDPYDGYDPSVLSHVLEGHGDAVWGLAFSPTSQRLASCSADGTVRIWDPSSSSPACLCTFPTASEHGVPTSVAFTSTEPAHIVASFRSGDTVLYDMEVGSALLTLESRGSSATQINKCESSNRLSHYAREGVRSGQRQEPGPGGPGGSAKGPASVVSRGRVRAHNGWKARKEALGPSLGAQLQSL

SEQ ID NO: 842749 - protein, 148 aa, Homo sapiens
GPGASMMEERAAAAVAAAASSCRPLGSGAGPGPTGAAPVSAPAPGPGPAGKGGGGGGSPGPTAGPEPLSLPGILHFIQHEWARFEAEKARWEAERAELQAQVAFLQGERKGQENLKTDLVRRIKMLEYALKQERAKYHKLKFGIAQHS

SEQ ID NO: 842750 - protein, 137 aa, Homo sapiens
WVWALATKPGRAPSYLSFDTCQDSCLLCSAVFGRNAAGKDGKERLGGSVLGQIPFLQNCEDEDSDEDDELDSVQHKKQRVKVSPSSMPCTAWPGCDLIEALPSQPGPSGAAVCAGSRDMETHRPWPGGACGQQRPCK

SEQ ID NO: 842751 - protein, 765 aa, Homo sapiens
GPGASMMEERAAAAVAAAASSCRPLGSGAGPGPTGAAPVSAPAPGPGPAGKGGGGGGSPGPTAGPEPLSLPGILHFIQHEWARFEAEKARWEAERAELQAQVAFLQGERKGQENLKTDLVRRIKMLEYALKQERAKYHKLKFGTDLNQGEKKADVSEQVSNGPVESVTLENSPLVWKEGRQLLRQYLEEVGYTDTILDMRSKRVRSLLGRSLELNGAVEPSEGAPRAPPGPAGLSGGESLLVKQIEEQIKRNAAGKDGKERLGGSVLGQIPFLQNCEDEDSDEDDELDSVQHKKQRVKLPSKALVPEMEDEDEEDDSEDAINEFDFLGSGEDGEGAPDPRRCTVDGSPHELESRRVKLQGILADLRDVDGLPPKVTGPPPGTPQPRPHEGSFGFSSDVFIMDTIGGGEVSLGDLADLTVTNDNDLSCDLSDSKDAFKKTWNPKFTLRSHYDGIRSLAFHHSQSALLTASEDGTLKLWNLQKAVTAKKNAALDVEPIHAFRAHRGPVLAVAMGSNSEYCYSGGADACIHSWKIPDLSMDPYDGYDPSVLSHVLEGHGDAVWGLAFSPTSQRLASCSADGTVRIWDPSSSSPACLCTFPTASEHGVPTSVAFTSTEPAHIVASFRSGDTVLYDMEVGSALLTLESRGSSGPTQINQVVSHPNQPLTITAHDDRGIRFLDNRTGKPVHSMVAHLDAVTCLAVDPNGAFLMSGSHDCSLRLWSLDNKTCVQEITAHRKKHEEAIHAVACHPSKALIASAGADALAKVFV

SEQ ID NO: 842752 - protein, 567 aa, Homo sapiens
MRSKRVRSLLGRSLELNGAVEPSEGAPRAPPGPAGLSGGESLLVKQIEEQIKRNAAGKDGKERLGGSVLGQIPFLQNCEDEDSDEDDELDSVQHKKQRVKLPSKALVPEMEDEDEEDDSEDAINEFDFLGSGEDGEGAPDPRRCTVDGSPHELESRRVKLQGILADLRDVDGLPPKVTGPPPGTPQPRPHEGSFGFSSDVFIMDTIGGGEVSLGDLADLTVTNDNDLSCDLSDSKDAFKKTWNPKFTLRSHYDGIRSLAFHHSQSALLTASEDGTLKLWNLQKAVTAKKNAALDVEPIHAFRAHRGPVLAVAMGSNSEYCYSGGADACIHSWKIPDLSMDPYDGYDPSVLSHVLEGHGDAVWGLAFSPTSQRLASCSADGTVRIWDPSSSSPACLCTFPTASEHGVPTSVAFTSTEPAHIVASFRSGDTVLYDMEVGSALLTLESRGSSGPTQINQVVSHPNQPLTITAHDDRGIRFLDNRTGKPVHSMVAHLDAVTCLAVDPNGAFLMSGSHDCSLRLWSLDNKTCVQEITAHRKKHEEAIHAVACHPSKALIASAGADALAKVFV

SEQ ID NO: 842753 - protein, 365 aa, Homo sapiens
MDTIGGGEVSLGDLADLTVTNDNDLSCDLSDSKDAFKKTWNPKFTLRSHYDGIRSLAFHHSQSALLTASEDGTLKLWNLQKAVTAKKNAALDVEPIHAFRAHRGPVLAVAMGSNSEYCYSGGADACIHSWKIPDLSMDPYDGYDPSVLSHVLEGHGDAVWGLAFSPTSQRLASCSADGTVRIWDPSSSSPACLCTFPTASEHGVPTSVAFTSTEPAHIVASFRSGDTVLYDMEVGSALLTLESRGSSGPTQINQVVSHPNQPLTITAHDDRGIRFLDNRTGKPVHSMVAHLDAVTCLAVDPNGAFLMSGSHDCSLRLWSLDNKTCVQEITAHRKKHEEAIHAVACHPSKALIASAGADALAKVFV

SEQ ID NO: 842754 - protein, 758 aa, Homo sapiens; identical to SEQ ID NO: 842740

SEQ ID NO: 842755 - protein, 758 aa, Homo sapiens; identical to SEQ ID NO: 842740

SEQ ID NO: 842756 - protein, 138 aa, Homo sapiens
KDPVSLRLSASTLSREQVTRSPTQINQVVSHPNQPLTITAHDDRGIRFLDNRTGKPVHSMVAHLDAVTCLAVDPNGAFLMSGSHDCSLRLWSLDNKTCVQEITAHRKKHEEAIHAVACHPSKALIASAGADALAKVFV

SEQ ID NO: 842757 - protein, 136 aa, Homo sapiens
CGRLWESLVQSFHSLRRGPEWEGNLPPALLASGKPVHSMVAHLDAVTCLAVDPNGAFLMSGSKLSTLVPPGLGRRGGRGLGTGSRQVLRGPRGPGLGEAGLGGNDRGDHRGQHSPLGPSSGSLELHRLIRPLSSLC

SEQ ID NO: 842758 - protein, 78 aa, Homo sapiens
DPDDSPLESTPESTRTKDPAPVSVPHSGPAAGRAMRPDSGLGNTTVAPTSTRPQALPSCPAAAQTLGSVQRGITEAPG

SEQ ID NO: 842759 - protein, 338 aa, Homo sapiens
GAAGITIQRERPPRRADPDVLTAGALIQAGLLPGTAVTISQGQVLVPTPTAQGRPGWSSHCGDEGSSTGGGEQSPQTSQQPQPPCAWPAPTASPSPPGPTDTDEWTETPKTSCPLHVCLHMFGDSSENVISFEGVWEAQRYLRSFWTFKPVPRCGLNREAALPFTEVSCVTHKLTEGTPSASSCVLRRRPCLKRSVKAAVQREVTLLCSELCSLPAGLDRCTSRAPRNRVSGQGPLCAFLGVHVPAVTTSRGWAEKQTPLGKLALSLPSPIPGAEVLVRPQGQVHARTVRVLSCGLWPHVTPTRVVGSLAWVVAMARPPSCPRCPGLVTTQAGGGPTW

SEQ ID NO: 842760 - protein, 338 aa, Homo sapiens; identical to SEQ ID NO: 842759

SEQ ID NO: 842761 - protein, 359 aa, Homo sapiens
  misc_feature (297)..(299): Xaa can be any naturally occurring amino acid
  misc_feature (317)..(317): Xaa can be any naturally occurring amino acid
  misc_feature (319)..(319): Xaa can be any naturally occurring amino acid
  misc_feature (327)..(327): Xaa can be any naturally occurring amino acid
  misc_feature (359)..(359): Xaa can be any naturally occurring amino acid
LSDRGPPRGQDFRATGAAKMLQGTCSVLLLWGILGAIQAQQQEVISPDTTERNNNCPEKTDCPIHVYFVLDTSESVTMQSPTDILLFHMKQFVPQFISQLQNEFYLDQVALSWRYGGLHFSDQVEVFSPPGSDRASFIKNLQGISSFRRGTFTDCALANMTEQIRQDRSKGTVHFAVVITDGHVTGSPCGGIKLQAERAREEGIRLFAVAPNQNLKEQGLRDIASTPHELYRNDYATMLPDSTEIDQDTINRIIKVMKHEAYGECYKVSCLESLGLLAQGYVDRRCKGTWVSGRAGXXXQETGHRSPLDSRTKAFWXKXKGDLSDVXGGLLLQTDDEKALGMTLFRNLNGPRYGERIRX

SEQ ID NO: 842762 - protein, 801 aa, Homo sapiens
MLPDSTEIDQDTINRIIKVMKHEAYGECYKVSCLEIPGPSGPKGYRGQKGAKGNMGEPGEPGQKGRQGDPGIEGPIGFPGPKGVPGFKGEKGEFGADGRKGAPGLAGKNGTDGQKGKLGRIGPPGCKGDPGNRGPDGYPGEAGSPGERGDQGGKGDPGRPGRRGPPGEIGAKGSKGYQGNNGAPGSPGVKGAKGGPGPRGPKGEPGRRGDPGTKGSPGSDGPKGEKGDPGPEGPRGLAGEVGNKGAKGDRGLPGPRGPQGALGEPGKQGSRGDPGDAGPRGDSGQPGPKGDPGRPGFSYPGPRGAPGEKGEPGPRGPEGGRGDFGLKGEPGRKGEKGEPADPGPPGEPGPRGPRGVPGPEGEPGPPGDPGLTECDVMTYVRETCGCCDCEKRCGALDVVFVIDSSESIGYTNFTLEKNFVINVVNRLGAIAKDPKSETGTRVGVVQYSHEGTFEAIQLDDERIDSLSSFKEAVKNLEWIAGGTWTPSALKFAYDRLIKESRRQKTRVFAVVITDGRHDPRDDDLNLRALCDRDVTVTAIGIGDMFHEKHESENLYSIACDKPQQVRNMTLFSDLVAEKFIDDMEDVLCPDPQIVCPDLPCQTELSVAQCTQRPVDIVFLLDGSERLGEQNFHKARRFVEQVARRLTLARRDDDPLNARVALLQFGGPGEQQVAFPLSHNLTAIHEALETTQYLNSFSHVGAGVVHAINAIVRSPRGGARRHAELSFVFLTDGVTGNDSLHESAHSMRKQNVVPTVLALGSDVDMDVLTTLSLGDRAAVFHEKDYDSLAQPGFFDRFIRWIC

SEQ ID NO: 842763 - protein, 1082 aa, Homo sapiens
HVAATCSGAEPPRDQDFRATGAAKMLQGTCSVLLLWGILGAIQAQQQEVISPDTTERNNNCPEKTDCPIHVYFVLDTSESVTMQSPTDILLFHMKQFVPQFISQLQNEFYLDQVALSWRYGGLHFSDQVEVFSPPGSDRASFIKNLQGISSFRRGTFTDCALANMTEQIRQDRSKGTVHFAVVITDGHVTGSPCGGIKLQAERAREEGIRLFAVAPNQNLKEQGLRDIASTPHELYRNDYATMLPDSTEIDQDTINRIIKVMKHEAYGECYKVSCLEIPGPSGPKGYRGQKGAKGNMGEPGEPGQKGRQGDPGIEGPIGFPGPKGVPGFKGEKGEFGADGRKGAPGLAGKNGTDGQKGKLGRIGPPGCKGDPGNRGPDGYPGEAGSPGERGDQGGKGDPGRPGRRGPPGEIGAKGSKGYQGNNGAPGSPGVKGAKGGPGPRGPKGEPGRRGDPGTKGSPGSDGPKGEKGDPGPEGPRGLAGEVGNKGAKGDRGLPGPRGPQGALGEPGKQGSRGDPGDAGPRGDSGQPGPKGDPGRPGFSYPGPRGAPGEKGEPGPRGPEGGRGDFGLKGEPGRKGEKGEPADPGPPGEPGPRGPRGVPGPEGEPGPPGDPGLTECDVMTYVRETCGCCAPRALGTPTSHWRRTSSSTWSTGWVPSLRTPSPRQVSGAGRVQHCGGPGGAWEAMRWEKSRRVPPTRASAWLGMPQTPRPLATTSRVRLAGTRVGVVQYSHEGTFEAIQLDDERIDSLSSFKEAVKNLEWIAGGTWTPSALKFAYDRLIKESRRQKTRVFAVVITDGRHDPRDDDLNLRALCDRDVTVTAIGIGDMFHEKHESENLYSIACDKPQQVRNMTLFSDLVAEKFIDDMEDVLCPDPQIVCPDLPCQTELSVAQCTQRPVDIVFLLDGSERLGEQNFHKARRFVEQVARRLTLARRDDDPLNARVALLQFGGPGEQQVAFPLSHNLTAIHEALETTQYLNSFSHVGAGVVHAINAIVRSPRGGARRHAELSFVFLTDGVTGNDSLHESAHSMRKQNVVPTVLALGSDVDMDVLTTLSLGDRAAVFHEKDYDSLAQPGFFDRFIRWIC

SEQ ID NO: 842764 - protein, 425 aa, Homo sapiens [sequence omitted]

SEQ ID NO: 842765 - protein, 1043 aa, Homo sapiens
HVAATCSGAEPPRDQDFRATGAAKMLQGTCSVLLLWGILGAIQAQQQEVISPDTTERNNNCPEKTDCPIHVYFVLDTSESVTMQSPTDILLFHMKQFVPQFISQLQNEFYLDQVALSWRYGGLHFSDQVEVFSPPGSDRASFIKNLQGISSFRRGTFTDCALANMTEQIRQDRSKGTVHFAVVITDGHVTGSPCGGIKLQAERAREEGIRLFAVAPNQNLKEQGLRDIASTPHELYRNDYATMLPDSTEIDQDTINRIIKVMKHEAYGECYKVSCLEIPGPSGPKGYRGQKGAKGNMGEPGEPGQKGRQGDPGIEGPIGFPGPKGVPGFKGEKGEFGADGRKGAPGLAGKNGTDGQKGKLGRIGPPGCKGDPGNRGPDGYPGEAGSPGERGDQGGKGDPGRPGRRGPPGEIGAKGSKGYQGNNGAPGSPGVKGAKGGPGPRGPKGEPGRRGDPGTKGSPGSDGPKGEKGDPGPEGPRGLAGEVGNKGAKGDRGLPGPRGPQGALGEPGKQGSRGDPGDAGPRGDSGQPGPKGDPGRPGFSYPGPRGAPGEKGEPGPRGPEGGRGDFGLKGEPGRKGEKGEPADPGPPGEPGPRGPRGVPGPEGEPGPPGDPGLTECDVMTYVRETCGCCDCEKRCGALDVVFVIDSSESIGYTNFTLEKNFVINVVNRLGAIAKDPKSETGTRVGVVQYSHEGTFEAIQLDDERIDSLSSFKEAVKNLEWIAGGTWTPSALKFAYDRLIKESRRQKTRVFAVVITDGRHDPRDDDLNLRALCDRDVTVTAIGIGDMFHEKHESENLYSIACDKPQQVRNMTLFSDLVAEKFIDDMEDVLCPDPQIVCPDLPCQTELSVAQCTQRPVDIVFLLDGSERLGEQNFHKARRFVEQVARRLTLARRDDDPLNARVALLQFGGPGEQQVAFPLSHNLTAIHEALETTQYLNSFSHVGAGVVHAINAIVRSPRGGARRHAELSFVFLTDGVTGNDSLHESAHSMRKQNVVPTVLALGSDVDMDVLTTLSLGDRAAVFHEKDYDSLAQPGFFDRFIRWIC

SEQ ID NO: 842766 - protein, 188 aa, Homo sapiens
MVILEDPERVMRLGEQNFHKARRFVEQVARRLTLARRDDDPLNARVALLQFGGPGEQQVAFPLSHNLTAIHEALETTQYLNSFSHVGAGVVHAINAIVRSPRGGARRHAELSFVFLTDGVTGNDSLHESAHSMRKQNVVPTVLALGSDVDMDVLTTLSLGDRAAVFHEKDYDSLAQPGFFDRFIRWIC

SEQ ID NO: 842767 - protein, 1043 aa, Homo sapiens; identical to SEQ ID NO: 842765

SEQ ID NO: 842768 - protein, 1043 aa, Homo sapiens; identical to SEQ ID NO: 842765

SEQ ID NO: 842769 - protein, 1043 aa, Homo sapiens; identical to SEQ ID NO: 842765

SEQ ID NO: 842770 - protein, 1042 aa, Homo sapiens
HVAATCSGAEPPRDQDFRATGAAKMLQGTCSVLLLWGILGAIQAQQQEVISPDTTERNNNCPEKTDCPIHVYFVLDTSESVTMQSPTDILLFHMKQFVPQFISQLQNEFYLDQVALSWRYGGLHFSDQVEVFSPPGSDRASFIKNLQGISSFRRGTFTDCALANMTEQIRQDRSKGTVHFAVVITDGHVTGSPCGGIKLQAERAREEGIRLFAVAPNQNLKEQGLRDIASTPHELYRNDYATMLPDSTEIDQDTINRIIKVMKHEAYGECYKVSCLEIPGPSGPKGYRGQKGAKGNMGEPGEPGQKGRQGDPGIEGPIGFPGPKGVPGFKGEKGEFGADGRKGAPGLAGKNGTDGQKGKLGRIGPPGCKGDPGNRGPDGYPGEAGSPGERGDQGGKGDPGRPGRRGPPGEIGAKGSKGYQGNNGAPGSPGVKGAKGGPGPRGPKGEPGRRGDPGTKGSPGSDGPKGEKGDPGPEGPRGLAGEVGNKGAKGDRGLPGPRGPQGALGEPGKQGSRGDPGDAGPRGDSGQPGPKGDPGRPGFSYPGPRGAPGEKGEPGPRGPEGGRGDFGLKGEPGRKGEKGEPADPGPPGEPGPRGPRGVPGPEGEPGPPGDPGLTECDVMTYVRETCGCCDCEKRCGALDVVFVIDSSESIGYTNFTLEKNFVINVVNRLGAIAKDPKSETGTRVGVVQYSHEGTFEAIQLDDERIDSLSSFKEAVKNLEWIAGGTWTPSALKFAYDRLIKESRRQKTRVFAVVITDGRHDPRDDDLNLRALCDRDVTVTAIGIGDMFHEKHESENLYSIACDKPQQVRNMTLFSDLVAEKFIDDMEDVLCPDPQIVCPDLPCQTELSVAQCTQRPVDIVFLLDGSERLGEQNFHKARRFVEQVARRLTLARRDDDPLNARVALLQFGGPGEQQVAFPLSHNLTAIHEALETTQYLNSFSHVGAGVVHAINAIVRSPRGGARRHAELSFVFLTDGVTGNDSLHESAHSMRKQNVVPTVLALGSDVDMDVLTTLSLGDRAAVFHEKDYDSLAQPGFFDRFIRGS

SEQ ID NO: 842771 - protein, 1006 aa, Homo sapiens
HVAATCSGAEPPRDQDFRATGAAKMLQGTCSVLLLWGILGAIQAQQQEVISPDTTERNNNCPEKTDCPIHVYFVLDTSESVTMQSPTDILLFHMKQFVPQFISQLQNEFYLDQVALSWRYGGLHFSDQVEVFSPPGSDRASFIKNLQGISSFRRGTFTDCALANMTEQIRQDRSKGTVHFAVVITDGHVTGSPCGGIKLQAERAREEGIRLFAVAPNQNLKEQGLRDIASTPHELYRNDYATMLPDSTEIDQDTINRIIKVMKHEAYGECYKVSCLEIPGPSGPKGYRGQKGAKGNMGEPGEPGQKGRQGDPGIEGPIGFPGPKGVPGFKGEKGEFGADGRKGAPGLAGKNGTDGQKGKLGRIGPPGCKGDPGNRGPDGYPGEAGSPGERGDQGGKGDPGRPGRRGPPGEIGAKGSKGYQGNNGAPGSPGVKGAKGGPGPRGPKGEPGRRGDPGTKGSPGSDGPKGEKGDPGPEGPRGLAGEVGNKGAKGDRGLPGPRGPQGALGEPGKQGSRGDPGDAGPRGDSGQPGPKGDPGRPGFSYPGPRGAPGEKGEPGPRGPEGGRGDFGLKGEPGRKGEKGEPADPGPPGEPGPRGPRGVPGPEGEPGPPGDPGLTECDVMTYVRETCGCCDCEKRCGALDVVFVIDSSESIGYTNFTLEKNFVINVVNRLGAIAKDPKSETGTRVGVVQYSHEGTFEAIQLDDERIDSLSSFKEAVKNLEWIAGGTWTPSALKFAYDRLIKESRRQKTRVFAVVITDGRHDPRDDDLNLRALCDRDVTVTAIGIGDMFHEKHESENLYSIACDKPQQVRNMTLFSDLVAEKFIDDMEDVLCPDPQIVCPDLPCQTELSVAQCTQRPVDIVFLLDGSERLGEQNFHKARRFVEQVARRLTLARRDDDPLNARVALLQFGGPGEQQVAFPLSHNLTAIHEALETTQYLNSFSHVGAGVVHAINAIVRSPRGGARRHAELSFVFLTDGNPASSTASSAGSASAAARAPQSRVVSPPRPWC

SEQ ID NO: 842772 - protein, 1054 aa, Homo sapiens
HVAATCSGAEPPRDQDFRATGAAKMLQGTCSVLLLWGILGAIQAQQQEVISPDTTERNNNCPEKTDCPIHVYFVLDTSESVTMQSPTDILLFHMKQFVPQFISQLQNEFYLDQVALSWRYGGLHFSDQVEVFSPPGSDRASFIKNLQGISSFRRGTFTDCALANMTEQIRQDRSKGTVHFAVVITDGHVTGSPCGGIKLQAERAREEGIRLFAVAPNQNLKEQGLRDIASTPHELYRNDYATMLPDSTEIDQDTINRIIKVMKHEAYGECYKVSCLEIPGPSGPKGYRGQKGAKGNMGEPGEPGQKGRQGDPGIEGPIGFPGPKGVPGFKGEKGEFGADGRKGAPGLAGKNGTDGQKGKLGRIGPPGCKGDPGNRGPDGYPGEAGSPGERGDQGGKGDPGRPGRRGPPGEIGAKGSKGYQGNNGAPGSPGVKGAKGGPGPRGPKGEPGRRGDPGTKGSPGSDGPKGEKGDPGPEGPRGLAGEVGNKGAKGDRGLPGPRGPQGALGEPGKQGSRGDPGDAGPRGDSGQPGPKGDPGRPGFSYPGPRGAPGEKGEPGPRGPEGGRGDFGLKGEPGRKGEKGEPADPGPPGEPGPRGPRGVPGPEGEPGPPGDPGLTECDVMTYVRETCGCCDCEKRCGALDVVFVIDSSESIGYTNFTLEKNFVINVVNRLGAIAKDPKSETGTRVGVVQYSHEGTFEAIQLDDERIDSLSSFKEAVKNLEWIAGGTWTPSALKFAYDRLIKESRRQKTRVFAVVITDGRHDPRDDDLNLRALCDRDVTVTAIGIGDMFHEKHESENLYSIACDKPQQVRNMTLFSDLVAEKFIDDMEDVLCPDPQIVCPDLPCQTELSVAQCTQRPVDIVFLLDGSERLGEQNFHKARRFVEQVARRLTLARRDDDPLNARVALLQFGGPGEQQVAFPLSHNLTAIHEALETTQYLNSFSHVGAGVVHAINAIVRSPRGGARRHAELSFVFLTDGVTGNDSLHESAHSMRKQNVVPTVLALGSDVDMDVLTTLSLGDRAAVFHEKDYDSLAPGLPPPAAIPRLLTYLAPELWSKP

SEQ ID NO: 842773 - protein, 1036 aa, Homo sapiens
HVAATCSGAEPPRDQDFRATGAAKMLQGTCSVLLLWGILGAIQAQQQEVISPDTTERNNNCPEKTDCPIHVYFVLDTSESVTMQSPTDILLFHMKQFVPQFISQLQNEFYLDQVALSWRYGGLHFSDQVEVFSPPGSDRASFIKNLQGISSFRRGTFTDCALANMTEQIRQDRSKGTVHFAVVITDGHVTGSPCGGIKLQAERAREEGIRLFAVAPNQNLKEQGLRDIASTPHELYRNDYATMLPDSTEIDQDTINRIIKVMKHEAYGECYKVSCLEIPGPSGPKGYRGQKGAKGNMGEPGEPGQKGRQGDPGIEGPIGFPGPKGVPGFKGEKGEFGADGRKGAPGLAGKNGTDGQKGKLGRIGPPGCKGDPGNRGPDGYPGEAGSPGERGDQGGKGDPGRPGRRGPPGEIGAKGSKGYQGNNGAPGSPGVKGAKGGPGPRGPKGEPGRRGDPGTKGSPGSDGPKGEKGDPGPEGPRGLAGEVGNKGAKGDRGLPGPRGPQGALGEPGKQGSRGDPGDAGPRGDSGQPGPKGDPGRPGFSYPGPRGAPGEKGEPGPRGPEGGRGDFGLKGEPGRKGEKGEPADPGPPGEPGPRGPRGVPGPEGEPGPPGDPGLTECDVMTYVRETCGCCDCEKRCGALDVVFVIDSSESIGYTNFTLEKNFVINVVNRLGAIAKDPKSETGTRVGVVQYSHEGTFEAIQLDDERIDSLSSFKEAVKNLEWIAGGTWTPSALKFAYDRLIKESRRQKTRVFAVVITDGRHDPRDDDLNLRALCDRDVTVTAIGIGDMFHEKHESENLYSIACDKPQQVRNMTLFSDLVAEKFIDDMEDVLCPDPQIVCPDLPCQTELSVAQCTQRPVDIVFLLDGSERLGEQNFHKARRFVEQVARRLTLARRDDDPLNARVALLQFGGPGEQQVAFPLSHNLTAIHEALETTQYLNSFSHVGAGVVHAINAIVRSPRGGAQGREPTPSMVLSGPGSHTASTAAHSDDALGLHLSSSSHGVPVAPAPAQPQVSPGPPQAARPPSPCSHPKAPDLPGP

SEQ ID NO: 842774 - protein, 1040 aa, Homo sapiens
HVAATCSGAEPPRDQDFRATGAAKMLQGTCSVLLLWGILGAIQAQQQEVISPDTTERNNNCPEKTDCPIHVYFVLDTSESVTMQSPTDILLFHMKQFVPQFISQLQNEFYLDQVALSWRYGGLHFSDQVEVFSPPGSDRASFIKNLQGISSFRRGTFTDCALANMTEQIRQDRSKGTVHFAVVITDGHVTGSPCGGIKLQAERAREEGIRLFAVAPNQNLKEQGLRDIASTPHELYRNDYATMLPDSTEIDQDTINRIIKVMKHEAYGECYKVSCLEIPGPSGPKGYRGQKGAKGNMGEPGEPGQKGRQGDPGIEGPIGFPGPKGVPGFKGEKGEFGADGRKGAPGLAGKNGTDGQKGKLGRIGPPGCKGDPGNRGPDGYPGEAGSPGERGDQGGKGDPGRPGRRGPPGEIGAKGSKGYQGNNGAPGSPGVKGAKGGPGPRGPKGEPGRRGDPGTKGSPGSDGPKGEKGDPGPEGPRGLAGEVGNKGAKGDRGLPGPRGPQGALGEPGKQGSRGDPGDAGPRGDSGQPGPKGDPGRPGFSYPGPRGAPGEKGEPGPRGPEGGRGDFGLKGEPGRKGEKGEPADPGPPGEPGPRGPRGVPGPEGEPGPPGDPGLTECDVMTYVRETCGCCDCEKRCGALDVVFVIDSSESIGYTNFTLEKNFVINVVNRLGAIAKDPKSETGTRVGVVQYSHEGTFEAIQLDDERIDSLSSFKEAVKNLEWIAGGTWTPSALKFAYDRLIKESRRQKTRVFAVVITDGRHDPRDDDLNLRALCDRDVTVTAIGIGDMFHEKHESENLYSIACDKPQQVRNMTLFSDLVAEKFIDDMEDVLCPDPQIVCPDLPCQTGLDGAVFVLKGFLGVRGVPQRCHRAGLLAPCQLPVPVLTAPTPPAKAEPHTRSTCISSTDSPAQMPLFTLASLSGCPRRSSRPTPTAGLTVFSGRSLADAPWPGGEPPVTFLRTEEGPDATFPRTIPLIQQLLNATELTQDPAAYSQLVAVLVYTAERAKFATGVERQDWMELFIDTFKLVHRDIVGDPETALALC

SEQ ID NO: 842775 - protein, 942 aa, Homo sapiens
HVAATCSGAEPPRDQDFRATGAAKMLQGTCSVLLLWGILGAIQAQQQEVISPDTTERNNNCPEKTDCPIHVYFVLDTSESVTMQSPTDILLFHMKQFVPQFISQLQNEFYLDQVALSWRYGGLHFSDQVEVFSPPGSDRASFIKNLQGISSFRRGTFTDCALANMTEQIRQDRSKGTVHFAVVITDGHVTGSPCGGIKLQAERAREEGIRLFAVAPNQNLKEQGLRDIASTPHELYRNDYATMLPDSTEIDQDTINRIIKVMKHEAYGECYKVSCLEIPGPSGPKGYRGQKGAKGNMGEPGEPGQKGRQGDPGIEGPIGFPGPKGVPGFKGEKGEFGADGRKGAPGLAGKNGTDGQKGKLGRIGPPGCKGDPGNRGPDGYPGEAGSPGERGDQGGKGDPGRPGRRGPPGEIGAKGSKGYQGNNGAPGSPGVKGAKGGPGPRGPKGEPGRRGDPGTKGSPGSDGPKGEKGDPGPEGPRGLAGEVGNKGAKGDRGLPGPRGPQGALGEPGKQGSRGDPGDAGPRGDSGQPGPKGDPGRPGFSYPGPRGAPGEKGEPGPRGPEGGRGDFGLKGEPGRKGEKGEPADPGPPGEPGPRGPRGVPGPEGEPGPPGDPGLTECDVMTYVRETCGCCDCEKRCGALDVVFVIDSSESIGYTNFTLEKNFVINVVNRLGAIAKDPKSETGTRVGVVQYSHEGTFEAIQLDDERIDSLSSFKEAVKNLEWIAGGTWTPSALKFAYDRLIKESRRQKTRVFAVVITDGRHDPRDDDLNLRALCDRDVTVTAIGIGDMFHEKHESENLYSIACDKPQQVRNMTLFSDLVAEKFIDDMEDVLCPDPQIVCPDLPCQTDAPWPGGEPPVTFLRTEEGPDATFPRTIPLIQQLLNATELTQDPAAYSQLVAVLVYTAERAKFATGVERQDWMELFIDTFKLVHRDIVGDPETALALC

SEQ ID NO: 842776 - protein, 858 aa, Homo sapiens
HVAATCSGAEPPRDQDFRATGAAKMLQGTCSVLLLWGILGAIQAQQQEVISPDTTERNNNCPEKTDCPIHVYFVLDTSESVTMQSPTDILLFHMKQFVPQFISQLQNEFYLDQVALSWRYGGLHFSDQVEVFSPPGSDRASFIKNLQGISSFRRGTFTDCALANMTEQIRQDRSKGTVHFAVVITDGHVTGSPCGGIKLQAERAREEGIRLFAVAPNQNLKEQGLRDIASTPHELYRNDYATMLPDSTEIDQDTINRIIKVMKHEAYGECYKVSCLEIPGPSGPKGYRGQKGAKGNMGEPGEPGQKGRQGDPGIEGPIGFPGPKGVPGFKGEKGEFGADGRKGAPGLAGKNGTDGQKGKLGRIGPPGCKGDPGNRGPDGYPGEAGSPGERGDQGGKGDPGRPGRRGPPGEIGAKGSKGYQGNNGAPGSPGVKGAKGGPGPRGPKGEPGRRGDPGTKGSPGSDGPKGEKGDPGPEGPRGLAGEVGNKGAKGDRGLPGPRGPQGALGEPGKQGSRGDPGDAGPRGDSGQPGPKGDPGRPGFSYPGPRGAPGEKGEPGPRGPEGGRGDFGLKGEPGRKGEKGEPADPGPPGEPGPRGPRGVPGPEGEPGPPGDPGLTECDVMTYVRETCGCCDCEKRCGALDVVFVIDSSESIGYTNFTLEKNFVINVVNRLGAIAKDPKSETGTRVGVVQYSHEGTFEAIQLDDERIDSLSSFKEAVKNLEWIAGGTWTPSALKFAYDRLIKESRRQKTRVFAVVITDGRHDPRDDDLNLRALCDRDVTVTAIGIGDMFHEKHESENLYSIACDKPQQVRNMTLFSDLVAEKFIDDMEDVLCPACPLLRLHLPVSPPSSCGRSLYKNPGH

SEQ ID NO: 842777 - protein, 471 aa, Homo sapiens
HVAATCSGAEPPRDQDFRATGAAKMLQGTCSVLLLWGILGAIQAQQQEVISPDTTERNNNCPEKTDCPIHVYFVLDTSESVTMQSPTDILLFHMKQFVPQFISQLQNEFYLDQVALSWRYGGLHFSDQVEVFSPPGSDRASFIKNLQGISSFRRGTFTDCALANMTEQIRQDRSKGTVHFAVVITDGHVTGSPCGGIKLQAERAREEGIRLFAVAPNQNLKEQGLRDIASTPHELYRNDYATMLPDSTEIDQDTINRIIKVMKHEAYGECYKVSCLEIPGPSGPKGYRGQKGAKGNMGEPGEPGQKGRQGDPGIEGPIGFPGPKGVPGFKGEKGEFGADGRKGAPGLAGKNGTDGQKGKLGRIGPPGCKGDPGNRGPDGYPGEAGSPGERGDQGGKGDPGRPGRRGPPGEIGAKGSKGYQGNNGAPGSPGVKGAKGGPGPPRSPGPRPAPGLPRPSAGCPASLPLQPSQGS

SEQ ID NO: 842778 - protein, 513 aa, Homo sapiens
HVAATCSGAEPPRDQDFRATGAAKMLQGTCSVLLLWGILGAIQAQQQEVISPDTTERNNNCPEKTDCPIHVYFVLDTSESVTMQSPTDILLFHMKQFVPQFISQLQNEFYLDQVALSWRYGGLHFSDQVEVFSPPGSDRASFIKNLQGISSFRRGTFTDCALANMTEQIRQDRSKGTVHFAVVITDGHVTGSPCGGIKLQAERAREEGIRLFAVAPNQNLKEQGLRDIASTPHELYRNDYATMLPDSTEIDQDTINRIIKVMKHEAYGECYKVSCLEIPGPSGPKGYRGQKGAKGNMGEPGEPGQKGRQGDPGIEGPIGFPGPKGVPGFKGEKGEIGADGRKGAPGLAWQERDRLAQKGQLGRIATSWLPGRPWKPGPRQGYPRGSSAKLPGDASDDQTAATGDPWPPRTQTAPRDASRGHGTQGAINGPPLAPPGKILAVAKEPNGRAWGPAGPQQAEPQQPGEHPGTQRPSQADDGPHTATRPVLGLTRPAHCQEKRHLGPRATRPAPTTA

SEQ ID NO: 842779 - protein, 287 aa, Homo sapiens
HVAATCSGAEPPRDQDFRATGAAKMLQGTCSVLLLWGILGAIQAQQQEVISPDTTERNNNCPEKTDCPIHVYFVLDTSESVTMQSPTDILLFHMKQFVPQFISQLQNEFYLDQVALSWRYGGLHFSDQVEVFSPPGSDRASFIKNLQGISSFRRGTFTDCALANMTEQIRQDRSKGTVHFAVVITDGHVTGSPCGGIKLQAERAREEGIRLFAVAPNQNLKEQGLRDIASTPHELYRNDYATMLPDSTEIDQDTINRIIKVMKHEAYGEVSGASLPASAGRQLTQQR

SEQ ID NO: 842780 - protein, 425 aa, Homo sapiens [sequence omitted]

SEQ ID NO: 842781 - protein, 97 aa, Homo sapiens
  misc_feature (14)..(14): Xaa can be any naturally occurring amino acid
ASDVNMNVLTTLSXGDRPAVFHEKDYDSLAQPGFFDRFSGRHAELSFVFLTDGVTGNDSLHESAHSMRKQNVVPTVLALGSDVDMDVRVVSPPRPWC

SEQ ID NO: 842782 - protein, 353 aa, Homo sapiens
CPGTPRPGPCCGNSSGAPGGLPCLPCALQECDVMTYVRETCGCCGEALPTAGSGPMHRVEGGSAAGLGHRWVLHVHVTLGSEVSPVPPDDPATPPDCEKRCGALDVVFVIDSSESIGYTNFTLEKNFVINVVNRLGAIAKDPKSETGQRGRAGAALRGAGRGVGGDEMGEVQTRPSNEGLCMAGDAPDPEASGNDLTLRLAGTRVGVVQYSHEGTFEAIQLDDERIDSLSSFKEAVKNLEWIAGGTWTPSALKFAYDRLIKESRRQKTRVFAVVITDGRHDPRDDDLNLRALCDRDVTVTAIGIGDMFHEKHESENLYSIACDKPQQVRNMTLFSDLVAEKFIDDMEDVLCPG

SEQ ID NO: 842783 - protein, 227 aa, Homo sapiens
MEGHRCGAGTCPVLPTSPPPSPHLQSPHKLSVAQCTQRPVDIVFLLDGSERLGEQNFHKARRFVEQVARRLTLARRDDDPLNARVALLQFGGPGEQQVAFPLSHNLTAIHEALETTQYLNSFSHVGAGVVHAINAIVRSPRGGARRHAELSFVFLTDGVTGNDSLHESAHSMRKQNVVPTVLALGSDVDMDVLTTLSLGDRAAVFHEKDYDSLAQPGFFDRFIRWIC

SEQ ID NO: 842784 - protein, 132 aa, Homo sapiens [sequence omitted]

SEQ ID NO: 842785 - protein, 1043 aa, Homo sapiens; identical to SEQ ID NO: 842765

SEQ ID NO: 842786 - protein, 1010 aa, Homo sapiens
HVAATCSGAEPPRDQDFRATGAAKMLQGTCSVLLLWGILGAIQAQQQEVISPDTTERNNNCPEKTDCPIHVYFVLDTSESVTMQSPTDILLFHMKQFVPQFISQLQNEFYLDQVALSWRYGGLHFSDQVEVFSPPGSDRASFIKNLQGISSFRRGTFTDCALANMTEQIRQDRSKGTVHFAVVITDGHVTGSPCGGIKLQAERAREEGIRLFAVAPNQNLKEQGLRDIASTPHELYRNDYATMLPDSTEIDQDTINRIIKVMKHEAYGECYKVSCLEIPGPSGPKGYRGQKGAKGNMGEPGEPGQKGRQGDPGIEGPIGFPGPKGVPGFKGEKGEFGADGRKGAPGLAGKNGTDGQKGKLGRIGPPGCKGDPGNRGPDGYPGEAGSPGERGDQGGKGDPGRPGRRGPPGEIGAKGSKGYQGNNGAPGSPGVKGAKGGPGPRGPKGEPGRRGDPGTKGSPGSDGPKGEKGDPGPEGPRGLAGEVGNKGAKGDRGLPGPRGPQGALGEPGKQGSRGDPGDAGPRGDSGQPGPKGDPGRPGFSYPGPRGAPGEKGEPGPRGPEGGRGDFGLKGEPGRKGEKGEPADPGPPGEPGPRGPRGVPGPEGEPGPPGDPGLTECDVMTYVRETCGCCDCEKRCGALDVVFVIDSSESIGYTNFTLEKNFVINVVNRLGAIDSLSSFKEAVKNLEWIAGGTWTPSALKFAYDRLIKESRRQKTRVFAVVITDGRHDPRDDDLNLRALCDRDVTVTAIGIGDMFHEKHESENLYSIACDKPQQVRNMTLFSDLVAEKFIDDMEDVLCPDPQIVCPDLPCQTELSVAQCTQRPVDIVFLLDGSERLGEQNFHKARRFVEQVARRLTLARRDDDPLNARVALLQFGGPGEQQVAFPLSHNLTAIHEALETTQYLNSFSHVGAGVVHAINAIVRSPRGGARRHAELSFVFLTDGVTGNDSLHESAHSMRKQNVVPTVLALGSDVDMDVLTTLSLGDRAAVFHEKDYDSLAQPGFFDRFIRWIC

SEQ ID NO: 842787 - protein, 238 aa, Homo sapiens
LSRDPPCWPHLVAEKFIDDMEDVLCPDPQIVCPDLPCQTELSVAQCTQRPVDIVFLLDGSERLGEQNFHKARRFVEQVARRLTLARRDDDPLNARVALLQFGGPGEQQVAFPLSHNLTAIHEALETTQYLNSFSHVGAGVVHAINAIVRSPRGGARRHAELSFVFLTDGVTGNDSLHESAHSMRKQNVVPTVLALGSDVDMDVLTTLSLGDRAAVFHEKDYDSLAQPGFFDRFIRWIC

SEQ ID NO: 842788 - protein, 216 aa, Homo sapiens
MVNLEDPERVMRLGTGQEAPCKHLDLELGQGAGVGERVMRLGEQNFHKARRFVEQVARRLTLARRDDDPLNARVALLQFGGPGEQQVAFPLSHNLTAIHEALETTQYLNSFSHVGAGVVHAINAIVRSPRGGARRHAELSFVFLTDGVTGNDSLHESAHSMRKQNVVPTVLALGSDVDMDVLTTLSLGDRAAVFHEKDYDSLAQPGFFDRFIRWIC

SEQ ID NO: 842789 - protein, 1043 aa, Homo sapiens; identical to SEQ ID NO: 842765

SEQ ID NO: 842790 - protein, 942 aa, Homo sapiens; identical to SEQ ID NO: 842775

SEQ ID NO: 842791 - protein, 943 aa, Homo sapiens
HVAATCSGAEPPRDQDFRATGAAKMLQGTCSVLLLWGILGAIQAQQQEVISPDTTERNNNCPEKTDCPIHVYFVLDTSESVTMQSPTDILLFHMKQFVPQFISQLQNEFYLDQVALSWRYGGLHFSDQVEVFSPPGSDRASFIKNLQGISSFRRGTFTDCALANMTEQIRQDRSKGTVHFAVVITDGHVTGSPCGGIKLQAERAREEGIRLFAVAPNQNLKEQGLRDIASTPHELYRNDYATMLPDSTEIDQDTINRIIKVMKHEAYGECYKVSCLEIPGPSGPKGYRGQKGAKGNMGEPGEPGQKGRQGDPGIEGPIGFPGPKGVPGFKGEKGEFGADGRKGAPGLAGKNGTDGQKGKLGRIGPPGCKGDPGNRGPDGYPGEAGSPGERGDQGGKGDPGRPGRRGPPGEIGAKGSKGYQGNNGAPGSPGVKGAKGGPGPRGPKGEPGRRGDPGTKGSPGSDGPKGEKGDPGPEGPRGLAGEVGNKGAKGDRGLPGPRGPQGALGEPGKQGSRGDPGDAGPRGDSGQPGPKGDPGRPGFSYPGPRGAPGEKGEPGPRGPEGGRGDFGLKGEPGRKGEKGEPADPGPPGEPGPRGPRGVPGPEGEPGPPGDPGLTECDVMTYVRETCGCCDCEKRCGALDVVFVIDSSESIGYTNFTLEKNFVINVVNRLGAIAKDPKSETGTRVGVVQYSHEGTFEAIQLDDERIDSLSSFKEAVKNLEWIAGGTWTPSALKFAYDRLIKESRRQKTRVFAVVITDGRHDPRDDDLNLRALCDRDVTVTAIGIGDMFHEKHESENLYSIACDKPQQVRNMTLFSDLVAEKFIDDMEDVLCPDPQIVCPDLPCQTELSVAQCTQRPVDIVFLLDGSERLGEQNFHKARRFVEQVARRLTLARRDDDPLNARVALLQFGGPRGGSRDKLRLQSLGRRVLAGRGVQPRPLADNLPG

SEQ ID NO: 842792 - protein, 850 aa, Homo sapiens
HVAATCSGAEPPRDQDFRATGAAKMLQGTCSVLLLWGILGAIQAQQQEVISPDTTERNNNCPEKTDCPIHVYFVLDTSESVTMQSPTDILLFHMKQFVPQFISQLQNEFYLDQVALSWRYGGLHFSDQVEVFSPPGSDRASFIKNLQGISSFRRGTFTDCALANMTEQIRQDRSKGTVHFAVVITDGHVTGSPCGGIKLQAERAREEGIRLFAVAPNQNLKEQGLRDIASTPHELYRNDYATMLPDSTEIDQDTINRIIKVMKHEAYGECYKVSCLEIPGPSGPKGYRGQKGAKGNMGEPGEPGQKGRQGDPGIEGPIGFPGPKGVPGFKGEKGEFGADGRKGAPGLAGKNGTDGQKGKLGRIGPPGCKGDPGNRGPDGYPGEAGSPGERGDQGGKGDPGRPGRRGPPGEIGAKGSKGYQGNNGAPGSPGVKGAKGGPGPRGPKGEPGRRGDPGTKGSPGSDGPKGEKGDPGPEGPRGLAGEVGNKGAKGDRGLPGPRGPQGALGEPGKQGSRGDPGDAGPRGDSGQPGPKGDPGRPGFSYPGPRGAPGEKGEPGPRGPEGGRGDFGLKGEPGRKGEKGEPADPGPPGEPGPRGPRGVPGPEGEPGPPGDPGLTECDVMTYVRETCGCCDCEKRCGALDVVFVIDSSESIGYTNFTLEKNFVINVVNRLGAIAKDPKSETGTRVGVVQYSHEGTFEAIQLDDERIDSLSSFKEAVKNLEWIAGGTWTPSALKFAYDRLIKESRRQKTRVFAVVITDGRHDPRDDDLNLRALCDRDVTVTAIGIGDMFHEKHESENLYSIACDKPQQVRNMTLFSDLVAEKFIDDMEDVLCPGPLLKPGHPPSRAGPSLPH

SEQ ID NO: 842793 - protein, 832 aa, Homo sapiens
HVAATCSGAEPPRDQDFRATGAAKMLQGTCSVLLLWGILGAIQAQQQEVISPDTTERNNNCPEKTDCPIHVYFVLDTSESVTMQSPTDILLFHMKQFVPQFISQLQNEFYLDQVALSWRYGGLHFSDQVEVFSPPGSDRASFIKNLQGISSFRRGTFTDCALANMTEQIRQDRSKGTVHFAVVITDGHVTGSPCGGIKLQAERAREEGIRLFAVAPNQNLKEQGLRDIASTPHELYRNDYATMLPDSTEIDQDTINRIIKVMKHEAYGECYKVSCLEIPGPSGPKGYRGQKGAKGNMGEPGEPGQKGRQGDPGIEGPIGFPGPKGVPGFKGEKGEFGADGRKGAPGLAGKNGTDGQKGKLGRIGPPGCKGDPGNRGPDGYPGEAGSPGERGDQGGKGDPGRPGRRGPPGEIGAKGSKGYQGNNGAPGSPGVKGAKGGPGPRGPKGEPGRRGDPGTKGSPGSDGPKGEKGDPGPEGPRGLAGEVGNKGAKGDRGLPGPRGPQGALGEPGKQGSRGDPGDAGPRGDSGQPGPKGDPGRPGFSYPGPRGAPGEKGEPGPRGPEGGRGDFGLKGEPGRKGEKGEPADPGPPGEPGPRGPRGVPGPEGEPGPPGDPGLTECDVMTYVRETCGCCDCEKRCGALDVVFVIDSSESIGYTNFTLEKNFVINVVNRLGAIAKDPKSETGTRVGVVQYSHEGTFEAIQLDDERIDSLSSFKEAVKNLEWIAGGTWTPSALKFAYDRLIKESRRQKTRVFAVVITDGRHDPRDDDLNLRALCDRDVTVTAIGIGDMFHEKHESENLYSIACDKPQQVRNMTLFSDLVAEKFIDDMEDVLCPG

SEQ ID NO: 842794 - protein, 311 aa, Homo sapiens
HVAATCSGAEPPRDQDFRATGAAKMLQGTCSVLLLWGILGAIQAQQQEVISPDTTERNNNCPEKTDCPIHVYFVLDTSESVTMQSPTDILLFHMKQFVPQFISQLQNEFYLDQVALSWRYGGLHFSDQVEVFSPPGSDRASFIKNLQGISSFRRGTFTDCALANMTEQIRQDRSKGTVHFAVVITDGHVTGSPCGGIKLQAERAREEGIRLFAVAPNQNLKEQGLRDIASTPHELYRNDYATMLPDSTEIDQDTINRIIKVMKHEAYGECYKVSCLEIPGPSGPKGYRGQKGAKGNMGEPGEPGQKGRQSP

SEQ ID NO: 842795 - protein, 54 aa, Homo sapiens
MQRTICAHTCTGSRGCLHDGHPREKGPSYGKSTSLQPLQLPGRSPWQEQRAEPP

SEQ ID NO: 842796 - protein, 102 aa, Homo sapiens
MAEISITLVCNMLSAAFLFLESIYRHIVGCDDGIVAMLKGPYLFLNDFEIQCTYHTTHPRTLKMYSSVISSCKVHESPRPSSLLTPTASLGVPVTTFRVRVR

SEQ ID NO: 842797 - protein, 102 aa, Homo sapiens; identical to SEQ ID NO: 842796

SEQ ID NO: 842798 - protein, 56 aa, Homo sapiens
MTLLPSKGGEQSLLKSIPLPFPSLRRPERRMDRIWALDLGKFAMYCVILHSPIYKM

SEQ ID NO: 842799 - protein, 189 aa, Homo sapiens
MVSRTERGRPAHALRPFAEATTVQACPAPYLSRLCAGLVVKDPSIYDTLESVRSCLYGAGLLPGSLPFGPLLAVPGRPRGGARRARGDADDAVYHTCFFGDSEPPALPPPPPPARAFGPGPAETPAVGPGPGPRAALSRSASVRCAGPGGGGGGGAPGALWTEAREQALCGPGLRKTKYRSFRRRLLKF

SEQ ID NO: 842800 - protein, 189 aa, Homo sapiens; identical to SEQ ID NO: 842799

SEQ ID NO: 842801 - protein, 237 aa, Homo sapiens
MTLLPSKGGDTIASVNGLNVEGIRHREIVDIIKASGNVLRLETLYGTSIRKAELEARLQYLKQTLYEKWGEYRSLMVQEQRLVHGLVVKDPSIYDTLESVRSCLYGAGLLPGSLPFGPLLAVPGRPRGGARRARGDADDAVYHTCFFGDSEPPALPPPPPPARAFGPGPAETPAVGPGPGPRAALSRSASVRCAGPGGGGGGGAPGALWTEAREQALCGPGLRKTKYRSFRRRLLKF

SEQ ID NO: 842802 - protein, 339 aa, Homo sapiens
RTRSTVSVRRGQGMVLLCGPPPHSGELSYAWIFNEYPSYQDNRRFVSQETGNLYIAKVEKSDVGNYTCVVTNTVTNHKVLGPPTPLILRNDGVMGEYEPKIEVQFPETVPTAKGATVKLECFALGNPVPTIIWRRADGKPIARKARRHKSNGILEIPNFQQEDAGLYECVAENSRGKNVARGQLTFYAQPNWIQKINDIHVAMEENVFWECKANGRPKPTYKWLKNGEPLLTRDRIQIEQGTLNITIVNLSDAGMYQCLAENKHGVIFSNAELSVIAVGPDFSRTLLKRVTLVKVGGEVVIECKPKASPKPVYTWKKGRDILKENESVHQGFGSGSAPL

SEQ ID NO: 842803 - protein, 469 aa, Homo sapiens
RTRSTVSVRRGQGMVLLCGPPPHSGELSYAWIFNEYPSYQDNRRFVSQETGNLYIAKVEKSDVGNYTCVVTNTVTNHKVLGPPTPLILRNDGVMGEYEPKIEVQFPETVPTAKGATVKLECFALGNPVPTIIWRRADGKPIARKARRHKSNGILEIPNFQQEDAGLYECVAENSRGKNVARGQLTFYAQPNWIQKINDIHVAMEENVFWECKANGRPKPTYKWLKNGEPLLTRDRIQIEQGTLNITIVNLSDAGMYQCLAENKHGVIFSNAELSVIAVGPDFSRTLLKRVTLVKVGGEVVIECKPKASPKPVYTWKKGRDILKENERITISEDGNLRIINVTKSDAGSYTCIATNHFGTASSTGNLVVKDPTRVMVPPSSMDVTVGESIVLPCQVTHDHSLDIVFTWSFNGHLIDFDRDGDHFERVGGQDSAGDLMIRNIQLKHAGKYVCMVQTSVDRLSAAADLIVRG

SEQ ID NO: 842804 - protein, 384 aa, Homo sapiens
RTRSTVSVRRGQGMVLLCGPPPHSGELSYAWIFNEYPSYQDNRRFVSQETGNLYIAKVEKSDVGNYTCVVTNTVTNHKVLGPPTPLILRNDGVMGEYEPKIEVQFPETVPTAKGATVKLECFALGNPVPTIIWRRADGKPIARKARRHKSNGILEIPNFQQEDAGLYECVAENSRGKNVARGQLTFYAQPNWIQKINDIHVAMEENVFWECKANGRPKPTYKWLKNGEPLLTRDRIQIEQGTLNITIVNLSDAGMYQCLAENKHGVIFSNAELSVIAVGPDFSRTLLKRVTLVKVGGEVVIECKPKASPKPVYTWKKGRDILKENERITISEDGNLRIINVTKSDAGSYTCIATNHFGTASSTGNLVVKELHPGCIQSISTSVS

SEQ ID NO: 842805 - protein, 826 aa, Homo sapiens
VLPSYLQDRCLPGVLASPELRSYPYAFSVARPLTSDSKLVSLEVNRLPCTSPSGSTTTQPAPDGVPGPLADTSLVTASAKVLPTPQPLLPAPSGSSAPPHPAKMPSGTEQQTEGTSVTFSPLKSPPQLEREMASPPECSEMPLDLSSKSNRQKLPLPNQRKTPPMPVLTPVHTSSKALLSTVLSRSQRTTQAAGGNVTSCLGSTSSPFVIFPEIVRNGDPSTWVKNSTALISTIPGTYVGVANPVPASLLLNKDPNLGLNRDPRHLPKQEPISIIDQGEPKGTGATCGKKGSQAGAEGQPSTVKRYTPARIAPGLPGCQTKELSLWKPTGPANIYPRCSVNGKPTSTQVLPVGWSPYHQASLLSIGISSAGQLTPSQGAPIRPTSVVSEFSGVPSLSSSEAVHGLPEGQPRPGGSFVPEQDPVTKNKTCRIAAKPYEEQVNPVLLTLSPQTGTLALSVQPSGGDIRMNQGPEESESHLCSDSTPKMEGPQGACGLKLAGDTKPKNQVLATYMSHELVLATPQNLPKMPELPLLPHDSHPKELILDVVPSSRRGSSTERPQLGSQVDLGRVKMEKVDGDVVFNLATCFRADGLPVAPQRGQAEVRAKAGQARVKQESVGVFACKNKWQPDDVTESLPPKKMKCGKEKDSEEQQLQPQAKAVVRSSHRPKCRKLPSDPQESTKKSPRGASDSGKEHNGVRGKHKHRKPTKPESQSPGKRADSHEEGSLEKKAKSSFRDFIPVVLSTRTRSQSDLKARKQKTSSSQSLEHRLRNRNLLLPNKVQGISDSPNGFLPNNLEEPACLENSEKPSGKRKCKTKHMATVSEEAK

SEQ ID NO: 842806 - protein, 229 aa, Homo sapiens
MISTAPLYSGVHNWTSSDRIRMCGINEERRAPLSDEESTTGDCQHFGSQEFCVSSSFSKVELTAVGSGSNARGADPDGSATEKLGHKSEDKPDDPQPKMDYAGNVAEAEGLLVPLSSPGDGLKLPASDSAEASNSRADCSWTPLNTQMSKQVDCSPAGVKALDSRQGVGEKNTFILATLGTGVPVEGTLPLVTTNFSPLPAPICPPAPGSASVPHSVPDAFQVPLSVPA

SEQ ID NO: 842807 - protein, 229 aa, Homo sapiens; identical to SEQ ID NO: 842806

SEQ ID NO: 842808 - protein, 253 aa, Homo sapiens
MISTAPLYSGVHNWTSSDRIRMCGINEERRAPLSDEESTTGDCQHFGSQEFCVSSSFSKCRKLPSDPQESTKKSPRGASDSGKEHNGVRGKHKHRKPTKPESQSPGKRADSHEEGSLEKKAKSSFRDFIPVVLSTRTRSQSGSICSSFAGMADSDMGSQEVFPTEEEEEVTPTPAKRRKVRKTQRDTQYRSHHAQDKSLLSQGRRHLWRAREMPWRTEAARQMWDTNEEEEEEEEEGLLKRKKRRRQKSRKYQ

SEQ ID NO: 842809 - protein, 217 aa, Homo sapiens
LKSWASCPFSGCIFHARRAPLSDEESTTGDCQHFGSQEFCVSSSFSKVELTAVGSGSNARGADPDGSATEKLGHKSEDKPDDPQPKMDYAGNVAEAEGLLVPLSSPGDGLKLPASDSAEASNSRADCSWTPLNTQMSKQVDCSPAGVKALDSRQGVGEKNTFILATLGTGVPVEGTLPLVTTNFSPLPAPICPPAPGSASVPHSVPDAFQVPLSVPA

SEQ ID NO: 842810 - protein, 188 aa, Homo sapiens
MYPANTLYSYVKNSHTNEHAIVQQKHYDEYGIFNSHIDHCLTGKLVIGHNMLLDVMHTVHQFYCPLPADLSEFKEMTTCVFPRLLDTKLMASTQPFKDIINNTSLAELEKRLKETPFNPPKVESAEGFPSYDTASEQLHEAGYDAYITGLCFISMANYLGSFLSPPKIHVSARSKLIEPFFNKVPLEI

SEQ ID NO: 842811 - protein, 721 aa, Homo sapiens
CLSYCRSRRGIRRVEPLRRARARVGPRFRPLCRMEIIRSNFKSNLHKVYQAIEEADFFAIDGEFSGISDGPSVSALTNGFDTPEERYQKLKKVYKKSFNFYVFPKPFNRSSPDVKFVCQSSSIDFLASQGFDFNKVFRNGIPYLNQEEERQLREQYDEKRSQANGAGALSYVSPNTSKCPVTIPEDQKKFIDQVVEKIEDLLQSEENKNLDLEPCTGFQRKLIYQTLSWKYPKGIHVETLETEKKERYIVISKVDEEERKRREQQKHAKEQEELNDAVGFSRVIHAIANSGKLVIGHNMLLDVMHTVHQFYCPLPADLSEFKEMTTCVFPRLLDTKLMASTQPFKDIINNTSLAELEKRLKETPFNPPKVESAEGFPSYDTASEQLHEAGYDAYITGLCFISMANYLGSFLSPPKIHVSARSKLIEPFFNKLECNGVISAHRNLCLSGSSDSPVSASQVAGITESRSVARLESNGAISTHCNFCLLGSSDSPVSASQVAGIYRLFLMRVMDIPYLNLEGPDLQPKRDHVLHVTFPKEWKTSDLYQLFSAFGNIQISWIDDTSAFVSLSQPEQVKIAVNTSKYAESYRIQTYAEYMGRKQEEKQIKRKWTEDSWKEADSKRLNPQCIPYTLQNHYYRNNSFTAPSTVGKRNLSPSQEEAGLEDGVSGEISDTELEQTDSCAEPLSEGRKKAKKLKRMKKELSPAGSISKNSPATLFEVPDTW

SEQ ID NO: 842812 - protein, 127 aa, Homo sapiens [sequence omitted]

SEQ ID NO: 842813 - protein, 102 aa, Homo sapiens
QAGTVRNFRDIGSEEGAFSSLEASRRTALPHSLKFLTHGNQDLRAANRWCCRCEQEPAGTFGSRTVFNLIKCGMGGVGNQVVSWGGENRFYFCGCGFFPFLI

SEQ ID NO: 842814 - protein, 436 aa, Homo sapiens
CLSYCRSRRGIRRVEPLRRARARVGPRFRPLCRMEIIRSNFKSNLHKVYQAIEEADFFAIDGEFSGISDGPSVSALTNGFDTPEERYQKLKKVYKKSFNFYVFPKPFNRSSPDVKFVCQSSSIDFLASQGFDFNKVFRNGIPYLNQEEERQLREQYDEKRSQANGAGALSYVSPNTSKCPVTIPEDQKKFIDQVVEKIEDLLQSEENKNLDLEPCTGFQRKLIYQTLSWKYPKGIHVETLETEKKERYIVISKVDEEERKRREQQKHAKEQEELNDAVGFSRVIHAIANSGKLVIGHNMLLDVMHTVHQFYCPLPADLSEFKEMTTCVFPRLLDTKLMASTQPFKDIINNTSLAELEKRLKETPFNPPKVESAEGFPSYDTASEQLHEAGYDAYITGLCFISMANYLGSFLSPPKIHVSARSKLIEPFFNKVPLEI

SEQ ID NO: 842815 - protein, 672 aa, Homo sapiens
CLSYCRSRRGIRRVEPLRRARARVGPRFRPLCRMEIIRSNFKSNLHKVYQAIEEADFFAIDGEFSGISDGPSVSALTNGFDTPEERYQKLKKHSMDFLLFQFGLCTFKYDYTDSKYITKSFNFYVFPKPFNRSSPDVKFVCQSSSIDFLASQGFDFNKVFRNGIPYLNQEEERQLREQYDEKRSQANGAGALSYVSPNTSKCPVTIPEDQKKFIDQVVEKIEDLLQSEENKNLDLEPCTGFQRKLIYQTLSWKYPKGIHVETLETEKKERYIVISKVDEEERKRREQQKHAKEQEELNDAVGFSRVIHAIANSGKLVIGHNMLLDVMHTVHQFYCPLPADLSEFKEMTTCVFPRLLDTKLMASTQPFKDIINNTSLAELEKRLKETPFNPPKVESAEGFPSYDTASEQLHEAGYDAYITGLCFISMANYLGSFLSPPKIHVSARSKLIEPFFNKLFLMRVMDIPYLNLEGPDLQPKRDHVLHVTFPKEWKTSDLYQLFSAFGNIQISWIDDTSAFVSLSQPEQVKIAVNTSKYAESYRIQTYAEYMGRKQEEKQIKRKWTEDSWKEADSKRLNPQCIPYTLQNHYYRNNSFTAPSTVGKRNLSPSQEEAGLEDGVSGEISDTELEQTDSCAEPLSEGRKKAKKLKRMKKELSPAGSISKNSPATLFEVPDTW

SEQ ID NO: 842816 - protein, 649 aa, Homo sapiens
CLSYCRSRRGIRRVEPLRRARARVGPRFRPLCRMEIIRSNFKSNLHKVYQAIEEADFFAIDGEFSGISDGPSVSALTNGFDTPEERYQKLKKVYKKSFNFYVFPKPFNRSSPDVKFVCQSSSIDFLASQGFDFNKVFRNGIPYLNQEEERQLREQYDEKRSQANGAGALSYVSPNTSKCPVTIPEDQKKFIDQVVEKIEDLLQSEENKNLDLEPCTGFQRKLIYQTLSWKYPKGIHVETLETEKKERYIVISKVDEEERKRREQQKHAKEQEELNDAVGFSRVIHAIANSGKLVIGHNMLLDVMHTVHQFYCPLPADLSEFKEMTTCVFPRLLDTKLMASTQPFKDIINNTSLAELEKRLKETPFNPPKVESAEGFPSYDTASEQLHEAGYDAYITGLCFISMANYLGSFLSPPKIHVSARSKLIEPFFNKLFLMRVMDIPYLNLEGPDLQPKRDHVLHVTFPKEWKTSDLYQLFSAFGNIQISWIDDTSAFVSLSQPEQVKIAVNTSKYAESYRIQTYAEYMGRKQEEKQIKRKWTEDSWKEADSKRLNPQCIPYTLQNHYYRNNSFTAPSTVGKRNLSPSQEEAGLEDGVSGEISDTELEQTDSCAEPLSEGRKKAKKLKRMKKELSPAGSISKNSPATLFEVPDTW

SEQ ID NO: 842817 - protein, 212 aa, Homo sapiens [sequence omitted]

SEQ ID NO: 842818 - protein, 519 aa, Homo sapiens
MVLTLQKRGIRSLKRYITKSFNFYVFPKPFNRSSPDVKFVCQSSSIDFLASQGFDFNKVFRNGIPYLNQEEERQLREQYDEKRSQANGAGALSYVSPNTSKCPVTIPEDQKKFIDQVVEKIEDLLQSEENKNLDLEPCTGFQRKLIYQTLSWKYPKGIHVETLETEKKERYIVISKVDEEERKRREQQKHAKEQEELNDAVGFSRVIHAIANSGKLVIGHNMLLDVMHTVHQFYCPLPADLSEFKEMTTCVFPRLLDTKLMASTQPFKDIINNTSLAELEKRLKETPFNPPKVESAEGFPSYDTASEQLHEAGYDAYITGLCFISMANYLGSFLSPPKIHVSARSKLIEPFFNKLFLMRVMDIPYLNLEGPDLQPKRDHVLHVTFPKEWKTSDLYQLFSAFGNIQISWIDDTSAFVSLSQPEQVKIAVNTSKYAESYRIQTYAEYMGRKQEFLTHGNQDLRAANRWCCRCEQEPAGTFGSRTVFNLIKCGMGGVGNQVVSWGGENRFYFCGCGFFPFLI

SEQ ID NO: 842819 - protein, 649 aa, Homo sapiens; identical to SEQ ID NO: 842816

SEQ ID NO: 842820 - protein, 649 aa, Homo sapiens; identical to SEQ ID NO: 842816

SEQ ID NO: 842821 - protein, 344 aa, Homo sapiens
MVLTLQKRGIRSLKRYITKSFNFYVFPKPFNRSSPDVKFVCQSSSIDFLASQGFDFNKVFRNGIPYLNQEEERQLREQYDEKRSQANGAGALSYVSPNTSKCPVTIPEDQKKFIDQVVEKIEDLLQSEENKNLDLEPCTGFQRKLIYQTLSWKYPKGIHVETLETEKKERYIVISKVDEEERKRREQQKHAKEQEELNDAVGFSRVIHAIANSGKLVIGHNMLLDVMHTVHQFYCPLPADLSEFKEMTTCVFPRLLDTKLMASTQPFKDIINNTSLAELEKRLKETPFNPPKVESAEGFPSYDTASEQLHEAGYDAYITGLCFISMANYLGSFLRHLQSGTELD

SEQ ID NO: 842822 - protein, 108 aa, Homo sapiens
RGWHPGRGSDSGGRPTPPWLEELGAPARWPLAREDLSQVCASWETPSPASSILGGEWSLSDPGECSGTPVLAVGGGGKRERFRISSHQQKMDSLFSRVSLFMFWRRHL

SEQ ID NO: 842823 - protein, 727 aa, Homo sapiens
MAFQKAVKGTILVGGGALATVLGLSQFAHYRRKQMNLAYVKAADCISEPVNREPPSREAQLLTLQNTSEFDILVIGGGATGSGCALDAVTRGLKTALVERDDFSSGTSSRSTKLIHGGVRYLQKAIMKLDIEQYRMVKEALHERANLLEIAPHLSAPLPIMLPVYKWWQLPYYWVGIKLYDLVAGSNCLKSSYVLSKSRALEHFPMLQKDKLVGAIVYYDGQHNDARMNLAIALTAARYGAATANYMEVVSLLKKTDPQTGKVHVSGARCKDVLTGQEFDVRAKCVINATGPFTDSVRKMDDKDAAAICQPSAGVHIVMPGYYSPESMGLLDPATSDGRVIFFLPWQKMTIAGTTDTPTDVTHHPIPSEEDINFILNEVRNYLSCDVEVRRGDVLAAWSGIRPLVTDPKSADTQSISRNHVVDISESGLITIAGGKWTTYRSMAEDTINAAVKTHNLKAGPSRTVGLFLQGGKDWSPTLYIRLVQDYGLESEVAQHLAATYGDKAFEVAKMASVTGKRWPIVGVRLVSEFPYIEAEVKYGIKEYACTAVDMISRRTRLAFLNVQAAEEALPRIVELMGRELNWDDYKKQEQLETARKFLYYEMGYKSRSEQLTDRSEISLLPSDIDRYKKRFHKFDADQKGFITIVDVQRVLESINVQMDENTLHEILNEVDLNKNGQVELNEFLQLMSAIQKGRVSGSRLAILMKTAEENLDRRVPIPVDRSCGGL

SEQ ID NO: 842824 - protein, 601 aa, Homo sapiens
MKLDIEQYRMVKEALHERANLLEIAPHLSAPLPIMLPVYKWWQLPYYWVGIKLYDLVAGSNCLKSSYVLSKSRALEHFPMLQKDKLVGAIVYYDGQHNDARMNLAIALTAARYGAATANYMEVVSLLKKTDPQTGKVHVSGARCKDVLTGQEFDVRAKCVINATGPFTDSVRKMDDKDAAAICQPSAGVHIVMPGYYSPESMGLLDPATSDGRVIFFLPWQKMTIAGTTDTPTDVTHHPIPSEEDINFILNEVRNYLSCDVEVRRGDVLAAWSGIRPLVTDPKSADTQSISRNHVVDISESGLITIAGGKWTTYRSMAEDTINAAVKTHNLKAGPSRTVGLFLQGGKDWSPTLYIRLVQDYGLESEVAQHLAATYGDKAFEVAKMASVTGKRWPIVGVRLVSEFPYIEAEVKYGIKEYACTAVDMISRRTRLAFLNVQAAEEALPRIVELMGRELNWDDYKKQEQLETARKFLYYEMGYKSRSEQLTDRSEISLLPSDIDRYKKRFHKFDADQKGFITIVDVQRVLESINVQMDENTLHEILNEVDLNKNGQVELNEFLQLMSAIQKGRVSGSRLAILMKTAEENLDRRVPIPVDRSCGGL

SEQ ID NO: 842825 - protein, 629 aa, Homo sapiens
MAFQKAVKGTILVGGGALATVLGLSQFAHYRRKQMNLAYVKAADCISEPVNREPPSREAQLLTLQNTSEFDILVIGGGATGSGCALDAVTRGLKTALVERDDFSSGTSSRSTKLIHGGVRYLQKAIMKLDIEQYRMVKEALHERANLLEIAPHLSAPLPIMLPVYKWWQLPYYWVGIKLYDLVAGSNCLKSSYVLSKSRALEHFPMLQKDKLVGAIVYYDGQHNDARMNLAIALTAARYGAATANYMEVVSLLKKTDPQTGKVHVSGARCKDVLTGQEFDVRAKCVINATGPFTDSVRKMDDKDAAAICQPSAGVHIVMPGYYSPESMGLLDPATSDGRVIFFLPWQKMTIAGTTDTPTDVTHHPIPSEEDINFILNEVRNYLSCDVEVRRGDVLAAWSGIRPLVTDPKSADTQSISRNHVVDISESGLITIAGGKWTTYRSMAEDTINAAVKTHNLKAGPSRTVGLFLQGGKDWSPTLYIRLVQDYGLESEVAQHLAATYGDKAFEVAKMASVTGKRWPIVGVRLVSEFPYIEAEVKYGIKEYACTAVDMISRRTRLAFLNVQAAEEALPRIVELMGRELNWDDYKKQEQLETARKFLYYEMGYKSRSEQLTDRSEISLLPSDIDRYL

SEQ ID NO: 842826 - protein, 732 aa, Homo sapiens
MAFQKAVKGTILVGGGALATVLGLSQFAHYRRKQMNLAYVKAADCISEPVNREPPSREAQLLTLQNTSEFDILVIGGGATGSGCALDAVTRGLKTALVERDDFSSGTSSRSTKLIHGGVRYLQKAIMKLDIEQYRMVKEALHERANLLEIAPHLSAPLPIMLPVYKWWQLPYYWVGIKLYDLVAGSNCLKSSYVLSKSRALEHFPMLQKDKLVGAIVYYDGQHNDARMNLAIALTAARYGAATANYMEVVSLLKKTDPQTGKVHVSGARCKDVLTGQEFDVRAKCVINATGPFTDSVRKMDDKDAAAICQPSAGVHIVMPGYYSPESMGLLDPATSDGRVIFFLPWQKMTIAGTTDTPTDVTHHPIPSEEDINFILNEVRNYLSCDVEVRRGDVLAAWSGIRPLVTDPKSADTQSISRNHVVDISESGLITIAGGKWTTYRSMAEDTINAAVKTHNLKAGPSRTVGLFLQGGKDWSPTLYIRLVQDYGLESEVAQHLAATYGDKAFEVAKMASVTGKRWPIVGVRLVSEFPYIEAEVKYGIKEYACTAVDMISRRTRLAFLNVQAAEEALPRIVELMGRELNWDDYKKQEQLETARKFLYYEMGYKSRSEQLTDRSEISLLPSDIDRYKKRFHKFDADQKGFITIVDVQRVLESINVQMDENTLHEILNEVDLNKNGQVELNEFLQLMSAIQKGRVSGSRLAILMLWRIVSLGSKSTANKHRNDKSPCNNQR

SEQ ID NO: 842827 - protein, 658 aa, Homo sapiens
MAFQKAVKGTILVGGGALATVLGLSQFAHYRRKQMNLAYVKAADCISEPVNREPPSREAQLLTLQNTSEFDILVIGGGATGSGCALDAVTRGLKTALVERDDFSSGTSSRSTKLIHGGVRYLQKAIMKLDIEQYRMVKEALHERANLLEIAPHLSAPLPIMLPVYKWWQLPYYWVGIKLYDLVAGSNCLKSSYVLSKSRALEHFPMLQKDKLVGAIVYYDGQHNDARMNLAIALTAARYGAATANYMEVVSLLKKTDPQTGKVHVSGARCKDVLTGQEFDVRAKCVINATGPFTDSVRKMDDKDAAAICQPSAGVHIVMPGYYSPESMGLLDPATSDGRVIFFLPWQKMTIAGTTDTPTDVTHHPIPSEEDINFILNEVRNYLSCDVEVRRGDVLAAWSGIRPLVTDPKSADTQSISRNHVVDISESGLITIAGGKWTTYRSMAEDTINAAVKTHNLKAGPSRTVGLFLQGGKDWSPTLYIRLVQDYGLESEVAQHLAATYGDKAFEVAKMASVTGKRWPIVGVRLVSEFPYIEAEVKYGIKEYACTAVDMISRRTRLAFLNVQAAEEALPRIVELMGRELNWDDYKKQEQLETARKFLYYEMGYKSRSEQLTDRSEISLLPSDIDRYKKRFHKFDADQKGFITIVDVQRVLEVIFFG

SEQ ID NO: 842828 - protein, 727 aa, Homo sapiens; identical to SEQ ID NO: 842823

SEQ ID NO: 842829 - protein, 727 aa, Homo sapiens; identical to SEQ ID NO: 842823

SEQ ID NO: 842830 - protein, 709 aa, Homo sapiens
MAFQKAVKGTILVGGGALATVLGLSQFAHYRRKQMNLAYVKAADCISEPVNREPPSREAQLLTLQNTSEFDILVIGGGATGSGCALDAVTRGLKTALVERDDFSSGTSSRSTKLIHGGVRYLQKAIMKLDIEQYRMVKEALHERANLLEIAPHLSAPLPIMLPVYKWWQLPYYWVGIKLYDLVAGSNCLKSSYVLSKSRALEHFPMLQKDKLVGAIVYYDGQHNDARMNLAIALTAARYGAATANYMEVVSLLKKTDPQTGKVHVSGARCKDVLTGQEFDVRAKCVINATGPFTDSVRKMDDKDAAAICQPSAGVHIVMPGYYSPESMGLLDPATSDGRVIFFLPWPIPSEEDINFILNEVRNYLSCDVEVRRGDVLAAWSGIRPLVTDPKSADTQSISRNHVVDISESGLITIAGGKWTTYRSMAEDTINAAVKTHNLKAGPSRTVGLFLQGGKDWSPTLYIRLVQDYGLESEVAQHLAATYGDKAFEVAKMASVTGKRWPIVGVRLVSEFPYIEAEVKYGIKEYACTAVDMISRRTRLAFLNVQAAEEALPRIVELMGRELNWDDYKKQEQLETARKFLYYEMGYKSRSEQLTDRSEISLLPSDIDRYKKRFHKFDADQKGFITIVDVQRVLESINVQMDENTLHEILNEVDLNKNGQVELNEFLQLMSAIQKGRVSGSRLAILMKTAEENLDRRVPIPVDRSCGGL

SEQ ID NO: 842831 - protein, 755 aa, Homo sapiens
MSGTNLDGNDEFDEQLRMQELYGDGKDGDTQTDAGGEPDSLGQQPTDTPYEWDLDKKAWFPKITEDFIATYQANYGFSNDGASSSTANVEDVHARTAEEPPQEKAPEPTDARKKGEKRKAESGWFHVEEDRNTNVYVSGLPPDITVDEFIQLMSKFGIIMRDPQTEEFKVKLYKDNQGNLKGDGLCCYLKRESVELALKLLDEDEIRGYKLHVEVAKFQLKGEYDASKKKKKCKDYKKKLSMQQKQLDWRPERRAGPSRMRHERVVIIKNMFHPMDFEDDPLVLNEIREDLRVECSKFGQIRKLLLFDRHPDGVASVSFRDPEEADYCIQTLDGRWFGGRQITAQAWDGTTDYQVEETSREREERLRGWEAFLNAPEANRGLRRSDSVSASERAGPSRARHFSEHPSTSKMNAQETATGMAFEEPIDEKKFEKTEDGGEFEEGASENNAKESSPEKEAEEGCPEKESEEGCPKRGFEGSCSQKESEEGNPVRGSEEDSPKKESKKKTLKNDCEENGLAKESEDDLNKESEEEVGPTKESEEDDSEKESDEDCSEKQSEDGSEREFEENGLEKDLDEEGSEKELHENVLDKELEENDSENSEFEDDGSEKVLDEEGSEREFDEDSDEKEEEEDTYEKVFDDESDEKEDEEYADEKGLEAADKKAEEGDADEKLFEESDDKEDEDADGKEVEDADEKLFEDDDSNEKLFDEEEDSSEKLFDDSDERGTLGGFGSVEEGPLSTGSSFILSSDDDDDDI

SEQ ID NO: 842832 - protein, 755 aa, Homo sapiens; identical to SEQ ID NO: 842831

SEQ ID NO: 842833 - protein, 755 aa, Homo sapiens; identical to SEQ ID NO: 842831

SEQ ID NO: 842834 - protein, 755 aa, Homo sapiens; identical to SEQ ID NO: 842831

SEQ ID NO: 842835 - protein, 755 aa, Homo sapiens; identical to SEQ ID NO: 842831

SEQ ID NO: 842836 - protein, 755 aa, Homo sapiens; identical to SEQ ID NO: 842831

SEQ ID NO: 842837 - protein, 258 aa, Homo sapiens
MSGTNLDGNDEFDEQLRMQELYGDGKDGDTQTDAGGEPDSLGQQPTDTPYEWDLDKKAWFPKITEDFIATYQANYGFSNDGASSSTANVEDVHARTAEEPPQEKAPEPTDARKKGEKRKAESGWFHVEEDRNTNVYVSGLPPDITVDEFIQLMSKFGIIMRDPQTEEFKVKLYKDNQGNLKGDGLCCYLKRESVELALKLLDEDEIRGYKLHVEVAKFQLKGEYDASKKKKKCKDYKKKLSMQQKFVIFFPFERFHIF

SEQ ID NO: 842838 - protein, 755 aa, Homo sapiens; identical to SEQ ID NO: 842831

SEQ ID NO: 842839 - protein, 744 aa, Homo sapiens
MSGTNLDGNDEFDEQLRMQELYGDGKDGDTQTDAGGEPDSLGQQPTDTPYEWDLDKKAWFPKITEDFIATYQANYGFSNDGASSSTANVEDVHARTAEEPPQEKAPEPTDARKKGEKRKAESGWFHVEEDRNTNVYVSGLPPDITVDEFIQLMSKFGIIMRDPQTEEFKVKLYKDNQGNLKGDGLCCYLKRESVELALKLLDEDEIRGYKLHVEVAKFQLKGEYDASKKKKKCKDYKKKLSMQQKQLDWRPERRAGPSRMRHERVVIIKNMFHPMDFEDDPLVLNEIREDLRVECSKFGQIRKLLLFDRHPDGVASVSFRDPEEADYCIQTLDGRWFGGRQITAQAWDGTTDYQVEETSREREERLRGWEAFLNAPEANRGLRRSDSVSASERAGPSRARHFSEHPSTSKMNAQETATGMAFEEPIDEKKFEKTEDGGEFEEGASENNAKESSPEKEAEEGCPEKESEEGCPKRGFEGSCSQKESEEGNPVRGSEEDSPKKESKKKTLKNDCEENGLAKESEDDLNKESEEEVGPTKESEEDDSEKESDEDCSEKQSEDGSEREFEENGLEKDLDEEGSEKELHENVLDKELEENDSENSEFEDDGSEKVLDEEGSEREFDEDSDEKEEEEDTYEKVFDDESDEKEDEEYADEKGLEAADKKAEEGDADEKLFEESDDKEDEDADGKEVEDADEKLFEEEDSSEKLFDDSDERGTLGGFGSVEEGPLSTGSSFILSSDDDDDDI

SEQ ID NO: 842840 - protein, 496 aa, Homo sapiens [sequence omitted]

SEQ ID NO: 842841 - protein, 88 aa, Homo sapiens
SLEDPHTLSDDKEDEDADGKEVEDADEKLFEDDDSNEKLFDEEEDSSEKLFDDSDERGTLGGFGSVEEGPLSTGSSFILSSDDDDDDI

SEQ ID NO: 842842 - protein, 90 aa, Homo sapiens
METWRKGSFRNASFFKQLSLGRPRRLRRQSSVLSQASTAGGDHEEYSNREVIRELQGRPDGRRLPLWGDEQPRAPLLAPPKPPRLYRESS

SEQ ID NO: 842843 - protein, 802 aa, Homo sapiens
DDTLNKKTSPGVKSCESSVCGEVFVGHSSLNRHIRADTAHKPSEYQEYGQEPYKCQQRKKAFRCHPSFQMQEKAHTGEKLYDCKECGKTFISHSSIQRHMIMHNGDGTYKCKFCGKACPCLSIYLIHERVHTGEKPYKCKQCGKAFSYSTSLQIHERTHTGEKPYECKECGKAFGSPNSLYEHRRTHTGEKPYECKQCGKAFRWFHSFQIHERTHSEEKAYECTKCGKAFKCPSYLCRHEVTHSGKKPCECKQCGKALSYLNFQRHMKMHTRMRPYKCKTVEKPLILPVRFEDMKELTLERNLMNASTVVKPSIVPVPFTIMKGLTLERNPMNVSSVVKPSFLPLPFDIMKGLTLERNRMSVSNVGKPSDLPHTFKCMEGLTLKRNPMNVSSVVKPSFFPLPFDIMKGLTLERNPMSVSNVGKPSHLPHTFKCMKGLTLESNCMNLNNVKKPLDLSETFKFMKRHTLERNPIRNMEKHSTISLPFKYMQQCTEDRMPMNVKSVTKHSYLPRSFEYMQEHTLERNPMNVRNAEKRSIIFLLCVYTKGCTLERNHINVRIVGKHSVCLVPFVDIKGLTLELKPYECKECGKAFTSSGSFQCHKRIHTGEKPYECKQCGKAFISSTAIRRHERTHTGEKPYECKQCGKAFISFSSIQYHERTHTGEKQYECKQCGKAFMSSTAFQYHEKTHTREKHYECKQCGKAFISSGSLRYHERTHTGEKPYECKQCGKAFRSATQLQMHRKIHTGEKPYECKQCGKAYRSVSQLLVHERTHTVEQPYEYKQYGKAFRFAKNLQIQTMNVNN

SEQ ID NO: 842844 - protein, 31 aa, Homo sapiens
MSAGKGETLTTSSSRNSKEGKEGYLQLRGNT

SEQ ID NO: 842845 - protein, 235 aa, Homo sapiens
LRPLDILAEVVPSDGATSGIRIVQVHGARGLQLSVAAPRTMSFPASRIFSQCDLFPEEFSIVVTLRVPNLPPKRNEYLLTVVAEESDLLLLGLRLSPAQLHFLFLREDTAGAWQTRVSFRSPALVDGRWHTLVLAVSAGVFSLTTDCGLPVDIMADVPFPATLSVKGARFFVGSRRRAKGLFMGLVRQLVLLPGSDATPRLCPSRNAPLAVLSIPRVLQALTGKPEDNEVLKYPY

SEQ ID NO: 842846 - protein, 130 aa, Homo sapiens
SPTSFSHNCVARVAGPMAPNYPQILIPASLLGPPWLPLGQLTLKVQLGSELLQEAFPSPALLGDLFLLHTYLSHFCGRLFFILRLQLRHPSPARPQQLLQSFPRSLLLSLPAPSVTWSTSLSQQLVSSTT

SEQ ID NO: 842847 - protein, 111 aa, Homo sapiens [sequence omitted]

SEQ ID NO: 842848 - protein, 164 aa, Homo sapiens
EQCPFHGWAHSWHQLSWSNGNPIYCTRDTFCGDSEMQRDQITSRKGRAWCEGTRLTDIPDDQPVGPSGSLPPASHSGEGPVIEAVGIPEERTQQKQVEGVGQRADLPPATLSYCSSRGNNLGGCHEGFSGAPCPWGLMEGGNCVNVVWWKKQAWSAHRLGVPRI

SEQ ID NO: 842849 - protein, 175 aa, Homo sapiens
MGKVLSKIFGNKEMRILMLGLDAAGKTTILYKLKLGQSVTTIPTVGFNVETVTYKNVKFNVWDVGGQDKIRPLWRHYYTGTQGLIFVVDCADRDRIDEARQELHRIINDREMRDAIILIFANKQDLPDAMKPHEIQEKLGLTRIRDRNWYVQPSCATSGDGLYEGLTWLTSNYKS

SEQ ID NO: 842850 - protein, 175 aa, Homo sapiens; identical to SEQ ID NO: 842849

SEQ ID NO: 842851 - protein, 175 aa, Homo sapiens; identical to SEQ ID NO: 842849

SEQ ID NO: 842852 - protein, 175 aa, Homo sapiens; identical to SEQ ID NO: 842849

SEQ ID NO: 842853 - protein, 175 aa, Homo sapiens; identical to SEQ ID NO: 842849

SEQ ID NO: 842854 - protein, 175 aa, Homo sapiens; identical to SEQ ID NO: 842849

SEQ ID NO: 842855 - protein, 175 aa, Homo sapiens; identical to SEQ ID NO: 842849

SEQ ID NO: 842856 - protein, 175 aa, Homo sapiens; identical to SEQ ID NO: 842849

SEQ ID NO: 842857 - protein, 175 aa, Homo sapiens; identical to SEQ ID NO: 842849

SEQ ID NO: 842858 - protein, 175 aa, Homo sapiens; identical to SEQ ID NO: 842849

SEQ ID NO: 842859 - protein, 153 aa, Homo sapiens
KSFFLFFILWKTKAEKLKPQTPEKILKNMFFLKKYCMSLLLSLPPNSPSCVLSFLSALSPPHIHALLREGNLSLGPRIPLASKNPFPSSRFLHSQEQVSPRNHLPSLRMCASAQPPTLTFLPQTPHPPILLGQRALFPRSPGAPASWPPRLRG

SEQ ID NO: 842860 - protein, 133 aa, Homo sapiens
MSEAENEFINWVATAAIEANCSQCWLCVELPEAAGNGLPWRIVPANISEWICQYQWEWDNTWFCFDFLSQSVSLSPRLECSGTILAQCNLCLLGSSDSPASASQVAGIIGACRHAWLIFCIFSRDGVSPYCPG

SEQ ID NO: 842861 - protein, 290 aa, Homo sapiens
MRDQPVPRLSVPAALALGSAALGAAFATGLFLGRRCPPWRGRREQCLLPPEDSRLWQYLLSRSMREHPALRSLRLLTLEQPQGDSMMTCEQAQLLANLARLIQAKKALDLGTFTGYSALALALALPADGRVVTCEVDAQPPELGRPLWRQAEAEHKIDLRLKPALETLDELLAAGEAGTFDVAVVDADKENCSAYYERCLQLLRPGGILAVLRLLVTSCRALPSGGPAPARNYLRKPAFVWNSFQDPEDYQTEHNTIHNEPGLDRQLQQNPADQASTTPTTEGRYTRSSH

SEQ ID NO: 842862 - protein, 275 aa, Homo sapiens
VTCHCLPPPPARAMTQPVPRLSVPAALALGSAALGAAFATGLFLGRRCPPWRGRREQCLLPPEDSRLWQYLLSRSMREHPALRSLRLLTLEQPQGDSMMTCEQAQLLANLARLIQAKKALDLGTFTGYSALALALALPADGRVVTCEVDAQPPELGRPLWRQAEAEHKIDLRLKPALETLDELLAAGEAGTFDVAVVDADKENCSAYYERCLQLLRPGGILAVLRVLWRGKVLQPPKGDVAAECVRNLNERIRRDVRVYISLLPLGDGLTLAFKI

SEQ ID NO: 842863 - protein, 304 aa, Homo sapiens
VTCHCLPPPPARAMTQPVPRLSVPAALALGSAALGAAFATGLFLGRRCPPWRGRREQCLLPPEDSRLWQYLLSRSMREHPALRSLRLLTLEQPQGDSMMTCEQAQLLANLARLIQAKKALDLGRGTRPGSRRAEVSGPTPTLGWPVCVLVPGTFTGYSALALALALPADGRVVTCEVDAQPPELGRPLWRQAEAEHKIDLRLKPALETLDELLAAGEAGTFDVAVVDADKENCSAYYERCLQLLRPGGILAVLRVLWRGKVLQPPKGDVAAECVRNLNERIRRDVRVYISLLPLGDGLTLAFKI

SEQ ID NO: 842864 - protein, 115 aa, Homo sapiens
MGPQGRGGRGLSAPALPPPEDELLAAGEAGTFDVAVVDADKENCSAYYERCLQLLRPGGILAVLRVLWRGKVLQPPKGDVAAECVRNLNERIRRDVRVYISLLPLGDGLTLAFKI

SEQ ID NO: 842865 - protein, 275 aa, Homo sapiens; identical to SEQ ID NO: 842862

SEQ ID NO: 842866 - protein, 178 aa, Homo sapiens [sequence omitted]

SEQ ID NO: 842867 - protein, 367 aa, Homo sapiens
MRDQPVPRLSVPAALALGSAALGAAFATGLFLGRRCPPWRGRREQCLLPPEDSRLWQYLLSRSMREHPALRSLRLVSRARDGNGRPSRPLRVPRGCVTLGWALALPGLPASLGRVRWALPKGQSPRPRPEPRPWGLGPPGRRWVTCMAGATLSFHAADPGAAAGGFYDDLRAGPALGQPGAAHPGQEGAGPGHLHGLLRPGPGPGAARGRARGDLRGGRAAPGAGTAPVEAGERPRLALQPQAGAQRLTRSLPQAEAEHKIDLRLKPALETLDELLAAGEAGTFDVAVVDADKENCSAYYERCLQLLRPGGILAVLRVLWRGKVLQPPKGDVAAECVRNLNERIRRDVRVYISLLPLGDGLTLAFKI

SEQ ID NO: 842868 - protein, 97 aa, Homo sapiens
PKPRLPRPGWPRPPAGPVAREGAATSERGRGGRVCAKPKRTHPAGRQGLHQPPAPGRWTHLGLQDLGLAPSEWARGRVAWEPQELTLSFKFENKVGL

SEQ ID NO: 842869 - protein, 46 aa, Homo sapiens
MSGHGSWGHRRLLPIPSRRELLHSERVTPLTLWRSHTCNSKPPSQN

SEQ ID NO: 842870 - protein, 546 aa, Homo sapiens
RSAASPAEPRLDRGPRPGGHCCHRRRHLVSSPSPPSPRSPRLTRARGRGHSPPPLPARMPKVKALQCALALEISSVTCPGVVLKDKEDIYLSICVFGQYKKTQCVPATFPLVFNARMVFEKVFPDAVDPGDVVTQLEYDTAVFELIQLVPPVGETLSTYDENTRDFMFPGPNQMSGHHDSNRQVTMRRISGLRGNAPRLEFSTTSVITECLISSRKCHTQDKFIYHLAPVEKSHGRLQNRTSRSQKKKSKSPERSKYCINAKNYEQPTISSKSHSPSPYTKRRMCELSEDTRRRLAHLNLGPYEFKKETDKPPFVIRHVDPPSPRADTLLGSSGRDCERDGWSRVHNDHSHLGCCRPKDYKVIRTPHGRDFDDSLEKCEEYLSPRSCSKPRHSARTLLVHSAPSTMPKHSPSPVLNRASLRERFHSDWCSPSNCDEIHDRVKNVLKSHQAHQRHLYDERDLEKDDELELKRSLLCRDSAYDSDPEYSSCQQPRGTFHLDDGEYWSNRAASYKGKSHRPIFENSMDKMYRNLYKKACSSASHTQESF

SEQ ID NO: 842871 - protein, 529 aa, Homo sapiens
RSAASPAEPRLDRGPRPGGHCCHRRRHLVSSPSPPSPRSPRLTRARGRGHSPPPLPARMPSEGGCEYICDCKKGIICVFGQYKKTQCVPATFPLVFNARMVFEKVFPDAVDPGDVVTQLEYDTAVFELIQLVPPVGETLSTYDENTRDFMFPGPNQMSGHHDSNRQVTMRRISGLRGNAPRLEFSTTSVITECLISSRKCHTQDKFIYHLAPVEKSHGRLQNRTSRSQKKKSKSPERSKYCINAKNYEQPTISSKSHSPSPYTKRRMCELSEDTRRRLAHLNLGPYEFKKETDKPPFVIRHVDPPSPRADTLLGSSGRDCERDGWSRVHNDHSHLGCCRPKDYKVIRTPHGRDFDDSLEKCEEYLSPRSCSKPRHSARTLLVHSAPSTMPKHSPSPVLNRASLRERFHSDWCSPSNCDEIHDRVKNVLKSHQAHQRHLYDERDLEKDDELELKRSLLCRDSAYDSDPEYSSCQQPRGTFHLDDGEYWSNRAASYKGKSHRPIFENSMDKMYRNLYKKACSSASHTQESF

SEQ ID NO: 842872 - protein, 530 aa, Homo sapiens
RSAASPAEPRLDRGPRPGGHCCHRRRHLVSSPSPPSPRSPRLTRARGRGHSPPPLPARMPKVKALQCALALEISSVTCPGVVLKDKEDIYLSICVFGQYKKTQCVPATFPLVFNARMVFEKVFPDAVDPGDVVTQLEYDTAVFELIQLVPPVGETLSTYDENTRDFMFPGPNQMSGHHDSNRQVTMRRISGLRGNAPRLEFSTTSVITECLISSRKCHTQDKFIYHLAPVEKSHGRLQNRTSRSQKKKSKSPERSKYCINAKNYEQPTISSKSHSPSPYTKRRMCELSEDTRRRLAHLNLGPYEFKKETDKPPFVIRHVDPPSPRADTLLGSSGRDCERDGWSRVHNDHSHLGCCRPKDYKVIRTPHGRDFDDSLEKCEEYLSPRSCSKPRHSARTLLVHSAPSTMPKHSPSPVLNRASLRERFHSDWCSPSNCDEIHDRDERDLEKDDELELKRSLLCRDSAYDSDPEYSSCQQPRGTFHLDDGEYWSNRAASYKGKSHRPIFENSMDKMYRNLYKKACSSASHTQESF

SEQ ID NO: 842873 - protein, 312 aa, Homo sapiens
RSAASPAEPRLDRGPRPGGHCCHRRRHLVSSPSPPSPRSPRLTRARGRGHSPPPLPARMPKVKALQCALALEISSVTCPGVVLKDKEDIYLSICVFGQYKKTQCVPATFPLVFNARMVFEKVFPDAVDPGDVVTQLEYDTAVFELIQLVPPVGETLSTYDENTRDFMFPGPNQMSGHHDSNRQVTMRRISGLRGNAPRLEFSTTSVITECLISSRKCHTQDKFIYHLAPVEKSHGRLQNRTSRSQKKKSKSPERSKYCINAKNYEQPLIRENPTDPSLRTAWTRCTGTYTKRPVVLLHIHRKASETIHDKPH

SEQ ID NO: 842874 - protein, 494 aa, Homo sapiens
RSAASPAEPRLDRGPRPGGHCCHRRRHLVSSPSPPSPRSPRLTRARGRGHSPPPLPARMPKVKALQCALALEISSVTCPGVVLKDKEDIYLSICVFGQYKKTQCVPATFPLVFNARMVFEKVFPDAVDPGDVVTQLEYDTAVFELIQLVPPVGETLSTYDENTRDFMFPGPNQMSGHHDSNRQVTMRRISGLRGNAPRLEFSTTSVITECLISSRKCHTQDKFIYHLAPVEKSHGRLQNRTSRSQKKKSKSPERSKYCINAKNYEQPTISSKSHSPSPYTKRRMCELSEDTRRRLAHLNLGPYEFKKETDKPPFVIRHVDPPSPRADTLLGSSGRDCERDGWSRVHNDHSHLGCCRPKDYKVIRTPHGRDFDDSLEKCEEYLSPRSCSKPRHSARTLLVHSAPSTMPKHSPSPVLNRASLRERFHSDWCSPSNCDEIHDRVKNVLKSHQAHQRHLYDERDLEKDDELELKRSLLCRDSAYDSDPEYRNAPYVLI

SEQ ID NO: 842875 - protein, 311 aa, Homo sapiens
  misc_feature (123)..(123): Xaa can be any naturally occurring amino acid
  misc_feature (125)..(125): Xaa can be any naturally occurring amino acid
  misc_feature (128)..(128): Xaa can be any naturally occurring amino acid
  misc_feature (131)..(131): Xaa can be any naturally occurring amino acid
RSAASPAEPRLDRGPRPGGHCCHRRRHLVSSPSPPSPRSPRLTRARGRGHSPPPLPARMPKVKALQCALALEISSVTCPGVVLKDKEDIYLSICVFGQYKKTQCVPATFPLVFNARMVFEKKXTXVFXLIXQVPPMGETLSTYDENTRDFMFPGPNQMSGHHDSNRQVTMRRISGLRGNAPRLEFSTTSVITECLISSRKCHTQDKFIYHLAPVEKSHGRLQNRTSRSQKKKSKSPERSKYCINAKNYEQPTISSKSHSPSPYTKRRMCELSEDTRRRLAHLNLGPYEFKKETDKPPFVIRHVCVLLSISI

SEQ ID NO: 842876 - protein, 263 aa, Homo sapiens
MCELSEDTRRRLAHLNLGPYEFKKETDKPPFVIRHVDPPSPRADTLLGSSGRDCERDGWSRVHNDHSHLGCCRPKDYKVIRTPHGRDFDDSLEKCEEYLSPRSCSKPRHSARTLLVHSAPSTMPKHSPSPVLNRASLRERFHSDWCSPSNCDEIHDRVKNVLKSHQAHQRHLYDERDLEKDDELELKRSLLCRDSAYDSDPEYSSCQQPRGTFHLDDGEYWSNRAASYKGKSHRPIFENSMDKMYRNLYKKACSSASHTQESF

SEQ ID NO: 842877 - protein, 337 aa, Homo sapiens
IIEQGGEGPEAYHELQKKERWSNLMQLDKFIYHLAPVEKSHGRLQNRTSRSQKKKSKSPERSKYCINAKNYEQPTISSKSHSPSPYTKRRMCELSEDTRRRLAHLNLGPYEFKKETDKPPFVIRHVDPPSPRADTLLGSSGRDCERDGWSRVHNDHSHLGCCRPKDYKVIRTPHGRDFDDSLEKCEEYLSPRSCSKPRHSARTLLVHSAPSTMPKHSPSPVLNRASLRERFHSDWCSPSNCDEIHDRDERDLEKDDELELKRSLLCRDSAYDSDPEYSSCQQPRGTFHLDDGEYWSNRAASYKGKSHRPIFENSMDKMYRNLYKKACSSASHTQESF

SEQ ID NO: 842878 - protein, 459 aa, Homo sapiens
RSAASPAEPRLDRGPRPGGHCCHRRRHLVSSPSPPSPRSPRLTRARGRGHSPPPLPARMPKVKALQCALALEISSVTCPGVVLKDKEDIYLSICVFGQYKKTQCVPATFPLVFNARMVFEKVFPDAVDPGDVVTQLEYDTAVFELIQLVPPVGETLSTYDENTRDFMFPGPNQMSGHHDSNRQVTMRRISGLRGNAPRLEFSTTSVITECLISSRKCHTQDKFIYHLAPVEKSHGRLQNRTSRSQKKKSKSPERSKYCINAKNYEQPTISSKSHSPSPYTKRRMCELSEDTRRRLAHLNLGPYEFKKETDKPPFVIRHVDPPSPRADTLLGSSGRDCERDGWSRVHNDHSHLGCCRPKDYKVIRTPHGRDFDDSLEKCEEYLSPRSCSKPRHSARTLLVHSAPSTMPKHSPSPVLNRASLRERFHSDWCSPSNCDEIHDRVKNVLKSHQAHQRHLYVSF

SEQ ID NO: 842879 - protein, 132 aa, Homo sapiens
GKDTAFTRSLGPTHDHHYIRTDISEHYWLNGAKFIGTFFIPDTYNPDDDKIYFFFRESSQEGSTSDKTILSRVGRVCKNDVGGQRSLINKWTTFLKARLICSIPGSDGADTYFDELRKFLLSFFLGKALLPN

SEQ ID NO: 842880 - protein, 269 aa, Homo sapiens
GKDTAFTRSLGPTHDHHYIRTDISEHYWLNGAKFIGTFFIPDTYNPDDDKIYFFFRESSQEGSTSDKTILSRVGRVCKNDVGGQRSLINKWTTFLKARLICSIPGSDGADTYFDELQDIYLLPTRDERNPVVYGVFTTTSSIFKGSAVCVYSMADIRAVFNGPYAHKESADHRWVQYDGRIPYPRPGTCPSKTYDPLIKSTRDFPDDVISFIKRHSVMYKSVYPVAGGPTFKRINVDYRLTQIVVDHVIAEDGQYDVMFLGTGKLKLDQ

SEQ ID NO: 842881 - protein, 241 aa, Homo sapiens
GKDTAFTRSLGPTHDHHYIRTDISEHYWLNGAKFIGTFFIPDTYNPDDDKIYFFFRESSQEGSTSDKTILSRVGRVCKNDVGGQRSLINKWTTFLKARLICSIPGSDGADTYFDELQDIYLLPTRDERNPVVYGVFTTTSSIFKGSAVCVYSMADIRAVFNGPYAHKESADHRWVQYDGRIPYPRPGTTPFSYKAQEACPVCAPGLQGPSLRWSHLQGPRTSWSRCSHHQFAKGPIKCSTT

SEQ ID NO: 842882 - protein, 132 aa, Homo sapiens; identical to SEQ ID NO: 842879

SEQ ID NO: 842883 - protein, 281 aa, Homo sapiens
MAAPALGLVCGRCPELGLVLLLLLLSLLCGAAGSQEAGTGAGAGSLAGSCGCGTPQRPGAHGNSAAAHRYSREANAPGPVPGERQLAHSKMVPIPAGVFTMGTDDPQIKQDGEAPARRVTIDAFYMDAYEVSNTEFEKFVNSTGYLTEAEKFGDSFVFEGMLSEQVKTNIQQAVAAAPWWLPVKGANWRHPEGPDSTILHRPDHPVLHVSWNDAVAYCTWAGKRLPTEAEWEYSCRGGLHNRLFPWGNKLQPKGQHYANIWQGEFPVTNTGEDGFQGTAPV

SEQ ID NO: 842884 - protein, 256 aa, Homo sapiens
MAAPALGLVCGRCPELGLVLLLLLLSLLCGAAGSQEAGTGAGAGSLAGSCGCGTPQRPGAHGNSAAAHRYSREANAPGPVPGERQLAHSKMVPIPAGVFTMGTDDPQIKQDGEAPARRVTIDAFYMDAYEVSNTEFEKFVNSTGYLTEVAAAPWWLPVKGANWRHPEGPDSTILHRPDHPVLHVSWNDAVAYCTWAGKRLPTEAEWEYSCRGGLHNRLFPWGNKLQPKGQHYANIWQGEFPVTNTGEDGFQGTAPV

SEQ ID NO: 842885 - protein, 131 aa, Homo sapiens
MLLDLTSTASILMDQLISCLMSPWVLAPWQQWLYLKISLGQTWRRRKPKNLVSEAIAAGIFNDLGSGSNIDLCVISKNKLDFLRPYTVPNKKGTRLGRYRCEKGTTAVLTEKITPLEIEVLEETVQTMDTS

SEQ ID NO: 842886 - protein, 135 aa, Homo sapiens
RTRNCFLGKMAAVSVYAPPVGGFSFDNCRRNAVLEADFAKRGYKLPKVRKTGTTIAGVVYKDGIVLGADTRATEGMVVADKNCSKIHFISPNIYCCGAGTAADTDMTTQLISSNLGAPLPLHWPSSQSCDSQVGC

SEQ ID NO: 842887 - protein, 135 aa, Homo sapiens; identical to SEQ ID NO: 842886

SEQ ID NO: 842888 - protein, 131 aa, Homo sapiens; identical to SEQ ID NO: 842885

SEQ ID NO: 842889 - protein, 117 aa, Homo sapiens
RTRNCFLGKMAAVSVYAPPVGGFSFDNCRRNAVLEADFAKRGYKLPKVRKTGTTIAGVVYKDGIVLGADTRATEGMVVADKNSADTDMTTQLISSNLGAPLPLHWPSSQSCDSQVGC

SEQ ID NO: 842890 - protein, 135 aa, Homo sapiens; identical to SEQ ID NO: 842886

SEQ ID NO: 842891 - protein, 131 aa, Homo sapiens; identical to SEQ ID NO: 842885

SEQ ID NO: 842892 - protein, 77 aa, Homo sapiens
ASSAWMRGDLQLLVPQGPDKVVPRHCKGCQWSSPGPESPVRTPGGSAQALPVGFLLLHGPPLCVFFPNLKKPLFILK

SEQ ID NO: 842893 - protein, 77 aa, Homo sapiens; identical to SEQ ID NO: 842892

SEQ ID NO: 842894 - protein, 77 aa, Homo sapiens; identical to SEQ ID NO: 842892

SEQ ID NO: 842895 - protein, 219 aa, Homo sapiens
RTRNCFLGKMAAVSVYAPPVGGFSFDNCRRNAVLEADFAKRGYKLPKVRKTGTTIAGVVYKDGIVLGADTRATEGMVVADKNCSKIHFISPNIYCCGAGTAADTDMTTQLISVLAPWQQWLYLKISLGQTWRRRKPKNLVSEAIAAGIFNDLGSGSNIDLCVISKNKLDFLRPYTVPNKKGTRLGRYRCEKGTTAVLTEKITPLEIEVLEETVQTMDTS

SEQ ID NO: 842896 - protein, 77 aa, Homo sapiens; identical to SEQ ID NO: 842892

SEQ ID NO: 842897 - protein, 135 aa, Homo sapiens; identical to SEQ ID NO: 842886

SEQ ID NO: 842898 - protein, 116 aa, Homo sapiens
TEKCTFFLQVLAPWQQWLYLKISLGQTWRRRKPKNLVSEAIAAGIFNDLGSGSNIDLCVISKNKLDFLRPYTVPNKKGTRLGRYRCEKGTTAVLTEKITPLEIEVLEETVQTMDTS

SEQ ID NO: 842899 - protein, 135 aa, Homo sapiens; identical to SEQ ID NO: 842886

SEQ ID NO: 842900 - protein, 135 aa, Homo sapiens; identical to SEQ ID NO: 842886

SEQ ID NO: 842901 - protein, 135 aa, Homo sapiens; identical to SEQ ID NO: 842886

SEQ ID NO: 842902 - protein, 131 aa, Homo sapiens; identical to SEQ ID NO: 842885

SEQ ID NO: 842903 - protein, 160 aa, Homo sapiens
MLLDLTSTASILMDQLISCLMSPWVLAPWQQWLYLKISLGQTWRRRKPKNLVSEAIAAGIFNDLGSGSNIDLCVISKNKLDFLRPYTVPNKKGTRVSEGDEVLPGSPGVVATLGISMASGWSFPGSFHIKYIQCSQINLPHRPSACYLLYDSGLLSGVGK

SEQ ID NO: 842904 - protein, 131 aa, Homo sapiens; identical to SEQ ID NO: 842885

SEQ ID NO: 842905 - protein, 77 aa, Homo sapiens; identical to SEQ ID NO: 842892

SEQ ID NO: 842906 - protein, 135 aa, Homo sapiens; identical to SEQ ID NO: 842886

SEQ ID NO: 842907 - protein, 135 aa, Homo sapiens; identical to SEQ ID NO: 842886

SEQ ID NO: 842908 - protein, 77 aa, Homo sapiens; identical to SEQ ID NO: 842892

SEQ ID NO: 842909 - protein, 208 aa, Homo sapiens
MALLRRPTVSSDLENIDTGVNSKVKSHVTIRRTVLEEIGNRVTTRAAQVAKKAQNTKVPVQPTKTTNVNKQLKPTASVKPVQMEKLAPKGPSPTPEDVSMKEENLCQAFSDALLCKIEDIDNEDWENPQLCSDYVKDIYQYLRQLEVLQSINPHFLDGRDINGRMRAILVDWLVQVHSKFRLLQETLYMCVGIMDRFLQVGVASGTSR

SEQ ID NO: 842910 - protein, 398 aa, Homo sapiens
MALLRRPTVSSDLENIDTGVNSKVKSHVTIRRTVLEEIGNRVTTRAAQVAKKAQNTKVPVQPTKTTNVNKQLKPTASVKPVQMEKLAPKGPSPTPEDVSMKEENLCQAFSDALLCKIEDIDNEDWENPQLCSDYVKDIYQYLRQLEVLQSINPHFLDGRDINGRMRAILVDWLVQVHSKFRLLQETLYMCVGIMDRFLQVQPVSRKKLQLVGITALLLASKYEEMFSPNIEDFVYITDNAYTSSQIREMETLILKELKFELGRPLPLHFLRRASKAGEVDVEQHTLAKYLMELTLIDYDMVHYHPSKVAAAASCLSQKVLGQGKWNLKQQYYTGYTENEVLEVMQHMAKNVVKVNENLTKFIAIKNKYASSKLLKISMIPQLNSKAVKDLASPLIGRS

SEQ ID NO: 842911 - protein, 398 aa, Homo sapiens; identical to SEQ ID NO: 842910

SEQ ID NO: 842912 - protein, 398 aa, Homo sapiens; identical to SEQ ID NO: 842910

SEQ ID NO: 842913 - protein, 189 aa, Homo sapiens
MALLRRPTVSSDLENIDTGVNSKVKSHVTIRRTVLEEIGNRVTTRAAQVAKKAQNTKVPVQPTKTTNVNKQLKPTASVKPVQMEKLAPKGPSPTPEDVSMKEENLCQAFSDALLCYVKDIYQYLRQLEVLQSINPHFLDGRDINGRMRAILVDWLVQVHSKFRLLQETLYMCVGIMDRFLQGHHFRRTP

SEQ ID NO: 842914 - protein, 398 aa, Homo sapiens; identical to SEQ ID NO: 842910

SEQ ID NO: 842915 - protein, 374 aa, Homo sapiens
MALLRRPTVSSDLENIDTGVNSKVKSHVTIRRTVLEEIGNRVTTRAAQVAKKAQNTKVPVQPTKTTNVNKQLKPTASVKPVQMEKLAPKGPSPTPEDVSMKEENLCQAFSDALLCKIEDIDNEDWENPQLCSDYVKDIYQYLRQLEVLQSINPHFLDGRDINGRMRAILVDWLVQVHSKFRLLQETLYMCVGIMDRFLQVQPVSRKKLQLVGITALLLASKYEEMFSPNIEDFVYITDNAYTSSQIREMETLILKELKFELGRPLPLHFLRRASKAGEVDVEQHTLAKYLMELTLIDYDMVHYHPSKVAAAASCLSQKVLGQGKWNLKQQYYTGYTENEVLEVMQHMAKNVVKVNENLTKFIVSTTVFLSCGKL

SEQ ID NO: 842916 - protein, 234 aa, Homo sapiens
MRAILVDWLVQVHSKFRLLQETLYMCVGIMDRFLQVQPVSRKKLQLVGITALLLASKYEEMFSPNIEDFVYITDNAYTSSQIREMETLILKELKFELGRPLPLHFLRRASKAGEVDVEQHTLAKYLMELTLIDYDMVHYHPSKVAAAASCLSQKVLGQGKWNLKQQYYTGYTENEVLEVMQHMAKNVVKVNENLTKFIAIKNKYASSKLLKISMIPQLNSKAVKDLASPLIGRS

SEQ ID NO: 842917 - protein, 77 aa, Homo sapiens
PIQPTVMHGSATWLTIVCVCTALSAVSHAFCAHRLNVAVSPWDATWWGNGKQNSQELRRAGLAVLWEPELLGLQAPL

SEQ ID NO: 842918 - protein, 116 aa, Homo sapiens
PTQVVQGDVISGSLKTLSPSTVTLTGSRSWDVGISFLGPPIQPTVMHGSATWLTIVCVCTALSAVSHAFCAHRLNVAVSPWDATWWGNGKQNSQELRRAGLAVLWEPELLGLQAPL

SEQ ID NO: 842919 - protein, 124 aa, Homo sapiens
MGFPLSREGSIFKLTVLAVFAHAYMPSALAASIFHPEAGPWGRHAAPTNVVENPLPETDSQPIPPSGGPFSEPQFHNGESEESHEQFLKALQNAVTTFVNRMKSNHMRGRSITNDSAVLSLFQS

SEQ ID NO: 842920 - protein, 581 aa, Homo sapiens
MSIDQQQVQPLQLQQRFPVARVWRVPETSEPADFPSREPARTPSFAGSHAPQWEGGTEKHFLEAGTPCPTQPCHYFPSDWAGAIGNRSDQRRDTHPISLGCKISISLASLNYLCTNKSDGENLAQEMQYAGHIASKGITHSCAVCILCGPSREGDSPVAMGMTRMLLECSLSDKLCVIQEKQYEVIIVPTLLVTIFLILLGVILWLFIREQRTQQQRSGPQGIAPVPPPRDLSWEAGHGGNVALPLKETSVENFLGATTPALAKLQVPREQLSEVLEQICSGSCGPIFRANMNTGDPSKPKSVILKALKEPAGLHEVQDFLGRIQFHQYLGKHKNLVQLEGCCTEKLPLYMVLEDVAQGDLLGFLWTCRRDVMTMDGLLYDLTEKQVYHIGKQVLLALEFLQEKHLFHGDVAARNILMQSDLTAKLCGLGLAYEVYTRGAISSTQTIPLKWLAPERLLLRPASIRADVWSFGILLYEMVTLGAPPYPEVPPTSILEHLQRRKIMKRPSSCTHTMYSIMKSCWRWREADRPSPRELRLRLEAAIKTADDEAVLQVPELVVPELYAAVAGIRVESLFYNYSML

SEQ ID NO: 842921 - protein, 581 aa, Homo sapiens; identical to SEQ ID NO: 842920

SEQ ID NO: 842922 - protein, 587 aa, Homo sapiens
MSIDQQQVQPLQLQQRFPVARVWRVPETSEPADFPSREPARTPSFAGSHAPQWEGGTEKHFLEAGTPCPTQPCHYFPSDWAGAIGNRSDQRRDTHPISLGCKISISLASLNYLCTNKSDGENLAQEMQYAGHIASKGITHSCAVCILCGPSREGDSPVAMGMTRMLLECSLSDKLCVIQEKQYEVIIVPTLLVTIFLILLGVILWLFIREQRTQQQRSGPQGIAPVPPPRDLSWEAGHGGNVALPLKETSVENFLGATTPALAKLQVPREQLSEVLEQICSGSCGPIFRANMNTGDPSKPKSVILKALKEPAGLHEVQDFLGRIQFHQYLGKHKNLVQLEGCCTEKLPLYMVLEDVAQGDLLGFLWTCRRVSSRAEDVMTMDGLLYDLTEKQVYHIGKQVLLALEFLQEKHLFHGDVAARNILMQSDLTAKLCGLGLAYEVYTRGAISSTQTIPLKWLAPERLLLRPASIRADVWSFGILLYEMVTLGAPPYPEVPPTSILEHLQRRKIMKRPSSCTHTMYSIMKSCWRWREADRPSPRELRLRLEAAIKTADDEAVLQVPELVVPELYAAVAGIRVESLFYNYSML

SEQ ID NO: 842923 - protein, 418 aa, Homo sapiens
MGMTRMLLECSLSDKLCVIQEKQYEVIIVPTLLVTIFLILLGVILWLFIREQRTQQQRSGPQGIAPVPPPRDLSWEAGHGGNVALPLKETSVENFLGATTPALAKLQVPREQLSEVLEQICSGSCGPIFRANMNTGDPSKPKSVILKALKEPAGLHEVQDFLGRIQFHQYLGKHKNLVQLEGCCTEKLPLYMVLEDVAQGDLLGFLWTCRRDVMTMDGLLYDLTEKQVYHIGKQVLLALEFLQEKHLFHGDVAARNILMQSDLTAKLCGLGLAYEVYTRGAISSTQTIPLKWLAPERLLLRPASIRADVWSFGILLYEMVTLGSTPYPEVLLTRSRAFQEANQKNQSWQYRQDRVCARHMTPNKRPGQGTATSALAQGDQRVGERTHKKIPKPYISRGGLATRSTSVLHRSHKNTINS

SEQ ID NO: 842924 - protein, 240 aa, Homo sapiens
MFQRLNKMFVGEVSSSSNQEPEFNEKEDDEWILVDFIDTCTGFSAEEEEEEEDISEESPTEHPSVFSCLPASLECLADTSDSCFLQFESCPMEESWFITPPPCFTAGGLTTIKVETSPMENLLIEHPSMSVYAVHNSCPGLSEATRGTDELHSPSSPRVEAQNEMGQHIHCYVAALAAHTTFLEQPKSFRPSQWIKEHSERQPLNRNSLRRQNLTRDCHPRQVKHNGWVVHQPCPRQYNY

SEQ ID NO: 842925 - protein, 164 aa, Homo sapiens
MFQRLNKMFVGEVSSSSNQEPEFNEKEDDEWILVDFIDTCTGFSAEEEEEEEDISEESPTEHPSVFSCLPASLECLADTSDSCFLQFESCPMEESWFITPPPCFTAGGLTTIKVETSPMENLLIEHPSMSVYAVHNSCPGLSEATRGTDELHSPSSPRARKSCL

SEQ ID NO: 842926 - protein, 164 aa, Homo sapiens; identical to SEQ ID NO: 842925

SEQ ID NO: 842927 - protein, 164 aa, Homo sapiens; identical to SEQ ID NO: 842925

SEQ ID NO: 842928 - protein, 164 aa, Homo sapiens; identical to SEQ ID NO: 842925

SEQ ID NO: 842929 - protein, 101 aa, Homo sapiens
NNKRTWTGRPGRTTRGLESAPRLPSGYLNEVQRSPAPPQLPQQSRPARVLPRRAGPLPSPRSPARPGPTYNDSSCFSPKLNKHPVHFNLLSVPLGQLKTRF

SEQ ID NO: 842930 - protein, 164 aa, Homo sapiens; identical to SEQ ID NO: 842925

SEQ ID NO: 842931 - protein, 163 aa, Homo sapiens
MFQRLNKMFVGEVSSSSNQEPEFNEKEDDEWILVDFIDTCTGFSAEEEEEEEDISEESPTEHPSVFSCLPASLECLADTSDSCFLQFESCPMEESWFITPPPCFTAGGLTTIKVETSPMENLLIEHPSMSVYAVHNSCPGLSEATRGTDELHSPSSPRYVTSI

SEQ ID NO: 842932 - protein, 508 aa, Homo sapiens
AQFQGSGILCLTEHCCPMAIPKHSLSPVPWEEDSFLQVKVEEEEEASLSQGGESSHDHIAHSEAARLRFRHFRYEEASGPHEALAHLRALCCQWLQPEAHSKEQILELLVLEQFLGALPPEIQAWVGAQSPKSGEEAAVLVEDLTQVLDKRGWDPGAEPTEASCKQSDLGESEPSNVTETLMGGVSLGPAFVKACEPEGSSERSGLSGEIWTKSVTQQIHFKKTSGPYKDVPTDQRGRESGASRNSSSAWPNLTSQEKPPSEDKFDLVDAYGTEPPYTYSGKRSSKCRECRKMFQSASALEAHQKTHSRKTPYACSECGKAFSRSTHLAQHQVVHTGAKPHECKECGKAFSRVTHLTQHQRIHTGEKPYKCGECGKTFSRSTHLTQHQRVHTGERPYECDACGKAFSQSTHLTQHQRIHTGEKPYKCDACGRAFSDCSALIRHLRIHSGEKPYQCKVCPKAFAQSSSLIEHQRIHTGEKPYKCSDCGKAFSRSSALMVHLRIHITVLQ

SEQ ID NO: 842933 - protein, 784 aa, Homo sapiens
VQAEELGRAFRCMYPGGQGDYAGFPGCGLLRLHSTFRHDLKIYASDEGRVQMTAAAFAKGLLALEGELTPILVQMVKSANMNGLLDSDGDSLSSCQHRVKARLHHILQQDAPFGPEDYDQLAPTRSTSLLNSMTIIQNPVKVCDQVFALIENLTHQIRERMQDPRSVDLQLYHSETLELMLQRWSKLERDFRQKSGRYDISKIPDIYDCVKYDVQHNGSLGLQGTAELLRLSKALADVVIPQEYGISREEKLEIAVGFCLPLLRKILLDLQRTHEDESVNKLHPLYSRGVLSPGRHVRTRLYFTSESHVHSLLSVFRYGGLLDETQDAQWQRALDYLSAISELNYMTQIVIMLYEDNTQDPLSEERFHVELHFSPGVKGVEEEGSAPAGCGFRPASSENEEMKTNQGSMENLCPGKASDEPDRALQTSPQPPEGPGLPRRSPLIRNRKAGSMEVLSETSSSRPGGYRLFSSSRPPTEMKQSGLGSQCTGLFSTTVLGGSSSAPNLQDYARSHGKKLPPASLKHRDGTLFVWTEVSAGTEMYSDQLKGETVHHVTDKLPASRKHLGPFCSHSVTLARNQWLCGVRDMAAYQQEEQMQLPRADAIRSRLIDTFSLIEHLQGLSQAVPRHTIRELLDPSRQKKLVLGDQHQLVRFSIKPQRIEQISHAQRLLSRLHVRCSQRPPLSLWAGWVLECPLFKNFIIFLVFLNTIILMVEIELLESTNTKLWPLKLTLEVAAWFILLIFILEILLKWLSNFSVFWKSAWNVFDFVVTMLVRIEILRVRLVG

SEQ ID NO: 842934 - protein, 776 aa, Homo sapiens
VQAEELGRAFRCMYPGGQGDYAGFPGCGLLRLHSTFRHDLKIYASDEGRVQMTAAAFAKGLLALEGELTPILVQMVKSANMNGLLDSDGDSLSSCQHRVKARLHHILQQDAPFGPEDYDQLAPTRSTSLLNSMTIIQNPVKVCDQVFALIENLTHQIRERMQDPRSVDLQLYHSETLELMLQRWSKLERDFRQKSGRYDISKIPDIYDCVKYDVQHNGSLGLQGTAELLRLSKALADVVIPQEYGISREEKLEIAVGFCLPLLRKILLDLQRTHEDEYSRGVLSPGRHVRTRLYFTSESHVHSLLSVFRYGGLLDETQDAQWQRALDYLSAISELNYMTQIVIMLYEDNTQDPLSEERFHVELHFSPGVKGVEEEGSAPAGCGFRPASSENEEMKTNQGSMENLCPGKASDEPDRALQTSPQPPEGPGLPRRSPLIRNRKAGSMEVLSETSSSRPGGYRLFSSSRPPTEMKQSGLGSQCTGLFSTTVLGGSSSAPNLQDYARSHGKKLPPASLKHRDGTLFVWTEVSAGTEMYSDQLKGETVHHVTDKLPASRKHLGPFCSHSVTLARNQWLCGVRDMAAYQQEEQMQLPRADAIRSRLIDTFSLIEHLQGLSQAVPRHTIRELLDPSRQKKLVLGDQHQLVRFSIKPQRIEQISHAQRLLSRLHVRCSQRPPLSLWAGWVLECPLFKNFIIFLVFLNTIILMVEIELLESTNTKLWPLKLTLEVAAWFILLIFILEILLKWLSNFSVFWKSAWNVFDFVVTMLVRIEILRVRLVG

SEQ ID NO: 842935 - protein, 742 aa, Homo sapiens
VQAEELGRAFRCMYPGGQGDYAGFPGCGLLRLHSTFRHDLKIYASDEGRVQMTAAAFAKGLLALEGELTPILVQMVKSANMNGLLDSDGDSLSSCQHRVKARLHHILQQDAPFGPEDYDQLAPTRSTSLLNSMTIIQNPVKVCDQVFALIENLTHQIRERMQDPRSVDLQLYHSETLELMLQRWSKLERDFRQKSGRYDISKIPDIYDCVKYDVQHNGSLGLQGTAELLRLSKALADVVIPQEYGISREEKLEIAVGFCLPLLRKILLDLQRTHEDESVNKLHPLYSRGVLSPGRHVRTRLYFTSESHVHSLLSVFRYGGLLDETQDAQWQRALDYLSAISELNYMTQIVIMLYEDNTQDPLSEERFHVELHFSPGVKGVEEEGSAPAGCGFRPASSENEEMKTNQGSMENLCPGKASDEPDRALQTSPQPPEGPGLPRRSPLIRNRKAGSMEVLSETSSSRPGGYRLFSSSRPPTEMKQSGLGTLFVWTEVSAGTEMYSDQLKGETVHHVTDKLPASRKHLGPFCSHSVTLARNQWLCGVRDMAAYQQEEQMQLPRADAIRSRLIDTFSLIEHLQGLSQAVPRHTIRELLDPSRQKKLVLGDQHQLVRFSIKPQRIEQISHAQRLLSRLHVRCSQRPPLSLWAGWVLECPLFKNFIIFLVFLNTIILMVEIELLESTNTKLWPLKLTLEVAAWFILLIFILEILLKWLSNFSVFWKSAWNVFDFVVTMLVRIEILRVRLVG

SEQ ID NO: 842936 - protein, 866 aa, Homo sapiens
VQAEELGRAFRCMYPGGQGDYAGFPGCGLLRLHSTFRHDLKIYASDEGRVQMTAAAFAKGLLALEGELTPILVQMVKSANMNGLLDSDGDSLSSCQHRVKARLHHILQQDAPFGPEDYDQLAPTRSTSLLNSMTIIQNPVKVCDQVFALIENLTHQIRERMQDPRSVDLQLYHSETLELMLQRWSKLERDFRQKSGRYDISKIPDIYDCVKYDVQHNGSLGLQGTAELLRLSKALADVVIPQEYGISREEKLEIAVGFCLPLLRKILLDLQRTHEDESVNKLHPLYSRGVLSPGRHVRTRLYFTSESHVHSLLSVFRYGGLLDETQDAQWQRALDYLSAISELNYMTQIVIMLYEDNTQDPLSEERFHVELHFSPGVKGVEEEGSAPAGCGFRPASSENEEMKTNQGSMENLCPGKASDEPDRALQTSPQPPEGPGLPRRSPLIRNRKAGSMEVLSETSSSRPGGYRLFSSSRPPTEMKQSGLGSQCTGLFSTTVLGGSSSAPNLQDYARSHGKKLPPASLKHRDGTLFVWTEVSAGTEMYSDQLKGETVHHVTDKLPASRKHLGPFCSHSVTLARNQWLCGVRDMAAYQQEEQMQLPRADAIRSRLIDTFSLIEHLQGLSQAVPRHTIRELLDPSRQKKLVLGDQHQLVRFSIKPQRIEQISHAQRLLSRLHVRCSQRPPLSLWAGWVLECPLFKNFIIFLVFLNTIILMVEIELLESTNTKLWPLKLTLEVAAWFILLIFILEILLKWLSNFSVFWKSAWNVFDFVVTMLSLLPEVVVLVGVTGQSVWLQLLRICRVLRSLKLLAQFRQIQIIILVLVRALKSMTFLLMLLLIFFYIFAVTGVYVFSEYTRSPRQDLEYHVFFS

SEQ ID NO: 842937 - protein, 611 aa, Homo sapiens
VQAEELGRAFRCMYPGGQGDYAGFPGCGLLRLHSTFRHDLKIYASDEGRVQMTAAAFAKGLLALEGELTPILVQMVKSANMNGLLDSDGDSLSSCQHRVKARLHHILQQDAPFGPEDYDQLAPTRSTSLLNSMTIIQNPVKVCDQVFALIENLTHQIRERMQDPRSVDLQLYHSETLELMLQRWSKLERDFRQKSGRYDISKIPDIYDCVKYDVQHNGSLGLQGTAELLRLSKALADVVIPQEYGISREEKLEIAVGFCLPLLRKILLDLQRTHEDESVNKLHPLYSRGVLSPGRHVRTRLYFTSESHVHSLLSVFRYGGLLDETQDAQWQRALDYLSAISELNYMTQIVIMLYEDNTQDPLSEERFHVELHFSPGVKGVEEEGSAPAGCGFRPASSENEEMKTNQGSMENLCPGKASDEPDRALQTSPQPPEGPGLPRRSPLIRNRKAGSMEVLSETSSSRPGGYRLFSSSRPPTEMKQSGLGSQCTGLFSTTVLGGSSSAPNLQDYARSHGKKLPPASLKHRDELLFVPAVKRFSVSFAKHPTNGRLDWETLVHENLPGLMEMDQDDRVWPRDSLFRYFELLEKLQYNLEERKKLQEFAVQALMNLEDK

SEQ ID NO: 842938 - protein, 540 aa, Homo sapiens
VQAEELGRAFRCMYPGGQGDYAGFPGCGLLRLHSTFRHDLKIYASDEGRVQMTAAAFAKGLLALEGELTPILVQMVKSANMNGLLDSDGDSLSSCQHRVKARLHHILQQDAPFGPEDYDQLAPTRSTSLLNSMTIIQNPVKVCDQVFALIENLTHQIRERMQDPRSVDLQLYHSETLELMLQRWSKLERDFRQKSGRYDISKIPDIYDCVKYDVQHNGSLGLQGTAELLRLSKALADVVIPQEYGISREEKLEIAVGFCLPLLRKILLDLQRTHEDESVNKLHPLYSRGVLSPGRHVRTRLYFTSESHVHSLLSVFRYGGLLDETQDAQWQRALDYLSAISELNYMTQIVIMLYEDNTQDPLSEERFHVELHFSPGVKGVEEEGSAPAGCGFRPASSENEEMKTNQGSMENLCPGKASDEPDRALQTSPQPPEGPGLPRRSPLIRNRKAGSMEVLSETSSSRPGGYRLFSSSRPPTEMKQSGLGSQCTGLFSTTVLGGSSSAPNLQDYARSHGKKLPPASLKHRDGTLFVWTEVSAGTEM

SEQ ID NO: 842939 - protein, 199 aa, Homo sapiens
MAAYQQEEQMQLPRADAIRSRLIDTFSLIEHLQGLSQAVPRHTIRELLDPSRQKKLVLGDQHQLVRFSIKPQRIEQISHAQRLLSRLHVRCSQRPPLSLWAGWVLECPLFKNFIIFLVFLNTIILMVEIELLESTNTKLWPLKLTLEVAAWFILLIFILEILLKWLSNFSVFWKSAWNVFDFVVTMLVRIEILRVRLVG

SEQ ID NO: 842940 - protein, 220 aa, Homo sapiens
PEVSRIFSSIYFILWLLLGSIIFRSIIVAMMVTNFQNIRKELNEEMARREVQLKADMFKRQIIQRRKNMSHEALTSSHSKIEDRRGASQQRESLDLSEVSEVESNYGATEEDLITSASKTEETLSKKREYQSSSCVSSTSSSYSSSSESRFSESIGRLDWETLVHENLPGLMEMDQDDRVWPRDSLFRYFELLEKLQYNLEERKKLQEFAVQALMNLEDK

SEQ ID NO: 842941 - protein, 85 aa, Homo sapiens
PEVSRIFSSIYFILWLLLGSIIFRSIIVAMMVTNFQNIRKELNEEMARREVQLKADMFKRQIIQRRKNMSHEALTSSHSKIEDRS

SEQ ID NO: 842942 - protein, 106 aa, Homo sapiens [sequence omitted]

SEQ ID NO: 842943 - protein, 67 aa, Homo sapiens
VSLTGLLVEISLVWPTSDMRVMASESMTFLLMLLLIFFYIFAVTGVYVFSEYTRSPRQDLEYHVFFS

SEQ ID NO: 842944 - protein, 652 aa, Homo sapiens
MTIIQNPVKVCDQVFALIENLTHQIRERMQDPRSVDLQLYHSETLELMLQRWSKLERDFRQKSGRYDISKIPDIYDCVKYDVQHNGSLGLQGTAELLRLSKALADVVIPQEYGISREEKLEIAVGFCLPLLRKILLDLQRTHEDESVNKLHPLYSRGVLSPGRHVRTRLYFTSESHVHSLLSVFRYGGLLDETQDAQWQRALDYLSAISELNYMTQIVIMLYEDNTQDPLSEERFHVELHFSPGVKGVEEEGSAPAGCGFRPASSENEEMKTNQGSMENLCPGKASDEPDRALQTSPQPPEGPGLPRRSPLIRNRKAGSMEVLSETSSSRPGGYRLFSSSRPPTEMKQSGLGSQCTGLFSTTVLGGSSSAPNLQDYARSHGKKLPPASLKHRDGTLFVWTEVSAGTEMYSDQLKGETVHHVTDKLPASRKHLGPFCSHSVTLARNQWLCGVRDMAAYQQEEQMQLPRADAIRSRLIDTFSLIEHLQGLSQAVPRHTIRELLDPSRQKKLVLGDQHQLVRFSIKPQRIEQISHAQRLLSRLHVRCSQRPPLSLWAGWVLECPLFKNFIIFLVFLNTIILMVEIELLESTNTKLWPLKLTLEVAAWFILLIFILEILLKWLSNFSVFWKSAWNVFDFVVTMLVRIEILRVRLVG

SEQ ID NO: 842945 - protein, 552 aa, Homo sapiens
RYLFLACGPWEYGISREEKLEIAVGFCLPLLRKILLDLQRTHEDESVNKLHPLYSRGVLSPGRHVRTRLYFTSESHVHSLLSVFRYGGLLDETQDAQWQRALDYLSAISELNYMTQIVIMLYEDNTQDPLSEERFHVELHFSPGVKGVEEEGSAPAGCGFRPASSENEEMKTNQGSMENLCPGKASDEPDRALQTSPQPPEGPGLPRRSPLIRNRKAGSMEVLSETSSSRPGGYRLFSSSRPPTEMKQSGLGSQCTGLFSTTVLGGSSSAPNLQDYARSHGKKLPPASLKHRDGTLFVWTEVSAGTEMYSDQLKGETVHHVTDKLPASRKHLGPFCSHSVTLARNQWLCGVRDMAAYQQEEQMQLPRADAIRSRLIDTFSLIEHLQGLSQAVPRHTIRELLDPSRQKKLVLGDQHQLVRFSIKPQRIEQISHAQRLLSRLHVRCSQRPPLSLWAGWVLECPLFKNFIIFLVFLNTIILMVEIELLESTNTKLWPLKLTLEVAAWFILLIFILEILLKWLSNFSVFWKSAWNVFDFVVTMLVRIEILRVRLVG

SEQ ID NO: 842946 - protein, 546 aa, Homo sapiens
VQAEELGRAFRCMYPGGQGDYAGFPGCGLLRLHSTFRHDLKIYASDEGRVQMTAAAFAKGLLALEGELTPILVQMVKSANMNGLLDSDGDSLSSCQHRVKARLHHILQQDAPFGPEDYDQLAPTRSTSLLNSMTIIQNPVKVCDQVFALIENLTHQIRERMQDPRSVDLQLYHSETLELMLQRWSKLERDFRQKSGRYDISKIPDIYDCVKYDVQHNGSLGLQGTAELLRLSKALADVVIPQEYGISREEKLEIAVGFCLPLLRKILLDLQRTHEDESVNKLHPLYSRGVLSPGRHVRTRLYFTSESHVHSLLSVFRYGGLLDETQDAQWQRALDYLSAISELNYMTQIVIMLYEDNTQDPLSEERFHVELHFSPGVKGVEEEGSAPAGCGFRPASSENEEMKTNQGSMENLCPGKASDEPDRALQTSPQPPEGPGLPRRSPLIRNRKAGSMEVLSETSSSRPGGYRLFSSSRPPTEMKQSGLGSQCTGLFSTTVLGGSSSAPNLQDYARSHGKKLPPASLKHRDGFEGCSMVPTIYPLETLHNAL

SEQ ID NO: 842947 - protein, 567 aa, Homo sapiens
VQAEELGRAFRCMYPGGQGDYAGFPGCGLLRLHSTFRHDLKIYASDEGRVQMTAAAFAKGLLALEGELTPILVQMVKSANMNGLLDSDGDSLSSCQHRVKARLHHILQQDAPFGPEDYDQLAPTRSTSLLNSMTIIQNPVKVCDQVFALIENLTHQIRERMQDPRSVDLQLYHSETLELMLQRWSKLERDFRQKSGRYDISKIPDIYDCVKYDVQHNGSLGLQGTAELLRLSKALADVVIPQEYGISREEKLEIAVGFCLPLLRKILLDLQRTHEDESVNKLHPLYSRGVLSPGRHVRTRLYFTSESHVHSLLSVFRYGGLLDETQDAQWQRALDYLSAISELNYMTQIVIMLYEDNTQDPLSEERFHVELHFSPGVKGVEEEGSAPAGCGFRPASSENEEMKTNQGSMENLCPGKASDEPDRALQTSPQPPEGPGLPRRSPLIRNRKAGSMEVLSETSSSRPGGYRLFSSSRPPTEMKQSGLGSQCTGLFSTTVLGGSSSAPNLQDYARSHGKKLPPASLKHRDELLFVPAVKRFSVSFAKHPTNGFEGCSMVPTIYPLETLHNAL

SEQ ID NO: 842948 - protein, 429 aa, Homo sapiens
VQAEELGRAFRCMYPGGQGDYAGFPGCGLLRLHSTFRHDLKIYASDEGRVQMTAAAFAKGLLALEGELTPILVQMVKSANMNGLLDSDGDSLSSCQHRVKARLHHILQQDAPFGPEDYDQLAPTRSTSLLNSMTIIQNPVKVCDQVFALIENLTHQIRERMQDPRSVDLQLYHSETLELMLQRWSKLERDFRQKSGRYDISKIPDIYDCVKYDVQHNGSLGLQGTAELLRLSKALADVVIPQEYGISREEKLEIAVGFCLPLLRKILLDLQRTHEDESVNKLHPLYSRGVLSPGRHVRTRLYFTSESHVHSLLSVFRYGGLLDETQDAQWQRALDYLSAISELNYMTQIVIMLYEDNTQDPLSEERFHVELHFSPGVKGVEEEGSAPAGCGFRPASSEMTEKNKEARSCWKKKRSSPACKRRWSMDCRE

SEQ ID NO: 842949 - protein, 85 aa, Homo sapiens; identical to SEQ ID NO: 842941

SEQ ID NO: 842950 - protein, 185 aa, Homo sapiens
MCLSLSDFVADIEKNQEEEEDQDPQCPRLSPDLPEVEEQDVPQDSLDEVYLTPSLPHDLSDCQQPYNSTLYSLEDQLTCFALDEPDLSATLLCKLGPGQSEIAEELCQRLQRKERMLQDLLSDQNKEVVEDEMEIQGLLWSMRTGEQESQGSMQIPSRDDSTSSTAKEDASIPRCTLDKYQISFH

SEQ ID NO: 842951 - protein, 110 aa, Homo sapiens
GGVGRRQEDLRQALFGSLSGPVSLGVLLCARSSTMGKRDNRVAYMNPIAMARSRGPIQSSGPTIQDYLNRPRPTWEEVKEQLEKKKKGSKALAEFEEKMNEVCKKYLLKK

SEQ ID NO: 842952 - protein, 232 aa, Homo sapiens [sequence omitted]

SEQ ID NO: 842953 - protein, 281 aa, Homo sapiens
GGVGRRQEDLRQALFGSLSGPVSLGVLLCARSSTMGKRDNRVAYMNPIAMARSRGPIQSSGPTIQDYLNRPRPTWEEVKEQLEKKKKGSKALAEFEEKMNENWKKELEKHREKLLSGSESSSKKRQRKKKEKKKSGRYSSSSSSSSDSSSSSSDSEDEDKKQGKRRKKKKNRSHKSSESSMSETESDSKDSLKKKKKSKDGTEKEKDIKGLSKKRKMYSEDKPLSSESLSESEYIEEVRAKKKKSSEEREKATEKTKKKKKHKKHSKKKKKKAASSSPDSP

SEQ ID NO: 842954 - protein, 139 aa, Homo sapiens
GGVGRRQEDLRQALFGSLSGPVSLGVLLCARSSTMGKRDNRVAYMNPIAMARSRGPIQSSGPTIQDYLNRPRPTWEEVKEQLEKKKKGSKALAEFEEKMNENWKKELEKHREKLLSGSESSSKKRQRKKKEKKKSGRFF

SEQ ID NO: 842955 - protein, 145 aa, Homo sapiens
GGVGRRQEDLRQALFGSLSGPVSLGVLLCARSSTMGKRDNRVAYMNPIAMARSRGPIQSSGPTIQDYLNRPRPTWEEVKEQLEKKKKGSKALAEFEEKMNENWKKELEKHREKLLSGSESSSKKRQRKKKEKKKSGRVSKNFPFF

SEQ ID NO: 842956 - protein, 240 aa, Homo sapiens
GGVGRRQEDLRQALFGSLSGPVSLGVLLCARSSTMGKRDNRVAYMNPIAMARSRGPIQSSGPTIQDYLNRPRPTWEEVKEQLEKKKKGSKALAEFEEKMNENWKKELEKHREKLLSGSESSSKKRQRKKKEKKKSGRYSSSSSSSSDSSSSSSDSEDEDKKQGKRRKKKKNRSHKSSESSMSETESDSKDSLKKKKKSKDGTEKEKDIKGLSKKRKMYSEDKPLSSESLSESEYIEEVSI

SEQ ID NO: 842957 - protein, 281 aa, Homo sapiens; identical to SEQ ID NO: 842953

SEQ ID NO: 842958 - protein, 232 aa, Homo sapiens [sequence omitted]

SEQ ID NO: 842959 - protein, 281 aa, Homo sapiens; identical to SEQ ID NO: 842953

SEQ ID NO: 842960 - protein, 103 aa, Homo sapiens
MELRKKRILKDSAKRERCILKINLYHLSPCQNQSILRRCEQKRRKAVKNEKKQQKKQKRKRSIRNTVRRRKRRLLVQVLTHHNIKKNQDSLIKKVQCLRKFQL

SEQ ID NO: 842961 - protein, 145 aa, Homo sapiens; identical to SEQ ID NO: 842955

SEQ ID NO: 842962 - protein, 786 aa, Homo sapiens
MGLQPLEFSDCYLDSPWFRERIRAHEAELERTNKFIKELIKDGKNLIAATKSLSVAQRKFAHSLRDFKFEFIGDAVTDDERCIDASLREFSNFLKNLEEQREIMALSVTETLIKPLEKFRKEQLGAVKEEKKKFDKETEKNYSLIDKHLNLSAKKKDSHLQEADIQVEQNRQHFYELSLEYVCKLQEIQERKKFEFVEPMLSFFQGMFTFYHQGHELAKDFNHYKMELQINIQNTRNRFEGTRSEVEELMNKIRQNPKDHKRASQFTAEGYLYVQEKRPAPFGSSWVKHYCMYRKAAKKFNMIPFEHRSGGKLGDGEVFFLKECTKRHTDSIDRRFCFDIEAADRPGVSLTMQAFSEEERKQWLEALGGKEALSHSFNTAIIPRPEGNAQLDKMGFTIIRKCISAVETRGINDQGLYRVVGVSSKVQRLLSMLMDVKTCNEVDLENSADWEVKTITSALKQYLRSLPEPLMTYELHGDFIVPAKSGSPESRVNAIHFLVHKLPEKNKEMLDILVKHLTNVSNHSKQNLMTVANLGVVFGPTLMRPQEETVAALMDLKFQNIVVEILIENHEKIFRTPPDTTFPEPTCLSASPPNAPPRQSKRQGQRTKRPVAVYNLCLELEDGDNPYPSKEDTPTSSLDSLSSPSPVTTAVPGPPGPDKNHLLADGGSFGDWASTIPGQTRSSMVQWLNPQSPTTTSSNSAVTPLSPGSSPFPFSPPATVADKPPESIRSRKARAVYPCEAEHSSELSFEIGAIFEDVQTSREPGWLEGTLNGKRGLIPQNYVKLL

SEQ ID NO: 842963 - protein, 786 aa, Homo sapiens; identical to SEQ ID NO: 842962

SEQ ID NO: 842964 - protein, 88 aa, Homo sapiens
ASSVNPVRRINKSAARSEQSAMVLLSGGRVSPLMLWTGLSGCVRLPDPNARGLLLMAGMPLCSLLDYSLTHLILWVFVQVISLLTGRS

SEQ ID NO: 842965 - protein, 735 aa, Homo sapiens
MGLQPLEFSDCYLDSPWFRERIRAHEAELERTNKFIKELIKDGKNLIAATKSLSVAQRKFAHSLRDFKFEFIGDAVTDDERCIDASLREFSNFLKNLEEQREIMALSVTETLIKPLEKFRKEQLGAVKEEKKKFDKETEKNYSLIDKHLNLSAKKKDSHLQEADIQVEQNRQHFYELSLEYVCKLQEIQERKKFEFVEPMLSFFQGMFTFYHQGHELAKDFNHYKMELQINIQNTRNRFEGTRSEVEELMNKIRQNPKDHKRASQFTAEGYLYVQEKRPAPFGSSWVKHYCMYRKAAKKFNMIPFEHRSGGKLGDGEVFFLKECTKRHTDSIDRRFCFDIEAADRPGVSLTMQAFSEEERKQWLEALGGKEALSHSFNTAIIPRPEGNAQLDKMGFTIIRKCISAVETRGINDQGLYRVVGVSSKVQRLLSMLMDVKTCNEVDLENSADWEVKTITSALKQYLRSLPEPLMTYELHGDFIVPAKSGSPESRVNAIHFLVHKLPEKNKEMLDILVKHLTNVSNHSKQNLMTVANLGVVFGPTLMRPQEETVAALMDLKFQNIVVEILIENHEKIFRTPPDTTFPEPTCLSASPPNAPPRQSKRQGQRTKRPVAVYNLCLELEDGDNPYPSKEDTPTSSLDSLSSPSPVTTAVPGPPGPDKNHLLADGGSFGDWASTIIRSRKARAVYPCEAEHSSELSFEIGAIFEDVQTSREPGWLEGTLNGKRGLIPQNYVKLL

SEQ ID NO: 842966 - protein, 386 aa, Homo sapiens
LPLSLPDHAINCVRMGLDMCRAIRKLRAATGVDINMRVGVHSGSVLCGVIGLQKWQYDVWSHDVTLANHMEAGGVPGLRPRALGSYSRRPTRPTTGCHPFISSLRKAQDEYLKISPIWGLGDPRVQGGELGGTSCNTGSFLKSDIQERSLKDMRCLSVLGAMGVMGQEIGDLKALPADPYCLPPSRRVHITGATLALLAGAYAVEDAGMEHRDPYLRELGEPTYLVIDPRAEEEDEKGTAGGLLSSLEGLKMRPSLLMTRYLESWGAAKPFAHLSHGDSPVSTSTPLPEKTLASFSTQWSLDRSRTPRGLDDELDTGDAKFFQVIEQLNSQKQWKQSKDFNPLTLYFREKEMEKEYRLSAIPAFKYYEACTFLVFLSNFIIQMLVT

SEQ ID NO: 842967 - protein, 358 aa, Homo sapiens
LPLSLPDHAINCVRMGLDMCRAIRKLRAATGVDINMRVGVHSGSVLCGVIGLQKWQYDVWSHDVTLANHMEAGGVPGLRPRALGSYSRRPTRPTTGCHPFISSLRKAQDEYLKISPIWGLGDPRVQGGELGGTSCNTGSFLKSDIQERSLKDMRCLSVLGAMGVMGQEIGDLKALPADPYCLPPSRRVHITGATLALLAGAYAVEDAGMEHRDPYLRELGEPTYLVIDPRAEEEDEKGTAGGLLSSLEGLKMRPSLLMTRYLESWGAAKPFAHLSHGDSPVSTSTPLPEKTLASFSTQWSLDRSRTPRGLDDELDTGDAKFFQTVEAVEGLQPTDTVLQREGDGERVPTLCNPRLQIL

SEQ ID NO: 842968 - protein, 56 aa, Homo sapiens [sequence omitted]

SEQ ID NO: 842969 - protein, 277 aa, Homo sapiens
LPLSLPDHAINCVRMGLDMCRAIRKLRAATGVDINMRVGVHSGSVLCGVIGLQKWQYDVWSHDVTLANHMEAGGVPGRVHITGATLALLAGAYAVEDAGMEHRDPYLRELGEPTYLVIDPRAEEEDEKGTAGGLLSSLEGLKMRPSLLMTRYLESWGAAKPFAHLSHGDSPVSTSTPLPEKTLASFSTQWSLDRSRTPRGLDDELDTGDAKFFQVIEQLNSQKQWKQSKDFNPLTLYFREKEMEKEYRLSAIPAFKYYEACTFLVFLSNFIIQMLVT

SEQ ID NO: 842970 - protein, 412 aa, Homo sapiens
LPLSLPDHAINCVRMGLDMCRAIRKLRAATGVDINMRVGVHSGSVLCGVIGLQKWQYDVWSHDVTLANHMEAGGVPGLRPRALGSYSRRPTRPTTGCHPFISSLRKAQDEYLKISPIWGLGDPRVQGGELGGTSCNTGSFLKSDIQERSLKDMRCLSVLGAMGVMGQEIGDLKALPADPYCLPPSRRVHITGATLALLAGAYAVEDAGMEHRDPYLRELGEPTYLVIDPRAEEEDEKGTAGGLLSSLEGLKMRPSLLMTRYLESWGAAKPFAHLSHGDSPVSTSTPLPRKSPPAHLREDTRSLQTTIVGTSPTGSEKTLASFSTQWSLDRSRTPRGLDDELDTGDAKFFQVIEQLNSQKQWKQSKDFNPLTLYFREKEMEKEYRLSAIPAFKYYEACTFLVFLSNFIIQMLV

SEQ ID NO: 842971 - protein, 134 aa, Homo sapiens
MYHYLEHYIILVTAMLQIIVSCFRKHSELSELNVKVMEALSLYTKLMNEDPMYSMYAKLQNQPYYMQSSGVSGSQVYAGPPPSGAYLVAGNAQMSHLQSYSLPPEQLSSLSQAVVPPSANPALPSQQTQAAYPK

SEQ ID NO: 842972 - protein, 429 aa, Homo sapiens
MVEWTDEFKNDPQLSLISAMIKNLKEQGVTFPAIGSQAAEQAKASPALVAKDPGTVANKKEEEDLAKAIELSLKEQRQQSTTLSTLYPSTSSLLTNHQHEGRKVRAIYDFEAAEDNELTFKAGEIITVLDDSDPNWWKGETHQGIGLFPSNFVTADLTAEPEMIKTEKKTVQFSDDVQVETIEPEPEPAFIDEDKMDQLLQMLQSTDPSDDQPDLPELLHLEAMCHQMGPLIDEKLEDIDRKHSELSELNVKVMEALSLYTKLMNEDPMYSMYAKLQNQPYYMQSSGVSGSQVYAGPPPSGAYLVAGNAQMSHLQSYSLPPEQLSSLSQAVVPPSANPALPSQQTQAAYPNTMVSSVQGNTYPSQAPVYSPPPAATAAAATADVTLYQNAGPNMPQVPNYNLTSSTLPQPGGSQQPPQPQQPYSQKALL

SEQ ID NO: 842973 - protein, 429 aa, Homo sapiens; identical to SEQ ID NO: 842972

SEQ ID NO: 842974 - protein, 540 aa, Homo sapiens
MPLFATNPFDQDVEKATSEMNTAEDWGLILDICDKVGQSRTGPKDCLRSIMRRVNHKDPHVAMQALTLLGACVSNCGKIFHLEVCSRDFASEVSNVLNKGHPKVCEKLKALMVEWTDEFKNDPQLSLISAMIKNLKEQGVTFPAIGSQAAEQAKASPALVAKDPGTVANKKEEEDLAKAIELSLKEQRQQSTTLSTLYPSTSSLLTNHQHEGRKVRAIYDFEAAEDNELTFKAGEIITVLDDSDPNWWKGETHQGIGLFPSNFVTADLTAEPEMIKTEKKTVQFSDDVQVETIEPEPEPAFIDEDKMDQLLQMLQSTDPSDDQPDLPELLHLEAMCHQMGPLIDEKLEDIDRKHSELSELNVKVMEALSLYTKLMNEDPMYSMYAKLQNQPYYMQSSGVSGSQVYAGPPPSGAYLVAGNAQMSHLQSYSLPPEQLSSLSQAVVPPSANPALPSQQTQAAYPNTMVSSVQGNTYPSQAPVYSPPPAATAAAATADVTLYQNAGPNMPQVPNYNLTSSTLPQPGGSQQPPQPQQPYSQKALL

SEQ ID NO: 842975 - protein, 267 aa, Homo sapiens
MIKTEKKTVQFSDDVQVETIEPEPEPAFIDEDKMDQLLQMLQSTDPSDDQPDLPELLHLEAMCHQMGPLIDEKLEDIDRKHSELSELNVKVMEALSLYTKLMNEDPMYSMYAKLQNQPYYMQSSGVSGSQVYAGPPPSGAYLVAGNAQMSHLQSYSLPPEQLSSLSQAVVPPSANPALPSQQTQAAYPNTMVSSVQGNTYPSQAPVYSPPPAATAAAATADVTLYQNAGPNMPQVPNYNLTSSTLPQPGGSQQPPQPQQPYSQKALL

SEQ ID NO: 842976 - protein, 540 aa, Homo sapiens; identical to SEQ ID NO: 842974

SEQ ID NO: 842977 - protein, 132 aa, Homo sapiens
MPLFATNPFDQDVEKATSEMNTAEDWGLILDICDKVGQSRTGPKDCLRSIMRRVNHKDPHVAMQALTLLGACVSNCGKIFHLEVCSRDFASEVSNVLNKCLSLSPRLEYSGVISADYSLCLPGSSDSPASAS

SEQ ID NO: 842978 - protein, 540 aa, Homo sapiens; identical to SEQ ID NO: 842974

SEQ ID NO: 842979 - protein, 478 aa, Homo sapiens
MQALTLLGACVSNCGKIFHLEVCSRDFASEVSNVLNKGHPKVCEKLKALMVEWTDEFKNDPQLSLISAMIKNLKEQGVTFPAIGSQAAEQAKASPALVAKDPGTVANKKEEEDLAKAIELSLKEQRQQSTTLSTLYPSTSSLLTNHQHEGRKVRAIYDFEAAEDNELTFKAGEIITVLDDSDPNWWKGETHQGIGLFPSNFVTADLTAEPEMIKTEKKTVQFSDDVQVETIEPEPEPAFIDEDKMDQLLQMLQSTDPSDDQPDLPELLHLEAMCHQMGPLIDEKLEDIDRKHSELSELNVKVMEALSLYTKLMNEDPMYSMYAKLQNQPYYMQSSGVSGSQVYAGPPPSGAYLVAGNAQMSHLQSYSLPPEQLSSLSQAVVPPSANPALPSQQTQAAYPNTMVSSVQGNTYPSQAPVYSPPPAATAAAATADVTLYQNAGPNMPQVPNYNLTSSTLPQPGGSQQPPQPQQPYSQKALL

SEQ ID NO: 842980 - protein, 490 aa, Homo sapiens
MRRVNHKDPHVAMQALTLLGACVSNCGKIFHLEVCSRDFASEVSNVLNKGHPKVCEKLKALMVEWTDEFKNDPQLSLISAMIKNLKEQGVTFPAIGSQAAEQAKASPALVAKDPGTVANKKEEEDLAKAIELSLKEQRQQSTTLSTLYPSTSSLLTNHQHEGRKVRAIYDFEAAEDNELTFKAGEIITVLDDSDPNWWKGETHQGIGLFPSNFVTADLTAEPEMIKTEKKTVQFSDDVQVETIEPEPEPAFIDEDKMDQLLQMLQSTDPSDDQPDLPELLHLEAMCHQMGPLIDEKLEDIDRKHSELSELNVKVMEALSLYTKLMNEDPMYSMYAKLQNQPYYMQSSGVSGSQVYAGPPPSGAYLVAGNAQMSHLQSYSLPPEQLSSLSQAVVPPSANPALPSQQTQAAYPNTMVSSVQGNTYPSQAPVYSPPPAATAAAATADVTLYQNAGPNMPQVPNYNLTSSTLPQPGGSQQPPQPQQPYSQKALL

SEQ ID NO: 842981 - protein, 443 aa, Homo sapiens
MLGHPKVCEKLKALMVEWTDEFKNDPQLSLISAMIKNLKEQGVTFPAIGSQAAEQAKASPALVAKDPGTVANKKEEEDLAKAIELSLKEQRQQSTTLSTLYPSTSSLLTNHQHEGRKVRAIYDFEAAEDNELTFKAGEIITVLDDSDPNWWKGETHQGIGLFPSNFVTADLTAEPEMIKTEKKTVQFSDDVQVETIEPEPEPAFIDEDKMDQLLQMLQSTDPSDDQPDLPELLHLEAMCHQMGPLIDEKLEDIDRKHSELSELNVKVMEALSLYTKLMNEDPMYSMYAKLQNQPYYMQSSGVSGSQVYAGPPPSGAYLVAGNAQMSHLQSYSLPPEQLSSLSQAVVPPSANPALPSQQTQAAYPNTMVSSVQGNTYPSQAPVYSPPPAATAAAATADVTLYQNAGPNMPQVPNYNLTSSTLPQPGGSQQPPQPQQPYSQKALL

SEQ ID NO: 842982 - protein, 586 aa, Homo sapiens
LLPLQSVLIYKEKATSEMNTAEDWGLILDICDKVGQSRTGPKDCLRSIMRRVNHKDPHVAMQALTLLGACVSNCGKIFHLEVCSRDFASEVSNVLNKGHPKVCEKLKALMVEWTDEFKNDPQLSLISAMIKNLKEQGVTFPAIGSQMRKLRLRMVEVTCPGTQLIVDSWNYNTGMLILSPVFFSLPESAFFVREAAEQAKASPALVAKDPGTVANKKEEEDLAKAIELSLKEQRQQSTTLSTLYPSTSSLLTNHQHEGRKVRAIYDFEAAEDNELTFKAGEIITVLDDSDPNWWKGETHQGIGLFPSNFVTADLTAEPEMIKTEKKTVQFSDDVQVETIEPEPEPAFIDEDKMDQLLQMLQSTDPSDDQPDLPELLHLEAMCHQMGPLIDEKLEDIDRKHSELSELNVKVMEALSLYTKLMNEDPMYSMYAKLQNQPYYMQSSGVSGSQVYAGPPPSGAYLVAGNAQMSHLQSYSLPPEQLSSLSQAVVPPSANPALPSQQTQAAYPNTMVSSVQGNTYPSQAPVYSPPPAATAAAATADVTLYQNAGPNMPQVPNYNLTSSTLPQPGGSQQPPQPQQPYSQKALL

SEQ ID NO: 842983 - protein, 540 aa, Homo sapiens; identical to SEQ ID NO: 842974

SEQ ID NO: 842984 - protein, 362 aa, Homo sapiens
  misc_feature (354)..(354): Xaa can be any naturally occurring amino acid
MPLFATNPFDQDVEKATSEMNTAEDWGLILDICDKVGQSRTGPKDCLRSIMRRVNHKDPHVAMQALTLLGACVSNCGKIFHLEVCSRDFASEVSNVLNKGHPKVCEKLKALMVEWTDEFKNDPQLSLISAMIKNLKEQGVTFPAIGSQAAEQAKASPALVAKDPGTVANKKEEEDLAKAIELSLKEQRQQSTTLSTLYPSTSSLLTNHQHEGRKVRAIYDFEAAEDNELTFKAGEIITVLDDSDPNWWKGETHQGIGLFPSNFVTADLTAEPEMIKTEKKTVQFSDDVQVETIEPEPEPAFIDEDKMDQLLQMLQSTDPSDDQPDLPELLHLEGNVFTRWGPLPWMEKLGGFLXGKPFQELF

SEQ ID NO: 842985 - protein, 81 aa, Homo sapiens
LLKRLCKALGSESRKAQVQTSAVPGTSCAAQSIQDVRSDDEDYEEEEEEEEEEATKGKEMDCLKNGLGAERHLIPNGQHGH

SEQ ID NO: 842986 - protein, 383 aa, Homo sapiens
MFWTFKEWFWLERFWLPPTIKWSDLEDHDGLVFVKPSHLYVTIPYAFLLLIIRRVFEKFVASPLAKSFGIKETVRKVTPNTVLENFFKHSTRQPLQTDIYGLAKKCNLTERQVERWFRSRRNQERPSRLKKFQEACWRFAFYLMITVAGIAFLYDKPWLYDLWEVWNGYPKQPLLPSQYWYYILEMSFYWSLLFRLGFDVKRKDFLAHIIHHLAAISLMSFSWCANYIRSGTLVMIVHDVADIWLESAKMFSYAGWTQTCNTLFFIFSTIFFISRLIVFPFWILYCTLILPMYHLEPFFSYIFLNLQLMILQVLHLYWGYYILKMLNRCIFMKSIQDVRSDDEDYEEEEEEEEEEATKGKEMDCLKNGLGAERHLIPNGQHGH

SEQ ID NO: 842987 - protein, 383 aa, Homo sapiens; identical to SEQ ID NO: 842986

SEQ ID NO: 842988 - protein, 226 aa, Homo sapiens
MFWTFKEWFWLERFWLPPTIKWSDLEDHDGLVFVKPSHLYVTIPYAFLLLIIRRVFEKFVASPLAKSFGIKETVRKVTPNTVLENFFKHSTRQPLQTDIYGLAKKCNLTERQVERWFRSRRNQERPSRLKKFQEACWRFAFYLMITVAGIAFLYDKPWLYDLWEVWNGYPKQPLLPSQYWYYILEMSFYWSLLFRLGFDVKRKVSVLFTKLLYQFLQKLPSPCPKF

SEQ ID NO: 842989 - protein, 383 aa, Homo sapiens; identical to SEQ ID NO: 842986

SEQ ID NO: 842990 - protein, 383 aa, Homo sapiens; identical to SEQ ID NO: 842986

SEQ ID NO: 842991 - protein, 450 aa, Homo sapiens
EQRKRVSLSRPRPVYPRTPRPGLEALSPRSPARPPPRPAPARWAAMERWPWPSGGAWLLVAARALLQLLRSDLRLGRPLLAALALLAALDWLCQRLLPPPAALAVLAAAGWIALSRLARPQRLPVATRAVLITGCDSGFGKETAKKLDSMGFTVLATVLELNSPGAIELRTCCSPRLRLLQMDLTKPGDISRVLEFTKAHTTSTGLWGLVNNAGHNEVVADAELSPVATFRSCMEVNFFGALELTKGLLPLLRSSRGRIVTVGSPAGDMPYPCLGAYGTSKAAVALLMDTFSCELLPWGVKVSIIQPGCFKTESVRNVGQWEKRKQLLLANLPQELLQAYGKDYIEHLHGQFLHSLRLAMSDLTPVVDAITDALLAARPRRRYYPGQGLGLMYFIHYYLPEGLRRRFLQAFFISHCLPRALQPGQPGTTPPQDAAQDPNLSPGPSPAVAR

SEQ ID NO: 842992 - protein, 191 aa, Homo sapiens
PTPNPSAGDMPYPCLGAYGTSKAAVALLMDTFSCELLPWGVKVSIIQPGCFKTESVRNVGQWEKRKQLLLANLPQELLQAYGKDYIEHLHGQFLHSLRLAMSDLTPVVDAITDALLAARPRRRYYPGQGLGLMYFIHYYLPEGLRRRFLQAFFISHCLPRALQPGQPGTTPPQDAAQDPNLSPGPSPAVAR

SEQ ID NO: 842993 - protein, 164 aa, Homo sapiens
RVDLEDPEALSDGVLSASSSRVCFKTESVRNVGQWEKRKQLLLANLPQELLQAYGKDYIEHLHGQFLHSLRLAMSDLTPVVDAITDALLAARPRRRYYPGQGLGLMYFIHYYLPEGLRRRFLQAFFISHCLPRALQPGQPGTTPPQDAAQDPNLSPGPSPAVAR

SEQ ID NO: 842994 - protein, 450 aa, Homo sapiens; identical to SEQ ID NO: 842991

SEQ ID NO: 842995 - protein, 359 aa, Homo sapiens
SGDRVSTGWFLAVFLQAWRPRWCDQQRAPGCRLCVSSGVPNKRCDSGFGKETAKKLDSMGFTVLATVLELNSPGAIELRTCCSPRLRLLQMDLTKPGDISRVLEFTKAHTTSTGLWGLVNNAGHNEVVADAELSPVATFRSCMEVNFFGALELTKGLLPLLRSSRGRIVTVGSPAGDMPYPCLGAYGTSKAAVALLMDTFSCELLPWGVKVSIIQPGCFKTESVRNVGQWEKRKQLLLANLPQELLQAYGKDYIEHLHGQFLHSLRLAMSDLTPVVDAITDALLAARPRRRYYPGQGLGLMYFIHYYLPEGLRRRFLQAFFISHCLPRALQPGQPGTTPPQDAAQDPNLSPGPSPAVAR

SEQ ID NO: 842996 - protein, 149 aa, Homo sapiens
MPDSDLATPSPESVRNVGQWEKRKQLLLANLPQELLQAYGKDYIEHLHGQFLHSLRLAMSDLTPVVDAITDALLAARPRRRYYPGQGLGLMYFIHYYLPEGLRRRFLQAFFISHCLPRALQPGQPGTTPPQDAAQDPNLSPGPSPAVAR

SEQ ID NO: 842997 - protein, 144 aa, Homo sapiens
AGLLSACLAPARPCSARGALSPPGIPFTASLSIGGVSKDPFPLGMAQPGVSVKSLVSSYETRVVGMAPGLPRKRGCASSPCSPRGASPIRGTSGPPPHRGLGGPGQRPSTRRGMDKTLLSLILYCHSGSGSLVGIDNKIEQAMD

SEQ ID NO: 842998 - protein, 395 aa, Homo sapiens
MSGGKKKSSFQITSVTTDYEGPGSPGASDPPTPQPPTGPPPRLPNGEPSPDPGGKGTPRNGSPPPGAPSSRFRVVKLPHGLGEPYRRGRWTCVDVYERDLEPHSFGGLLEGIRGASGGAGGRSLDSRLELASLGLGAPTPPSGLSQGPTSWLRPPPTSPGPQARSFTGGLGQLVVPSKAKAEKPPLSASSPQQRPPEPETGESAGTSRAATPLPSLRVEAEAGGSGARTPPLSRRKAVDMRLRMELGAPEEMGQVPPLDSRPSSPALYFTHDASLVHKSPDPFGAVAAQKFSLAHSMLAISGHLDSDDDSGSGSLVGIDNKIEQAMDLVKSHLMFAVREEVEVLKEQIRELAERNAALEQENGLLRALASPEQLAQLPSSGVPRLGPPAPNGPSV

SEQ ID NO: 842999 - protein, 156 aa, Homo sapiens
MRLRMELGAPEEMGQVPPLDSRPSSPALYFTHDASLVHKSPDPFGAVAAQKFSLAHSMLAISGHLDSDDDSGSGSLVGIDNKIEQAMDLVKSHLMFAVREEVEVLKEQIRELAERNAALEQENGLLRALASPEQLAQLPSSGVPRLGPPAPNGPSV

SEQ ID NO: 843000 - protein, 212 aa, Homo sapiens
AGLLSACLAPARPCSARGALSPPGIPFTASLSIGGVSKDPFPLGMAQPGVSVKSLVSSYETRVVGMAPGLPRKRGCASSPCSPRGASPIRGTSGPPPHRGLGGPGQRPSTRRGMDKTLLSLILYCHSGSGSLVGIDNKIEQAMDLVKSHLMFAVREEVEVLKEQIRELAERNAALEQENGLLRALASPEQLAQLPSSGVPRLGPPAPNGPSV

SEQ ID NO: 843001 - protein, 243 aa, Homo sapiens
AGLLSACLAPARPCSARGALSPPGIPFTASLSIGGVSKDPFPLGMAQPGVSVKSLVSSYETRVVGMAPGLPRKRGCASSPCSPRGASPIRGTSGPPPHRGLGGPGQRPSTRRGMDKTLLSLILYCHRTGGCGREAVVQETSTWEGFSSPPLTFLCLSSGSGSLVGIDNKIEQAMDLVKSHLMFAVREEVEVLKEQIRELAERNAALEQENGLLRALASPEQLAQLPSSGVPRLGPPAPNGPSV

SEQ ID NO: 843002 - protein, 395 aa, Homo sapiens; identical to SEQ ID NO: 842998

SEQ ID NO: 843003 - protein, 310 aa, Homo sapiens
MSGGKKKSSFQITSVTTDYEGPGSPGASDPPTPQPPTGPPPRLPNGEPSPDPGGKGTPRNGSPPPGAPSSRFRVVKLPHGLGEPYRRGRWTCVDVYERDLEPHSFGGLLEGIRGASGGAGGRSLDSRLELASLGLGAPTPPSGLSQGPTSWLRPPPTSPGPQARSFTGGLGQLVVPSKAKAEKPPLSASSPQQRPPEPETGESAGTSRAATPLPSLRVEAEAGGSGARTPPLSRRKAVDMRLRMELGAPEEMGQVPPLDSRPSSPALYFTHDASLVHKSPDPFGAVAAQKFSLAHSMLAISGHLDSDDDR

SEQ ID NO: 843004 - protein, 310 aa, Homo sapiens; identical to SEQ ID NO: 843003

SEQ ID NO: 843005 - protein, 144 aa, Homo sapiens
  misc_feature (5)..(5): Xaa can be any naturally occurring amino acid
MNRVXAGVRPEFWDPGEPRSGDTDPAGSRGRRLGTPTRWLPPGAEGGSAAPSHISLQTLGASEAAPRLLGGGAGFFFSGEQTFLGDAWQDEPRPPERTGQPLIAACVPRHCPWPGGPRERTARPLRRRDPQAQISGRGPRGAPT

SEQ ID NO: 843006 - protein, 395 aa, Homo sapiens; identical to SEQ ID NO: 842998

SEQ ID NO: 843007 - protein, 395 aa, Homo sapiens; identical to SEQ ID NO: 842998

SEQ ID NO: 843008 - protein, 382 aa, Homo sapiens [sequence omitted]

SEQ ID NO: 843009 - protein, 144 aa, Homo sapiens; identical to SEQ ID NO: 843005
  misc_feature (5)..(5): Xaa can be any naturally occurring amino acid

SEQ ID NO: 843010 - protein, 230 aa, Homo sapiens
AGLLSACLAPARPCSARGALSPPGIPFTASLSIGGVSKDPFPLGMAQPGVSVKSLVSSYETRVVGMAPGLPRKRGCASSPCSPRGASPIRGTSGPPPHRGLGGPGQRPSTRRGMDKTLLSLILYCHRTGGCGREAVVQETSTWEGFSSPPLTFLCLSSGSGSLVGIDNKIEQAMVREAILVPGGPGPLKPSLCPSPVLFLTREHQLPAPPSLSLLGCWASSAPSCHHLHP

SEQ ID NO: 843011 - protein, 395 aa, Homo sapiens; identical to SEQ ID NO: 842998

SEQ ID NO: 843012 - protein, 313 aa, Homo sapiens
MSGGKKKSSFQITSVTTDYEGPGSPGASDPPTPQPPTGPPPRLPNGEPSPDPGGKGTPRNGSPPPGAPSSRFRVVKLPHGLGEPYRRGRWTCVDVYERDLEPHSFGGLLEGIRGASGGAGGRSLDSRLELASLGLGAPTPPSGLSQGPTSWLRPPPTSPGPQARSFTGGLGQLVVPSKAKAEKPPLSASSPQQRPPEPETGESAGTSRAATPLPSLRVEAEAGGSGARTPPLSRRKAVDMRLRMELGAPEEMGQVPPLDSRPSSPALYFTHDASLVHKSPDPFGAVAAQKFSLAHSMLAISGHLDSDDDSGYR

SEQ ID NO: 843013 - protein, 682 aa, Homo sapiens
MGKKYKNIVLLKGLEVINDYHFRMVKSLLSNDLKLNLKMREEYDKIQIADLMEEKFRGDAGLGKLIKIFEDIPTLEDLAETLKKEKLKVKGPALSRKRKKEVDATSPAPSTSSTVKTEGAEATPGAQKRKKSTKEKAGPKGSKVSEEQTQPPSPAGAGMSTAMGRSPSPKTSLSAPPNTSSTENPKTVAKCQVTPRRNVLQKRPVIVKVLSTTKPFEYETPEMEKKIMFHATVATQTQFFHVKVLNTSLKEKFNGKKIIIISDYLEYDSLLEVNEESTVSEAGPNQTFEVPNKIINRAKETLKIDILHKQASGNIVYGVFMLHKKTVNQKTTIYEIQDDRGKMDVVGTGQCHNIPCEEGDKLQLFCFRLRKKNQMSKLISEMHSFIQIKKKTNPRNNDPKSMKLPQEQSQLPNPSEASTTFPESHLRTPQMPPTTPSSSFFTKKSEDTISKMNDFMRMQILKEGSHFPGPFMTSIGPAESHPHTPQMPPSTPSSSFLTTLKPRLKTEPEEVSIEDSAQSDLKEVMVLNATESFVYEPKEQKKMFHATVATENEVFRVKVFNIDLKEKFTPKKIIAIANYVCRNGFLEVYPFTLVADVNADRNMEIPKGLIRSASVTPKINQLCSQTKGSFVNGVFEVHKVSPHHCFIKFLLQPPIFKVLTCQLEFGQLTQHRKSTPSPFPQH

SEQ ID NO: 843014 - protein, 215 aa, Homo sapiens
MANNYKKIVLLKGLEVINDYHFRIVKSLLSNDLKLNPKMKEEYDKIQIADLMEEKFPGDAGLGKLIEFFKEIPTLGDLAETLKREKLKVANKIESIPVKGIIPSKKTKQKEVYPATPACTPSNRLTAKGAEETLGPQKRKKPSEEETGTKRSKMSKEQTRPSCSAGASTSTAMGRSPPPQTSSSAPPNTSSTESLKPLANRHATASKNIFREDPI

SEQ ID NO: 843015 - protein, 206 aa, Homo sapiens
MANNYKKIVLLKGLEVINDYHFRIVKSLLSNDLKLNPKMKEEYDKIQIADLMEEKFPGDAGLGKLIEFFKEIPTLGDLAETLKREKLKVKGIIPSKKTKQKEVYPATPACTPSNRLTAKGAEETLGPQKRKKPSEEETGTKRSKMSKEQTRPSCSAGASTSTAMGRSPPPQTSSSAPPNTSSTESLKPLANRHATASKNIFREDPI

SEQ ID NO: 843016 - protein, 708 aa, Homo sapiens
MGKKYKNIVLLKGLEVINDYHFRMVKSLLSNDLKLNLKMREEYDKIQIADLMEEKFRGDAGLGKLIKIFEDIPTLEDLAETLKKEKLKVKGPALSRKRKKEVDATSPAPSTSSTVKTEGAEATPGAQKRKKSTKEKAGPKGSKVSEEQTQPPSPAGAGMSTAMGRSPSPKTSLSAPPNTSSTENPKTVAKCQVTPRRNVLQKRPVIVKVLSTTKPFEYETPEMEKKIMFHATVATQTQFFHVKVLNTSLKEKFNGKKIIIISDYLEYDSLLEVNEESTVSEAGPNQTFEVPNKIINRAKETLKIDILHKQASGNIVYGVFMLHKKTVNQKTTIYEIQDDRGKMDVVGTGQCHNIPCEEGDKLQLFCFRLRKKNQMSKLISEMHSFIQSQLPNPSEASTTFPESHLRTPQMPPTTPSSSFFTKKSEDTISKMNDFMRMQILKEGSHFPGPFMTSIGPAESHPHTPQMPPSTPSSSFLTTLKPRLKTEPEEVSIEDSAQSDLKEVMVLNATESFVYEPKEQKKMFHATVATENEVFRVKVFNIDLKEKFTPKKIIAIANYVCRNGFLEVYPFTLVADVNADRNMEIPKGLIRSASVTPKINQLCSQTKGSFVNGVFEVHKKNVRGEFTYYEIQDNTGKMEVVVHGRLTTINCEEGDKLKLTCFELAPKSGNTGELRSVIHSHIKVIKTRKNKKDILNPDSSMETSPDFFF

SEQ ID NO: 843017 - protein, 729 aa, Homo sapiens
MGKKYKNIVLLKGLEVINDYHFRMVKSLLSNDLKLNLKMREEYDKIQIADLMEEKFRGDAGLGKLIKIFEDIPTLEDLAETLKKEKLKVKGPALSRKRKKEVDATSPAPSTSSTVKTEGAEATPGAQKRKKSTKEKAGPKGSKVSEEQTQPPSPAGAGMSTAMGRSPSPKTSLSAPPNTSSTENPKTVAKCQVTPRRNVLQKRPVIVKVLSTTKPFEYETPEMEKKIMFHATVATQTQFFHVKVLNTSLKEKFNGKKIIIISDYLEYDSLLEVNEESTVSEAGPNQTFEVPNKIINRAKETLKIDILHKQASGNIVYGVFMLHKKTVNQKTTIYEIQDDRGKMDVVGTGQCHNIPCEEGDKLQLFCFRLRKKNQMSKLISEMHSFIQIKKKTNPRNNDPKSMKLPQEQSQLPNPSEASTTFPESHLRTPQMPPTTPSSSFFTKKSEDTISKMNDFMRMQILKEGSHFPGPFMTSIGPAESHPHTPQMPPSTPSSSFLTTLKPRLKTEPEEVSIEDSAQSDLKEVMVLNATESFVYEPKEQKKMFHATVATENEVFRVKVFNIDLKEKFTPKKIIAIANYVCRNGFLEVYPFTLVADVNADRNMEIPKGLIRSASVTPKINQLCSQTKGSFVNGVFEVHKKNVRGEFTYYEIQDNTGKMEVVVHGRLTTINCEEGDKLKLTCFELAPKSGNTGELRSVIHSHIKVIKTRKNKKDILNPDSSMETSPDFFF

SEQ ID NO: 843018 - protein, 729 aa, Homo sapiens; identical to SEQ ID NO: 843017

SEQ ID NO: 843019 - protein, 670 aa, Homo sapiens
CIETASAVGDRLYVFLFSALVGNKIESIPVKGPALSRKRKKEVDATSPAPSTSSTVKTEGAEATPGAQKRKKSTKEKAGPKGSKVSEEQTQPPSPAGAGMSTAMGRSPSPKTSLSAPPNTSSTENPKTVAKCQVTPRRNVLQKRPVIVKVLSTTKPFEYETPEMEKKIMFHATVATQTQFFHVKVLNTSLKEKFNGKKIIIISDYLEYDSLLEVNEESTVSEAGPNQTFEVPNKIINRAKETLKIDILHKQASGNIVYGVFMLHKKTVNQKTTIYEIQDDRGKMDVVGTGQCHNIPCEEGDKLQLFCFRLRKKNQMSKLISEMHSFIQIKKKTNPRNNDPKSMKLPQEQSQLPNPSEASTTFPESHLRTPQMPPTTPSSSFFTKKSEDTISKMNDFMRMQILKEGSHFPGPFMTSIGPAESHPHTPQMPPSTPSSSFLTTLKPRLKTEPEEVSIEDSAQSDLKEVMVLNATESFVYEPKEQKKMFHATVATENEVFRVKVFNIDLKEKFTPKKIIAIANYVCRNGFLEVYPFTLVADVNADRNMEIPKGLIRSASVTPKINQLCSQTKGSFVNGVFEVHKKNVRGEFTYYEIQDNTGKMEVVVHGRLTTINCEEGDKLKLTCFELAPKSGNTGELRSVIHSHIKVIKTRKNKKDILNPDSSMETSPDFFF

SEQ ID NO: 843020 - protein, 328 aa, Homo sapiens [sequence omitted]

SEQ ID NO: 843021 - protein, 707 aa, Homo sapiens
MGKKYKNIVLLKGLEVINDYHFRMVKSLLSNDLKLNLKMREEYDKIQIADLMEEKFRGDAGLGKLIKIFEDIPTLEDLAETLKKEKLKVKGPALSRKRKKEVDATSPAPSTSSTVKTEGAEATPGAQKRKKSTKEKAGPKGSKVSEEQTQPPSPAGAGMSTAMGRSPSPKTSLSAPPNTSSTENPKTVAKCQVTPRRNVLQKRPVIVKVLSTTKPFEYETPEMEKKIMFHATVATQTQFFHVKVLNTSLKEKFNGKKIIIISDYLEYDSLLEVNEESTVSEAGPNQTFEVPNKIINRAKETLKIDILHKQASGNIVYGVFMLHKKTVNQKTTIYEIQDDRGKMDVVGTGQCHNIPCEEGDKLQLFCFRLRKKNQMSKLISEMHSFIQIKKKTNPRNNDPKSMKLPQEQSQLPNPSEASTTFPESHLRTPQMPPTTPSSSFFTKKSEDTISKMNDFMRMQILKEGSHFPGPFMTSIGPAESHPHTPQMPPSTPSSSFLTTLKPRLKTEPEEVSIEDSAQSDLKEVMVLNATESFVYEPKEQKKMFHATVATENEVFRVKVFNIDLKEKFTPKKIIAIANYVCRNGFLEVYPFTLVADVNADRNMEIPKGLIRSASVTPKINQLCSQTKGSFVNGVFEVHKKNVRGEFTYYEIQDNTGKMEVVVHGRLTTINCEEGDKLKLTCFELAPKSGNTGELRSVIHSHIKVGTL

SEQ ID NO: 843022 - protein, 682 aa, Homo sapiens; identical to SEQ ID NO: 843013

SEQ ID NO: 843023 - protein, 513 aa, Homo sapiens [sequence omitted]

SEQ ID NO: 843024 - protein, 387 aa, Homo sapiens
MGKKYKNIVLLKGLEVINDYHFRMVKSLLSNDLKLNLKMREEYDKIQIADLMEEKFRGDAGLGKLIKIFEDIPTLEDLAETLKKEKLKVKGPALSRKRKKEVDATSPAPSTSSTVKTEGAEATPGAQKRKKSTKEKAGPKGSKVSEEQTQPPSPAGAGMSTAMGRSPSPKTSLSAPPNTSSTENPKTVAKCQVTPRRNVLQKRPVIVKVLSTTKPFEYETPEMEKKIMFHATVATQTQFFHVKVLNTSLKEKFNGKKIIIISDYLEYDSLLEVNEESTVSEAGPNQTFEVPNKIINRAKETLKIDILHKQASGNIVYGVFMLHKKTVNQKTTIYEIQDDRGKMDVVGTGQCHNIPCEEGDKLQLFCFRLRKKNQMSKLISEMHSFIQ

SEQ ID NO: 843025 - protein, 223 aa, Homo sapiens [sequence omitted]

SEQ ID NO: 843026 - protein, 121 aa, Homo sapiens
MGKKYKNIVLLKGLEVINDYHFRMVKSLLSNDLKLNLKMREEYDKIQIADLMEEKFRGDAGLGKLIKIFEDIPTLEDLAETLKKEKLKVPGYIATRGIYMMDLYRICAAPSFKQLSFNIRN

SEQ ID NO: 843027 - protein, 729 aa, Homo sapiens; identical to SEQ ID NO: 843017

SEQ ID NO: 843028 - protein, 148 aa, Homo sapiens
MGKKYKNIVLLKGLEVINDYHFRMVKSLLSNDLKLNLKMREEYDKIQIADLMEEKFRGDAGLGKLIKIFEDIPTLEDLAETLKKEKLKVKGPALSRKRKKEVDATSPAPSTSSTVKTEGAEATPGAQKKQQKQQKPFWALGASERFLN

SEQ ID NO: 843029 - protein, 673 aa, Homo sapiens
MGKKYKNIVLLKGLEVINDYHFRMVKSLLSNDLKLNLKMREEYDKIQIADLMEEKFRGDAGLGKLIKIFEDIPTLEDLAETLKKEKLKVKGPALSRKRKKEVDATSPAPSTSSTVKTEGAEATPGAQKRKKSTKEKAGPKGSKVSEEQTQPPSPAGAGMSTAMGRSPSPKTSLSAPPNTSSTENPKTVAKCQVTPRRNVLQKRPVIVKVLSTTKPFEYETPEMEKKIMFHATVATQTQFFHVKVLNTSLKEKFNGKKIIIISDYLEYDSLLEVNEESTVSEAGPNQTFEVPNKIINRAKETLKIDILHKQASGNIVYGVFMLHKKTVNQKTTIYEIQDDRGKMDVVGTGQCHNIPCEEGDKLQLFCFRLRKKNQMSKLISEMHSFIQIKKKTNPRNNDPKSMKLPQEQSQLPNPSEASTTFPESHLRTPQMPPTTPSSSFFTKLKPRLKTEPEEVSIEDSAQSDLKEVMVLNATESFVYEPKEQKKMFHATVATENEVFRVKVFNIDLKEKFTPKKIIAIANYVCRNGFLEVYPFTLVADVNADRNMEIPKGLIRSASVTPKINQLCSQTKGSFVNGVFEVHKKNVRGEFTYYEIQDNTGKMEVVVHGRLTTINCEEGDKLKLTCFELAPKSGNTGELRSVIHSHIKVIKTRKNKKDILNPDSSMETSPDFFF

SEQ ID NO: 843030 - protein, 729 aa, Homo sapiens; identical to SEQ ID NO: 843017

SEQ ID NO: 843031 - protein, 785 aa, Homo sapiens
MGKKYKNIVLLKGLEVINDYHFRMVKSLLSNDLKLNLKMREEYDKIQIADLMEEKFRGDAGLGKLIKIFEDIPTLEDLAETLKKEKLKVKGPALSRKRKKEVDATSPAPSTSSTVKTEGAEATPGAQKRKKSTKEKAGPKGSKVSEEQTQPPSPAGAGMSTAMGRSPSPKTSLSAPPNTSSTENPKTVAKCQVTPRRNVLQKRPVIVKVLSTTKPFEYETPEMEKKIMFHATVATQTQFFHVKVLNTSLKEKFNGKKIIIISDYLEYDSLLEVNEESTVSEAGPNQTFEVPNKIINRAKETLKIDILHKQASGNIVYGVFMLHKKTVNQKTTIYEIQDDRGKMDVVGTGQCHNIPCEEGDKLQLFCFRLRKKNQMSKLISEMHSFIQIKKKTNPRNNDPKSMKLPQEQSQLPNPSEASTTFPESHLRTPQMPPTTPSSSFFTKKSEDTISKMNDFMRMQILKEGSHFPGPFMTSIGPAESHPHTPQMPPSTPSSSFLTTKSEDTISKMNDFMRMQILKEGSHFPGPFMTSIGPAESHPHTPQMPPSTPSSSFLTTLKPRLKTEPEEVSIEDSAQSDLKEVMVLNATESFVYEPKEQKKMFHATVATENEVFRVKVFNIDLKEKFTPKKIIAIANYVCRNGFLEVYPFTLVADVNADRNMEIPKGLIRSASVTPKINQLCSQTKGSFVNGVFEVHKKNVRGEFTYYEIQDNTGKMEVVVHGRLTTINCEEGDKLKLTCFELAPKSGNTGELRSVIHSHIKVIKTRKNKKDILNPDSSMETSPDFFF

SEQ ID NO: 843032 - protein, 387 aa, Homo sapiens [sequence omitted]

SEQ ID NO: 843033 - protein, 214 aa, Homo sapiens
MANNYKKIVLLKGLEVINDYHFRIVKSLLSNDLKLNPKMKEEYDKIQIADLMEEKFPGDAGLGKLIEFFKEIPTLGDLAETLKREKLKVKGIIPSKKTKQKEVYPATPACTPSNRLTAKGAEETLGPQVSFRKRSRLQVSQWKLCCGCSTQSVQQAVISSYVSHQVSDLSNYIIIDHLSARQQVKRFSKHNVNIHKINIIFSSPIEKDVNLRVR

SEQ ID NO: 843034 - protein, 80 aa, Homo sapiens
ASGLAVSGEWDPIPWGYVGEVGGCSCRGFLLVSSRNGGGARCGWANPGSPRTLRSARQGARACQGRRAGVNVASVGLQPR

SEQ ID NO: 843035 - protein, 80 aa, Homo sapiens; identical to SEQ ID NO: 843034

SEQ ID NO: 843036 - protein, 80 aa, Homo sapiens; identical to SEQ ID NO: 843034

SEQ ID NO: 843037 - protein, 80 aa, Homo sapiens; identical to SEQ ID NO: 843034

SEQ ID NO: 843038 - protein, 80 aa, Homo sapiens; identical to SEQ ID NO: 843034

SEQ ID NO: 843039 - protein, 80 aa, Homo sapiens; identical to SEQ ID NO: 843034

SEQ ID NO: 843040 - protein, 99 aa, Homo sapiens
MRPLTLPSGSALRVPRDPYALPLVSWAQVVPRAVLAAPIRGPLCPMLRAPTSVSVSHTLRLNVSTVPWVPVPRLASWVCSSRISCATSVLVALFPQSIR

SEQ ID NO: 843041 - protein, 36 aa, Homo sapiens
HSRFFTPSFYLTVDPPSQAPNLSAASTHPAPATQWP

SEQ ID NO: 843042 - protein, 80 aa, Homo sapiens
MTLNGLFRPIPYVTAASADEATASQQPPQAQLHRYNGLFRPSSCLPAFSPGPELSQVDLTRPSSCFFAASPGPAPASWWP

SEQ ID NO: 843043 - protein, 119 aa, Homo sapiens
LPRTWTTNGTKGALGKKPGRPEKGCATQQGNWSLEENAGRLRREKKRAGHRGETDRREPERAEREAGRNRLYKWINLVNSENCSFHRLTQSCESSSPRRHHICFYHVPQQFQCSTTSVS

SEQ ID NO: 843044 - protein, 195 aa, Homo sapiens
LFNVMATPRGRTKKKASFDHSPDSLPLRSSGRQAKKKATETTDEDEDGGSEKKYRKCEKAGCTATCPVCFASASERCAKNGYTSRWYHLSCGEHFCNECFDHYYRSHKDGYDKYTTWKKIWTSNGKTEPSPKAFMADQQLPYWVQCTKPECRKWRQLTKEIQLTPQIAKTYRCGMKPNTAIKPETSDHCSLPEDL

SEQ ID NO: 843045 - protein, 202 aa, Homo sapiens
LFNVMATPRGRTKKKASFDHSPDSLPLRSSGRQAKKKATETTDEDEDGGSEKKYRKCEKAGCTATCPVCFASASERCAKNGYTSRWYHLSCGEHFCNECFDHYYRSHKDGYDKYTTWKKIWTSNGKTEPSPKAFMADQQLPYWVQCTKPECRKWRQLTKEIQLTPQIAKTYRCGMKPNTAIKRRGFAVLPRVRPLIDSGTQL

SEQ ID NO: 843046 - protein, 88 aa, Homo sapiens
QLGPQQRALYRDVMLENYGNVASLGFPVPKPELISQLEQGKELWVLNLLGAEEPDILKSCQKDSEVGTKKELSILNQKFSEEVKTPEF

SEQ ID NO: 843047 - protein, 698 aa, Homo sapiens
MQAHELFRYFRMPELVDFRQYVRTLPTNTLMGFGAFAALTTFWYATRPKPLKPPCDLSMQSVEVAGSGGARRSALLDSDEPLVYFYDDVTTLYEGFQRGIQVSNNGPCLGSRKPDQPYEWLSYKQVAELSECIGSALIQKGFKTAPDQFIGIFAQNRPEWVIIEQGCFAYSMVIVPLYDTLGNEAITYIVNKAELSLVFVDKPEKAKLLLEGVENKLIPGLKIIVVMDAYGSELVERGQRCGVEVTSMKAMEDLGRANRRKPKPPAPEDLAVICFTSGTTGNPKGAMVTHRNIVSDCSAFVKATENTVNPCPDDTLISFLPLAHMFERVVECVMLCHGAKIGFFQGDIRLLMDDLKVLQPTVFPVVPRLLNRMFDRIFGQANTTLKRWLLDFASKRKEAELRSGIIRNNSLWDRLIFHKVQSSLGGRVRLMVTGAAPVSATVLTFLRAALGCQFYEGYGQTECTAGCCLTMPGDWTAGHVGAPMPCNLIKLVDVEEMNYMAAEGEGEVCVKGPNVFQGYLKDPAKTAEALDKDGWLHTGDIGKWLPNGTLKIIDRKKHIFKLAQGEYIAPEKIENIYMRSEPVAQVFVHGESLQAFLIAIVVPDVETLCSWAQKRGFEGSFEELCRNKDVKKAILEDMVRLGKDSGLKPFEQVKGITLHPELFSIDNGLLTPTMKAKRPELRNYFRSQIDDLYSTIKV

SEQ ID NO: 843048 - protein, 592 aa, Homo sapiens
RARYRLHLCLNPMNVSYKQVAELSECIGSALIQKGFKTAPDQFIGIFAQNRPEWVIIEQGCFAYSMVIVPLYDTLGNEAITYIVNKAELSLVFVDKPEKAKLLLEGVENKLIPGLKIIVVMDAYGSELVERGQRCGVEVTSMKAMEDLGRANRRKPKPPAPEDLAVICFTSGTTGNPKGAMVTHRNIVSDCSAFVKATENTVNPCPDDTLISFLPLAHMFERVVECVMLCHGAKIGFFQGDIRLLMDDLKVLQPTVFPVVPRLLNRMFDRIFGQANTTLKRWLLDFASKRKEAELRSGIIRNNSLWDRLIFHKVQSSLGGRVRLMVTGAAPVSATVLTFLRAALGCQFYEGYGQTECTAGCCLTMPGDWTAGHVGAPMPCNLIKLVDVEEMNYMAAEGEGEVCVKGPNVFQGYLKDPAKTAEALDKDGWLHTGDIGKWLPNGTLKIIDRKKHIFKLAQGEYIAPEKIENIYMRSEPVAQVFVHGESLQAFLIAIVVPDVETLCSWAQKRGFEGSFEELCRNKDVKKAILEDMVRLGKDSGLKPFEQVKGITLHPELFSIDNGLLTPTMKAKRPELRNYFRSQIDDLYSTIKV

SEQ ID NO: 843049 - protein, 680 aa, Homo sapiens
MQAHELFRYFRMPELVDFRQYVRTLPTNTLMGFGAFAALTTFWYATRPKPLKPPCDLSMQSVEVAGSGGARRSALLDSDEPLVYFYDDVTTLYEGFQRGIQVSNNGPCLGSRKPDQPYEWLSYKQVAELSECIGSALIQKGFKTAPDQFIGIFAQNRPEWVIIEQGCFAYSMVIVPLYDTLGNEAITYIVNKAELSLVFVDKPEKAKLLLEGVENKLIPGLKIIVVMDAYGSELVERGQRCGVEVTSMKAMEDLGRANRRKPKPPAPEDLAVICFTSGTTGNPKGAMVTHRNIVSDCSAFVKATENTVNPCPDDTLISFLPLAHMFERVVECVMLCHGVLQPTVFPVVPRLLNRMFDRIFGQANTTLKRWLLDFASKRKEAELRSGIIRNNSLWDRLIFHKVQSSLGGRVRLMVTGAAPVSATVLTFLRAALGCQFYEGYGQTECTAGCCLTMPGDWTAGHVGAPMPCNLIKLVDVEEMNYMAAEGEGEVCVKGPNVFQGYLKDPAKTAEALDKDGWLHTGDIGKWLPNGTLKIIDRKKHIFKLAQGEYIAPEKIENIYMRSEPVAQVFVHGESLQAFLIAIVVPDVETLCSWAQKRGFEGSFEELCRNKDVKKAILEDMVRLGKDSGLKPFEQVKGITLHPELFSIDNGLLTPTMKAKRPELRNYFRSQIDDLYSTIKV

SEQ ID NO: 843050 - protein, 412 aa, Homo sapiens [sequence omitted]

SEQ ID NO: 843051 - protein, 698 aa, Homo sapiens; identical to SEQ ID NO: 843047

SEQ ID NO: 843052 - protein, 698 aa, Homo sapiens; identical to SEQ ID NO: 843047

SEQ ID NO: 843053 - protein, 698 aa, Homo sapiens; identical to SEQ ID NO: 843047

SEQ ID NO: 843054 - protein, 388 aa, Homo sapiens
MQAHELFRYFRMPELVDFRQYVRTLPTNTLMGFGAFAALTTFWYATRPKPLKPPCDLSMQSVEVAGSGGARRSALLDSDEPLVYFYDDVTTLYEGFQRGIQVSNNGPCLGSRKPDQPYEWLSYKQVAELSECIGSALIQKGFKTAPDQFIGIFAQNRPEWVIIEQGCFAYSMVIVPLYDTLGNEAITYIVNKAELSLVFVDKPEKAKLLLEGVENKLIPGLKIIVVMDAYGSELVERGQRCGVEVTSMKAMEDLGRANRRKPKPPAPEDLAVICFTSGTTGNPKGAMVTHRNIVSDCSAFVKATENTVNPCPDDTLISFLPLAHMFERVVECVMLCHGAKIGFFQGDIRLLMDDLKVLQPTVFPVVPRLLNRMFDRVSSKQRSPRTEH

SEQ ID NO: 843055 - protein, 160 aa, Homo sapiens
MQAHELFRYFRMPELVDFRQYVRTLPTNTLMGFGAFAALTTFWYATRPKPLKPPCDLSMQSVEVAGSGGARRSALLDSDEPLVYFYDDVTTLYEGFQRGIQVSNNGPCLGSRKPDQPYEWLSYKQVAELSECIGSALIQKGFKTAPDQFIGIFAQNRPEV

SEQ ID NO: 843056 - protein, 698 aa, Homo sapiens; identical to SEQ ID NO: 843047

SEQ ID NO: 843057 - protein, 698 aa, Homo sapiens; identical to SEQ ID NO: 843047

SEQ ID NO: 843058 - protein, 527 aa, Homo sapiens
MVIVPLYDTLGNEAITYIVNKAELSLVFVDKPEKAKLLLEGVENKLIPGLKIIVVMDAYGSELVERGQRCGVEVTSMKAMEDLGRANRRKPKPPAPEDLAVICFTSGTTGNPKGAMVTHRNIVSDCSAFVKATENTVNPCPDDTLISFLPLAHMFERVVECVMLCHGAKIGFFQGDIRLLMDDLKVLQPTVFPVVPRLLNRMFDRIFGQANTTLKRWLLDFASKRKEAELRSGIIRNNSLWDRLIFHKVQSSLGGRVRLMVTGAAPVSATVLTFLRAALGCQFYEGYGQTECTAGCCLTMPGDWTAGHVGAPMPCNLIKLVDVEEMNYMAAEGEGEVCVKGPNVFQGYLKDPAKTAEALDKDGWLHTGDIGKWLPNGTLKIIDRKKHIFKLAQGEYIAPEKIENIYMRSEPVAQVFVHGESLQAFLIAIVVPDVETLCSWAQKRGFEGSFEELCRNKDVKKAILEDMVRLGKDSGLKPFEQVKGITLHPELFSIDNGLLTPTMKAKRPELRNYFRSQIDDLYSTIKV

SEQ ID NO: 843059 - protein, 680 aa, Homo sapiens
MQAHELFRYFRMPELVDFRQYVRTLPTNTLMGFGAFAALTTFWYATRPKPLKPPCDLSMQSVEVAGSGGARRSALLDSDEPLVYFYDDVTTLYEGFQRGIQVSNNGPCLGSRKPDQPYEWLSYKQVAELSECIGSALIQKGFKTAPDQFIGIFAQNRPEWVIIEQGCFAYSMVIVPLYDTLGNEAITYIVNKAELSLVFVDKPEKAKLLLEGVENKLIPGLKIIVVMDAYGSELVERGQRCGVEVTSMKAMEDLGRANRRKPKPPAPEDLAVICFTSGTTGNPKGAMVTHRNIVSDCSAFVKATENTVNPCPDDTLISFLPLAHMFERVVECVMLCHGAKIGFFQGDIRLLMDDLKVLQPTVFPVVPRLLNRMFDRIFGQANTTLKRWLLDFASKRKEAELRSGIIRNNSLWDRLIFHKVQSSLGGRVRLMVTGAAPVSATVLTFLRAALGCQFYEGYGQTECTAGCCLTMPGDWTAGHVGAPMPCNLIKLVDVEEMNYMAAEGEGEVCVKGPNVFQGYLKDPAKTAEALDKDGWLHTGDIGKWLPNGTLKIIDRKKHIFKLAQGEYIAPEKIENIYMRSEPVAQVFVHGESLQAFLIAIVVPDVETLCSWAQKRGFEGSFEELCRNKDVKKAILEDMVRLGKDSGLKPFEQVKGITLHPELFSIDNGLLTPTMKANIKV

SEQ ID NO: 843060 - protein, 698 aa, Homo sapiens; identical to SEQ ID NO: 843047

SEQ ID NO: 843061 - protein, 316 aa, Homo sapiens [sequence omitted]

SEQ ID NO: 843062 - protein, 121 aa, Homo sapiens
RWLAGGILEFWRGVLLPWNERDIFLSQTEFSLENYQHRTMQAHELFRYFRMPELVDFRQYVRTLPTNTLMGFGAFAALTTFWYATRPKPLKPPCDLSMQSVEVAVSGGPSLPRAFSPHFPR

SEQ ID NO: 843063 - protein, 837 aa, Homo sapiens
MPFQKHVYYPLASGPEGPDVAVAAAAAGAASMACAPPSAASGPLPFFQFRPRLESVDWRRLSAIDVDKVAGAVDVLTLQENIMNITFCKLEDEKCPHCQSGVDPVLLKLIRLAQFTIEYLLHSQEFLTSQLHTLEERLRLSHCDGEQSKKLLTKQAGEIKTLKEECKRRKKMISTQQLMIEAKANYYQCHFCDKAFMNQAFLQSHIQRRHTEENSHFEYQKNAQIEKLRSEIVVLKEELQLTRSELEAAHHASAVRFSKEYEMQKTKEEDFLKLFDRWKEEEKEKLVDEMEKVKEMFMKEFKELTSKNSALEYQLSEIQKSNMQIKSNIGTLKDAHEFKEDRSPYPQDFHNVMQLLDSQESKWTARVQAIHQEHKKEKGRLLSHIEKLRTSMIDDLNASNVFYKKRIEELGQRLQEQNELIITQRQQIKDFTCNPLNSISEPKVNAPALHTLETKSSLPMVHEQAFSSHILEPIEELSEEEKGRENEQKLNNNKMHLRKALKSNSSLTKGLRTMVEQNLMEKLETLGINADIRGISSDQLHRVLKSVESERHKQEREIPNFHQIREFLEHQVSCKIEEKALLSSDQCSVSQMDTLSTGEVPKMIQLPSKNRQLIRQKAVSTDRTSVPKIKKNVMEDPFPRKSSTITTPPFSSEEEQEDDDLIRAYASPGPLPVPPPQNKGSFGKNTVKSDADGTEGSEIEDTDDSPKPAGVAVKTPTEKVEKMFPHRKNVNKPVGGTNVPEMFIKKEELQELKCADVEDEDWDISSLEEEISLGKKSGKEQKEPPPAKNEPHFAHVLNAWGAFNPKGPKGEGLQENESSTLKSSLVTVTDWSDTSDV

SEQ ID NO: 843064 - protein, 216 aa, Homo sapiens
MPFQKHVYYPLASGPEGPDVAVAAAAAGAASMACAPPSAASGPLPFFQFRPRLESVDWRRLSAIDVDKVAGAVDVLTLQENIMNITFCKLEDEKCPHCQSGVDPVLLKLIRLAQFTIEYLLHSQEFLTSQLHTLEERLRLSHCDGEQSKKLLTKQAGEIKTLKEECKRRKKMISTQQLMIEAKANYYQDCQNDLSYPEGPRVLHFFNSIKFERHIG

SEQ ID NO: 843065 - protein, 664 aa, Homo sapiens
MWHETSNRIPSKRTVSFVLSTGLYPISFQVHLVRDGVLTRFSVATEYQKNAQIEKLRSEIVVLKEELQLTRSELEAAHHASAVRFSKEYEMQKTKEEDFLKLFDRWKEEEKEKLVDEMEKVKEMFMKEFKELTSKNSALEYQLSEIQKSNMQIKSNIGTLKDAHEFKEDRSPYPQDFHNVMQLLDSQESKWTARVQAIHQEHKKEKGRLLSHIEKLRTSMIDDLNASNVFYKKRIEELGQRLQEQNELIITQRQQIKDFTCNPLNSISEPKGNPLAWQAFESQPAAPAVPMNAPALHTLETKSSLPMVHGRENEQKLNNNKMHLRKALKSNSSLTKGLRTMVEQNLMEKLETLGINADIRGISSDQLHRVLKSVESERHKQEREIPNFHQIREFLEHQVSCKIEEKALLSSDQCSVSQMDTLSTGEVPKMIQLPSKNRQLIRQKAVSTDRTSVPKIKKNVMEDPFPRKSSTITTPPFSSEEEQEDDDLIRAYASPGPLPVPPPQNKGSFGKNTVKSDADGTEGSEIEDTDDSPKPAGVAVKTPTEKVEKMFPHRKNVNKPVGGTNVPEMFIKKEELQELKCADVEDEDWDISSLEEEISLGKKSGKEQKEPPPAKNEPHFAHVLNAWGAFNPKGPKGEGLQENESSTLKSSLVTVTDWSDTSDV

SEQ ID NO: 843066 - protein, 836 aa, Homo sapiens
MPFQKHVYYPLASGPEGPDVAVAAAAAGAASMACAPPSAASGPLPFFQFRPRLESVDWRRLSAIDVDKVAGAVDVLTLQENIMNITFCKLEDEKCPHCQSGVDPVLLKLIRLAQFTIEYLLHSQEFLTSQLHTLEERLRLSHCDGEQSKKLLTKQAGEIKTLKEECKRRKKMISTQQLMIEAKANYYQCHFCDKAFMNQAFLQSHIQRRHTEENSHFEYQKNAQIEKLRSEIVVLKEELQLTRSELEAAHHASAVRFSKEYEMQKTKEEDFLKLFDRWKEEEKEKLVDEMEKVKEMFMKEFKELTSKNSALEYQLSEIQKSNMQIKSNIGTLKDAHEFKEDRSPYPQDFHNVMQLLDSQESKWTARVQAIHQEHKKEKGRLLSHIEKLRTSMIDDLNASNVFYKKRIEELGQRLQEQNELIITQRQQIKDFTCNPLNSISEPKGNPLAWQAFESQPAAPAVPMNAPALHTLETKSSLPMVHGRENEQKLNNNKMHLRKALKSNSSLTKGLRTMVEQNLMEKLETLGINADIRGISSDQLHRVLKSVESERHKQEREIPNFHQIREFLEHQVSCKIEEKALLSSDQCSVSQMDTLSTGEVPKMIQLPSKNRQLIRQKAVSTDRTSVPKIKKNVMEDPFPRKSSTITTPPFSSEEEQEDDDLIRAYASPGPLPVPPPQNKGSFGKNTVKSDADGTEGSEIEDTDDSPKPAGVAVKTPTEKVEKMFPHRKNVNKPVGGTNVPEMFIKKEELQELKCADVEDEDWDISSLEEEISLGKKSGKEQKEPPPAKNEPHFAHVLNAWGAFNPKGPKGEGLQENESSTLKSSLVTVTDWSDTSDV

SEQ ID NO: 843067 - protein, 836 aa, Homo sapiens; identical to SEQ ID NO: 843066

SEQ ID NO: 843068 - protein, 115 aa, Homo sapiens
MFPHRKNVNKPVGGTNVPEMFIKKEELQELKCADVEDEDWDISSLEEEISLGKKSGKEQKEPPPAKNEPHFAHVLNAWGAFNPKGPKGEGLQENESSTLKSSLVTVTDWSDTSDV

SEQ ID NO: 843069 - protein, 762 aa, Homo sapiens
MPFQKHVYYPLASGPEGPDVAVAAAAAGAASMACAPPSAASGPLPFFQFRPRLESVDWRRLSAIDVDKVAGAVDVLTLQENIMNITFCKLEDEKCPHCQSGVDPVLLKLIRLAQFTIEYLLHSQEFLTSQLHTLEERLRLSHCDGEQSKKLLTKQAGEIKTLKEECKRRKKMISTQQLMIEAKANYYQCHFCDKAFMNQAFLQSHIQRRHTEENSHFEYQKNAQIEKLRSEIVVLKEELQLTRSELEAAHHASAVRFSKEYEMQKTKEEDFLKLFDRWKEEEKEKLVDEMEKVKEMFMKEFKELTSKNSALEYQLSEIQKSNMQIKSNIGTLKDAHEFKEDRSPYPQDFHNVMQLLDSQESKWTARVQAIHQEHKKEKGRLLSHIEKLRTSMIDDLNASNVFYKKRIEELGQRLQEQNELIITQRQQIKDFTCNPLNSISEPKGNPLAWQAFESQPAAPAVPMNAPALHTLETKSSLPMVHGRENEQKLNNNKMHLRKALKSNSSLTKGLRTMVEQNLMEKLETLGINADIRGISSDQLHRVLKSVESERHKQEREIPNFHQIREFLEHQVSCKIEEKALLSSDQCSVSQMDTLSTGEVPKMIQLPSKNRQLIRQKAVSTDRTSVPKIKKNVMEDPFPRKSSTITTPPFSSEEEQEDDDLIRAYASPGPLPVPPPQNKGSFGKNTVKSDADGTEGSEIEDTDDSPKPAGVAVKTPTEKVEKMFPHRKNVNKPVGGTNVPEMFIKKEELQELKVKSLLLARYT

SEQ ID NO: 843070 - protein, 836 aa, Homo sapiens; identical to SEQ ID NO: 843066

SEQ ID NO: 843071 - protein, 836 aa, Homo sapiens; identical to SEQ ID NO: 843066

SEQ ID NO: 843072 - protein, 836 aa, Homo sapiens; identical to SEQ ID NO: 843066

SEQ ID NO: 843073 - protein, 824 aa, Homo sapiens
MPFQKHVYYPLASGPEGPDVAVAAAAAGAASMACAPPSAASGPLPFFQFRPRLESVDWRRLSAIDVDKVAGAVDVLTLQENIMNITFCKLEDEKCPHCQSGVDPVLLKLIRLAQFTIEYLLHSQEFLTSQLHTLEERLRLSHCDGEQSKKLLTKQAGEIKTLKEECKRRKKMISTQQLMIEAKANYYQCHFCDKAFMNQAFLQSHIQRRHTEENSHFEYQKNAQIEKLRSEIVVLKEELQLTRSELEAAHHASAVRFSKEYEMQKTKEEDFLKLFDRWKEEEKEKLVDEMEKVKEMFMKEFKELTSKNSALEYQLSEIQKSNMQIKSNIGTLKDAHEFKEDRSPYPQDFHNVMQLLDSQESKWTARVQAIHQEHKKEKGRLLSHIEKLRTSMIDDLNASNVFYKKRIEELGQRLQEQNELIITQRQQIKDFTCNPLNSISEPKGNPLAWQAFESQPAAPAVPMNAPALHTLETKSSLPMVHGRENEQKLNNNKMHLRKALKSNSSLTKGLRTMVEQNLMEKLETLGINADIRGISSDQLHRVLKSVESERHKQEREIPNFHQIREFLEHQVSCKIEEKALLSSDQCSVSQMDTLSTGEVPKMIQLPSKNRQLIRQKAVSTDRTSVPKIKKNVMEDPFPRKSSTITTPPFSSEEEQEDDDLIRAYASPGPLPVPPPQNKGSFGKNTVKSDADGTEGSEIEDTDDSPKPAGVAVKTPTEKVEKMFPHRKNVNKPVGGTNVPEMFIKKEELQELKCADVEDEDWDISSLEEEISLGKKSGKEQKEPPPAKNEPHFAHVLNAWGAFNPKGPKGEGPSRKMNQAHSSRL

SEQ ID NO: 843074 - protein, 850 aa, Homo sapiens
MQFTILFESQRQSQRGTGTLKLCSHNIRQKTESRVSAKTPRPKCSRVWGLLKVSPEDLTLQRETLPDNAHVLPVLSPPSLLGRCDIFHSRKNPDRAQWLMPVIPALWEAESGRSPKIRGLTPAWPTWQNPVSTKNSQAWWTTCVVPATQEAEGGESLEPRRQRLQGAEIVPPHSPSLGNSVKLCLKKKKKKSSSLLKLPKASRNLVSFRKDAILISYFCFKNDVWQEFWYDKGDEVFHVINEVPKISGWAINLTSVSKLQPGPNADPILITMAFTYIIYFSYHNSGMWVLRPPFYKHVSENQEGEGSKSDSDSLGRAKILIQVFFFRQSHSSTQPGMRSGSGVISAHCNLRLPGSSNSPASASRVTGTTGVCHHTSLIFVFLVETGFCHVSQAVLKYLASSDPPTSASQSAGMDRLEPPCPALIQVILTSEPRPFTQHCIGLGLRELLLHHRLGVGYFLLKPGSPEQSDVERKEVMGCTRHACLEGKLNQMGANDRLCQNEDKKPFSFLLRQAKILRGPGSQDCFMNKEIRLRKSTSVWMQGKKLRLARKHKSRKGPRGREEEEEEDNSHQVKKTSAMPQCFLQPADFHRVNMRSEVAVLASVDSNVEGRGRAELQAFRQPWLDSKGPQARKVGCTRGIQEWWVHTPPWPSPPPPCLLSPVWERPWVPQARQEATMVNLAQSVCVLETVATERTDEQVTVSSCFHEVLCTGKACCLQHTHKKLISEEENKQTLDTRVGNANKHIVTTEGRNWSRYLIKTTAFSQARWLTPVIPALWEAAAGGSPEVRSLRPAWPTWQNPVSTKNIKISWAWWWTPVIPTTQEAKAGKPLQPRRQRLQRVKTGTLHSSLGD

SEQ ID NO: 843075 - protein, 433 aa, Homo sapiens
PCASRLSTQVRKPEVGALPQGPSRFPSEGREASAPGRTAGTPGAPAELGCPRGREPDAHPWDPDPAPAPRDGFLPRLQAQRADLSLPRGTGARVPARARRRGQRRGAEAARDPRRLGLAAMKSPPLLSPCLSWKRMAGIFFLPFISSGFAPRFKQEENFMLGRAHPSQPRFNWSHLTPLELKNRSVGLGTESTGRGKPHFTLEGHKFLIFGGSIHYFRVPREYWRDRLLKLKACGFNTVTTYVPWNLHEPERGKFDFSGNLDLEAFVLMAAEIGLWVILRPGPYICSEMDLGGLPSWLLQDPRLLLRTTNKSFIEAVEKYFDHLIPRVIPLQYRQAGPVIAVQVENEYGSFNKDKTYMPYLHKALLRRGIVELLLTSDGEKHVLSGHTKGVLAAINLQKLHQDTFNQLHKVQGASIDAGLLSDASQAATSSSL

SEQ ID NO: 843076 - protein, 111 aa, Homo sapiens
MGSGPGSSLEVQGFPLIREVGFLMAYSISPPQSPQPILTASQPHPPSATIFPLPSWHSPSKSTSSFGRLASAARGRLSVSSSAMMESKKAMASATSALNCEYFFGVAFCKR

SEQ ID NO: 843077 - protein, 138 aa, Homo sapiens
PRQDPLTGVESGQQALVFSASRDPLLYKHHWRVHMPPHLTHYCHSLRGRNDGAVLPLPLCPQSTGARGPLQCRLQRRNEGRTFPQADPSAHSPHFEKRVEFVIPSSLNVWHLLLGWQDVEQPLGQDLLAFSAFSSHYT

SEQ ID NO: 843078 - protein, 595 aa, Homo sapiens
LGEEQMIEQVNDEKGEQKQKQEQVQDVMLGRQGERMGLTGEPEGLNDGEWEQEDMERKAQGQGGPEQGEERKRELQVPEENRADSQDEKSQTFLGKSEEVTGKQEDHGIKEKGVPVSGQEAKEPESWDGGRLGAVGRARSREEENEHHGPSMPALIAPEDSPHCDLFPGASYLVTQIPGTQTESRAEELSPAALSPSLEPIRCSHQPISLLGSFLTEESPDKEIDQNSQQEGSRLRKGTVSSQGTEVVFASASVTPPRTPDSAPPSPAEAYPITPASVSARPPVAFPRRETSCAARAPETASAPLSMDDPSPCGTSEMCPAALYGFPSTGTSPPRPPANSTGTVQHLRSDSFPGSHRTEQTPDLVGMLLSYSHSELPQRPPKPAIYSSVTPRRDRRSGRDYSTVSASPTALSTLKQDSQESISNLERPSSPPSIQPWVSPHNPAFATESPAYGSSPSFVSMEDVRIHEPLPPPPPQRRDTHPSVVETDGHARVVVPTLKQHSHPPPLALGSGLHAPHKGPLPQASDPAVARQHRPLPSTPDSSHHAQATPRWRYNKPLPPTPDLPQPHLPPISAPGSSRIYRPLPPLPIIDPPTE

SEQ ID NO: 843079 - protein, 172 aa, Homo sapiens
HYNLDYNMHYLLVHRLYSSLGNATESPAYGSSPSFVSMEDVRIHEPLPPPPPQRRDTHPSVVETDGHARVVVPTLKQHSHPPPLALGSGLHAPHKGPLPQASDPAVARQHRPLPSTPDSSHHAQATPRWRYNKPLPPTPDLPQPHLPPISAPGSSRIYRPLPPLPIIDPPTE

SEQ ID NO: 843080 - protein, 171 aa, Homo sapiens
ALSVGGIACCLLNRSVSTGFRATESPAYGSSPSFVSMEDVRIHEPLPPPPPQRRDTHPSVVETDGHARVVVPTLKQHSHPPPLALGSGLHAPHKGPLPQASDPAVARQHRPLPSTPDSSHHAQATPRWRYNKPLPPTPDLPQPHLPPISAPGSSRIYRPLPPLPIIDPPTE

SEQ ID NO: 843081 - protein, 123 aa, Homo sapiens
MRLGPQGDGATSQITGTTQRKGTQKPGMPAKSRVFVSSVLHQTPVSSCDLECLTSWECSTGLSLILPSPYSRRICCGSNASDNIPHGECWILHARGPGPHCMFAFCKGCMAMTSYVDPAFLCK

SEQ ID NO: 843082 - protein, 109 aa, Homo sapiens
MAYQLYRNTTLGNSLQESLDELIQSQQITPQLALQVLLQFDKAINAALAQRVRNRVNFRGSLNTYRFCDNVWTFVLNDVEFREVTELIKVDKVKIVACDGKNTGSNTTE

SEQ ID NO: 843083 - protein, 95 aa, Homo sapiens
GASRPSGGVSLPGTASTSGSSAQFCGFCGGWRGGRRSRNLLPGSWRLLSAPRREAPSPQDINASLNKKNKFFLLSHGISVIQKYYFGKQSSGEPR

SEQ ID NO: 843084 - protein, 109 aa, Homo sapiens; identical to SEQ ID NO: 843082

SEQ ID NO: 843085 - protein, 109 aa, Homo sapiens; identical to SEQ ID NO: 843082

SEQ ID NO: 843086 - protein, 109 aa, Homo sapiens; identical to SEQ ID NO: 843082

SEQ ID NO: 843087 - protein, 95 aa, Homo sapiens
  misc_feature (4)..(4): Xaa can be any naturally occurring amino acid
RSAXYALSPQSQQITPQLALQVLLQFDKAINAALAQRVRNRVNFRGSLNTYRFCDNVWTFVLNDVEFREVTELIKVDKVKIVACDGKNTGSNTTE

SEQ ID NO: 843088 - protein, 109 aa, Homo sapiens; identical to SEQ ID NO: 843082

SEQ ID NO: 843089 - protein, 95 aa, Homo sapiens; identical to SEQ ID NO: 843083

SEQ ID NO: 843090 - protein, 157 aa, Homo sapiens
MKNHNFFLRTKVVAFLRTFFNKLILKHVKKSKRHDKREKGTAAGRKAQDGEPKGGEQDRREREGDQRRAEKKAAGRREGARRGGRASTETTQIHATQNGERKDKSREKKTPSRCGEPTETTTECRKIERESIAETQRKRDTGREKSGDHENTKQHHG

SEQ ID NO: 843091 - protein, 109 aa, Homo sapiens; identical to SEQ ID NO: 843082

SEQ ID NO: 843092 - protein, 109 aa, Homo sapiens; identical to SEQ ID NO: 843082

SEQ ID NO: 843093 - protein, 109 aa, Homo sapiens; identical to SEQ ID NO: 843082

SEQ ID NO: 843094 - protein, 96 aa, Homo sapiens
DGEREESPGDPGTASPRPLFAGLSDISISQDIPVEGEITIPMRSRIREFDSSTLNESVRNTIMRDLKAVGKKFMHVLYPRKSNTLLRDWDLLKWIK

SEQ ID NO: 843095 - protein, 109 aa, Homo sapiens; identical to SEQ ID NO: 843082

SEQ ID NO: 843096 - protein, 113 aa, Homo sapiens
AHCNLRLPDSSYSHASASQVAGITGAHYHTQLIFVFLVEVGFLHVGQTGLEFLTSSDPPASASRNAGITDVSPALPKIFILNIKTYLDIFRHGLFSLYYTFKYIKMKIKAEID

SEQ ID NO: 843097 - protein, 95 aa, Homo sapiens
MLQFPQLQNREILPMIILPRSDVVIKMVVKAFCKTLSKPGLACSGLAPTLSQLDRNLDREMKPDPTLLVTSRHNVFQNDEFNVFSRDSVNLSNQG

SEQ ID NO: 843098 - protein, 315 aa, Homo sapiens
  misc_feature (12)..(12): Xaa can be any naturally occurring amino acid
AYLSRSTHRQNXFKKEGSTLCSTANPETPNSTISREASTQSSSAATSQGYILPEGKIMPNTVFVGGIDVRMDETEIRSFFARYGSVKEVKIITDRTGVSKGYGFVSFFNDVDVQKIVESQINFHGKKLKLGPAIRKQNLCAYHVQPRPLVFNHPPPPQFQNVWTNPNTETYMQPTTTMNPITQYVQAYPTYPNSPVQVITGYQLPVYNYQMPPQWPVGEQRSYVVPPAYSAVNYHCNEVDPGAEVVPNECSVHEATPPSGNGPQKKSVDRSIQTVVSCLFNPENRLRNSVVTQDDYFKDKRVHHFRRSRAMLKSV

SEQ ID NO: 843099 - protein, 295 aa, Homo sapiens
MSTANPETPNSTISREASTQSSSAATSQGYILPEGKIMPNTVFVGGIDVRMDETEIRSFFARYGSVKEVKIITDRTGVSKGYGFVSFFNDVDVQKIVESQINFHGKKLKLGPAIRKQNLCAYHVQPRPLVFNHPPPPQFQNVWTNPNTETYMQPTTTMNPITQYVQAYPTYPNSPVQVITGYQLPVYNYQMPPQWPVGEQRSYVVPPAYSAVNYHCNEVDPGAEVVPNECSVHEATPPSGNGPQKKSVDRSIQTVVSCLFNPENRLRNSVVTQDDYFKDKRVHHFRRSRAMLKSV

SEQ ID NO: 843100 - protein, 264 aa, Homo sapiens
MESRKDITNQEEIWKMKPRRNLEDNDYLHEDTGETSMLKRPVLLHLQQTAHADEFDCPSELQHAQELFPQWHLPIKIAAVMASLTFLYTLLREVIHPLATSHQQYFYKIPILVINKVLPMVSITLLALVYLPGVIAAIVQVHNGTKYKKFPHWLDKWMLTRKQFGLLSLFFAVLHAIYTLSYAMRRSYRYKLLNWAYQQVQQNKEDAWIEHDVWRMEIYVSLGIVGLAILALLAVTSIPSVSDSLTWREFHYIQVHGRINFLTL

SEQ ID NO: 843101 - protein, 285 aa, Homo sapiens
RSGGSGAAWGRHLPAAAAAETHGQATARSGWLKPYYFIELMESRKDITNQEEIWKMKPRRNLEDNDYLQTAHADEFDCPSELQHAQELFPQWHLPIKIAAVMASLTFLYTLLREVIHPLATSHQQYFYKIPILVINKVLPMVSITLLALVYLPGVIAAIVQVHNGTKYKKFPHWLDKWMLTRKQFGLLSLFFAVLHAIYTLSYAMRRSYRYKLLNWAYQQVQQNKEDAWIEHDVWRMEIYVSLGIVGLAILALLAVTSIPSVSDSLTWREFHYIQVHGRINFLTL

SEQ ID NO: 843102 - protein, 259 aa, Homo sapiens
MESRKDITNQEEIWKMKPRRNLEDNDYLHEDTGETSMLKRPVLLHLQQTAHADEFDCPSELQHAQELFPQWHLPIKIAAVMASLTFLYTLLREVIHPLATSHQQYFYKIPILVINKVLPMVSITLLALVYLPGVIAAIVQVHNGTKYKKFPHWLDKWMLTRKQFGLLSLFFAVLHAIYTLSYAMRRSYRYKLLNWAYQQVQQNKEDAWIEHDVWRMEIYVSLGIVGLAILALLAVTSIPSVSDSLTWREFHYIQRLLQE

SEQ ID NO: 843103 - protein, 304 aa, Homo sapiens
RSGGSGAAWGRHLPAAAAAETHGQATARSGWLKPYYFIELMESRKDITNQEEIWKMKPRRNLEDNDYLHEDTGETSMLKRPVLLHLQQTAHADEFDCPSELQHAQELFPQWHLPIKIAAVMASLTFLYTLLREVIHPLATSHQQYFYKIPILVINKVLPMVSITLLALVYLPGVIAAIVQVHNGTKYKKFPHWLDKWMLTRKQFGLLSLFFAVLHAIYTLSYAMRRSYRYKLLNWAYQQVQQNKEDAWIEHDVWRMEIYVSLGIVGLAILALLAVTSIPSVSDSLTWREFHYIQVHGRINFLTL

SEQ ID NO: 843104 - protein, 135 aa, Homo sapiens
QWGQRLPREPVWAAPHGIPGTVGSEAPSGTCVGCPAWHPRNSGVRGSLGNPRGLPRMASQEQWGQRLPQEPAQAAQHGVPSSVQLEVPVVSAPWGVVVVLTILDGEVGEECRANTGGEAGGQAGRHTHRTFKTHR

SEQ ID NO: 843105 - protein, 180 aa, Homo sapiens
MVPSPHSGEVKGSKPTLLCLLCSRFKTLMTNKSEQDGDSSKTIEISDMKYHIFQMMMQYLYYGGTESMEIPTTDILELLSAASLFQLDALQRHCEILCSQTLSMESAVNTYKYAKIHNAPELALFCEGFFLKHMKALLEQDAFRQLIYGRSSKVQGLDPLQDLQNTLAERVHSVYITSRV

SEQ ID NO: 843106 - protein, 179 aa, Homo sapiens
YYSMDQRGQKPGDLYSPDSSPQANTQMSSSPVTSPTQSPAPSPVTSLSSVCTGLSPLPVLTQFPRPGYIPTTDILELLSAASLFQLDALQRHCEILCSQTLSMESAVNTYKYAKIHNAPELALFCEGFFLKHMKALLEQDAFRQLIYGRSSKVQGLDPLQDLQNTLAERVHSVYITSRV

SEQ ID NO: 843107 - protein, 108 aa, Homo sapiens
MGITESLLEMQSPRPHPSPPASSQAPQVAMCSVQFRKCWWRLRHFSQASNPGHIGQTRGREAHILTVDQSQVFRALSFAEHTRLHTRNSSQGRQGPEEDLAGISAEPH

SEQ ID NO: 843108 - protein, 279 aa, Homo sapiens
IWIESLRTSFSQSRYSVVQSLLRDFSSIREEEYNEELVTEGLQLMFDILKTSKNDSVIQQLATIFTHCYGSSPIPSIPEIRKTLPARLDPHFLNNKEMSDVTFLVEGKLFYAHKVLLVTASNRFKTLMTNKSEQDGDSSKTIEISDMKYHIFQMMMQYLYYGGTESMEIPTTDILELLSAASLFQLDALQRHCEILCSQTLSMESAVNTYKYAKIHNAPELALFCEGFFLKHMKALLEQDAFRQLIYGRSSKVQGLDPLQDLQNTLAERVHSVYITSRV

SEQ ID NO: 843109 - protein, 123 aa, Homo sapiens
IWIESLRTSFSQSRYSVVQSLLRDFSSIREEEYNEELVTEGLQLMFDILKTSKNDSVIQQLATIFTHCYGSSPIPSIPEIRKTLPARLDPHFLNNKEMSDVTFLVEGKLFYAHKVLLVTASNR

SEQ ID NO: 843110 - protein, 429 aa, Homo sapiens
VFTWHSGEWCALAVFCRSRPPLPSARPTNPDGTEGPQAKGDGPLSPDTASPLLQVPLAGSAAVVPERGDMPELVVTALLAPSRLSLKLLRAFMWSLVFSVALVAAAVYGCIALTHVLCRPRRGCCGRRRSASPACLSDPSLGEHGFLNLKSSGLRLHYVSAGRGNGPLMLFLHGFPENWFSWRYQLREFQSRFHVVAVDLRGYGPSDAPRDVDCYTIDLLLVDIKDVILGLGYSKCILVAHDWGALLAWHFSIYYPSLVERMVVVSGAPMSVYQDYSLHHISQFFRSHYMFLFQLPWLPEKLLSMSDFQILKTTLTHRKTGIPCLTPSELEAFLYNFSQPGGLTGPLNYYRNLFRNFPLEPQELTTPTLLLWGEKDTYLELGLVEAIGSRFVPGRLEAHILPGIGHWIPQSNPQEMHQYMWAFLQDLLD

SEQ ID NO: 843111 - protein, 355 aa, Homo sapiens
VFTWHSGEWCALAVFCRSRPPLPSARPTNPDGTEGPQAKGDGPLSPDTASPLLQVPLAGSAAVVPERGDMPELVVTALLAPSRLSLKLLRAFMWSLVFSVALVAAAVYGCIALTHVLCRPRRGCCGRRRSASPACLSDPSLGEHGFLNLKSSGLRLHYVSAGRGNGPLMLFLHGFPENWFSWRYQLREFQSRFHVVAVDLRGYGPSDAPRDVDCYTIDLLLVDIKDVILGLGYSKCILVAHDWGALLAWHFSIYYPSLVERMVVVSGAPMSVYQDYSLHHISQFFRSHYMFLFQLPWLPEKLLSMSDFQILKTTLTHRKTGIPCLTPSELEAFLYNFSQPGGLTGPLNYYRNLFR

SEQ ID NO: 843112 - protein, 279 aa, Homo sapiens
VFTWHSGEWCALAVFCRSRPPLPSARPTNPDGTEGPQAKGDGPLSPDTASPLLQVPLAGSAAVVPERGDMPELVVTALLAPSRLSLKLLRAFMWSLVFSVALVAAAVYGCIALTHVLCRPRRGCCGRRRSASPACLSDPSLGEHGFLNLKSSGLRLHYVSAGRGNGPLMLFLHGFPENWFSWRYQLREFQSRFHVVAVDLRGYGPSDAPRDVDCYTIDLLLVDIKDVILGLGYSKCILVAHDWGALLAWHFSIYYPSLVERMVVVSGAPMSVYQDYVFT

SEQ ID NO: 843113 - protein, 406 aa, Homo sapiens
MDQSGMEIPVTLIIKAPNQKYSDQTISCFLNWTVGKLKTHLSNVYPSKPLTKDQRLVYSGRLLPDHLQLKDILRKQDEYHMVHLVCTSRTPPSSPKSSTNRESHEALASSSNSSSDHSGSTTPSSGQETLSLAVGSSSEGLRQRTLPQAQTDQAQSHQFPYVMQGNVDNQFPGQAAPPGFPVYPAFSPLQMLWWQQMYAHQYYMQYQAAVSAQATSNVNPTQPTTSQPLNLAHVPGEEPPPAPNLVAQENRPMNENVQMNAQGGPVLNEEDFNRDWLDWMYTFSRAAILLSIVYFYSSFSRFIMVMGAMLLVYLHQAGWFPFRQEGGHQQAPNNNAEVNNDGQNANNLELEEMERLMDDGLEDESGEDGGEDASAIQRPGLMASAWSFITTFFTSLIPEGPPQVAN

SEQ ID NO: 843114 - protein, 406 aa, Homo sapiens; identical to SEQ ID NO: 843113

SEQ ID NO: 843115 - protein, 424 aa, Homo sapiens
  misc_feature (210)..(210): Xaa can be any naturally occurring amino acid
  misc_feature (231)..(231): Xaa can be any naturally occurring amino acid
MDQSGMEIPVTLIIKAPNQKYSDQTISCFLNWTVGKLKTHLSNVYPSKPLTKDQRLVYSGRLLPDHLQLKDILRKQDEYHMVHLVCTSRTPPSSPKSSTNRESHEALASSSNSSSDHSGSTTPSSGQETLSLAVGSSSEGLRQRTLPQAQTDQAQSHQFPYVMQGNVDNQFPGQAAPPGFPVYPAFSPLQMLWWQQMYAHQYYMQYIKPXFLGPPQRVFQALPKRGARGPXQQSNVNPTQPTTSQPLNLAHVPGEEPPPAPNLVAQENRPMNENVQMNAQGGPVLNEEDFNRDWLDWMYTFSRAAILLSIVYFYSSFSRFIMVMGAMLLVYLHQAGWFPFRQEGGHQQAPNNNAEVNNDGQNANNLELEEMERLMDDGLEDESGEDGGEDASAIQRPGLMASAWSFITTFFTSLIPEGPPQVAN

SEQ ID NO: 843116 - protein, 217 aa, Homo sapiens
MVKFFFLFNIYFGDYFSQAAVSAQATSNVNPTQPTTSQPLNLAHVPGEEPPPAPNLVAQENRPMNENVQMNAQGGPVLNEEDFNRDWLDWMYTFSRAAILLSIVYFYSSFSRFIMVMGAMLLVYLHQAGWFPFRQEGGHQQAPNNNAEVNNDGQNANNLELEEMERLMDDGLEDESGEDGGEDASAIQRPGLMASAWSFITTFFTSLIPEGPPQVAN

SEQ ID NO: 843117 - protein, 336 aa, Homo sapiens
MDQSGMEIPVTLIIKAPNQKYSDQTISCFLNWTVGKLKTHLSNVYPSKPLTKDQRLVYSGRLLPDHLQLKDILRKQDEYHMVHLVCTSRTPPSSPKSSTNRESHEALASSSNSSSDHSGSTTPSSGQETLSLAVGSSSEGLRQRTLPQAQTDQAQSHQFPYVMQGNVDNQFPGQAAPPGFPVYPAFSPLQMLWWQQMYAHQYYMQYQAAVSAQATSNVNPTQPTTSQPLNLAHVPGEEPPPAPNLVAQENRPMNENVQMNAQGGPVLNEEDFNRDWLDWMYTFSRAAILLSIVYFYSSFSRFIMVMGAMLLVYLQTAVSSGAPNGKDRGHQRGAQM

SEQ ID NO: 843118 - protein, 406 aa, Homo sapiens; identical to SEQ ID NO: 843113

SEQ ID NO: 843119 - protein, 406 aa, Homo sapiens; identical to SEQ ID NO: 843113

SEQ ID NO: 843120 - protein, 342 aa, Homo sapiens
MDQSGMEIPVTLIIKAPNQKYSDQTISCFLNWTVGKLKTHLSNVYPSKPSSDHSGSTTPSSGQETLSLAVGSSSEGLRQRTLPQAQTDQAQSHQFPYVMQGNVDNQFPGQAAPPGFPVYPAFSPLQMLWWQQMYAHQYYMQYQAAVSAQATSNVNPTQPTTSQPLNLAHVPGEEPPPAPNLVAQENRPMNENVQMNAQGGPVLNEEDFNRDWLDWMYTFSRAAILLSIVYFYSSFSRFIMVMGAMLLVYLHQAGWFPFRQEGGHQQAPNNNAEVNNDGQNANNLELEEMERLMDDGLEDESGEDGGEDASAIQRPGLMASAWSFITTFFTSLIPEGPPQVAN

SEQ ID NO: 843121 - protein, 406 aa, Homo sapiens; identical to SEQ ID NO: 843113

SEQ ID NO: 843122 - protein, 232 aa, Homo sapiens [sequence omitted]

SEQ ID NO: 843123 - protein, 188 aa, Homo sapiens
GGGQRLQVRVGSRWQDLLVTSWDTVDSIPKTVTRPCGDPRLIRKGILVIRKGWLTINNIGIMKGGSKEYWFVLTAENLSWYKDDEEKEKKYMLSVDNLKLRDVEKGFMSSKHIFALFNTEQRVVAVLVLFLPDPRLTLVGPLLLGDESSVQRPSEGSLESHGESWWDLGPKLETSLTMVVLLSKVQSP

SEQ ID NO: 843124 - protein, 889 aa, Homo sapiens
RGPRGAGSLGARLQRRSRKSEPGALAAAGSQPAGPAAAMGNRGMEDLIPLVNRLQDAFSAIGQNADLDLPQIAVVGGQSAGKSSVLENFVGRDFLPRGSGIVTRRPLVLQLVNATTEYAEFLHCKGKKFTDFEEVRLEIEAETDRVTGTNKGISPVPINLRVYSPHVLNLTLVDLPGMTKVPVGDQPPDIEFQIRDMLMQFVTKENCLILAVSPANSDLANSDALKVAKEVDPQGQRTIGVITKLDLMDEGTDARDVLENKLLPLRRGYIGVVNRSQKDIDGKKDITAALAAERKFFLSHPSYRHLADRMGTPYLQKVLNQQLTNHIRDTLPGLRNKLQSQLLSIEKEVEEYKNFRPDDPARKTKALLQMVQQFAVDFEKRIEGSGDQIDTYELSGGARINRIFHERFPFELVKMEFDEKELRREISYAIKNIHGIRTGLFTPDMAFETIVKKQVKKIREPCLKCVDMVISELISTVRQCTKKLQQYPRLREEMERIVTTHIREREGRTKEQVMLLIDIELAYMNTNHEDFIGFANAQQRSNQMNKKKTSGNQDEILVIRKGWLTINNIGIMKGGSKEYWFVLTAENLSWYKDDEEKEKKYMLSVDNLKLRDVEKGFMSSKHIFALFNTEQRNVYKDYRQLELACETQEEVDSWKASFLRAGVYPERVGDKEKASETEENGSDSFMHSMDPQLERQVETIRNLVDSYMAIVNKTVRDLMPKTIMHLMINNTKEFIFSELLANLYSCGDQNTLMEESAEQAQRRDEMLRMYHALKEALSIIGDINTTTVSTPMPPPVDDSWLQVQSVPAGRRSPTSSPTPQRRAPAVPPARPGSRGPAPGPPPAGSALGGAPPVPSRPGASPDPFGPPPQVPSRPNRAPPGVPRITISDP

SEQ ID NO: 843125 - protein, 889 aa, Homo sapiens
RGPRGAGSLGARLQRRSRKSEPGALAAAGSQPAGPAAAMGNRGMEDLIPLVNRLQDAFSAIGQNADLDLPQIAVVGGQSAGKSSVLENFVGRDFLPRGSGIVTRRPLVLQLVNATTEYAEFLHCKGKKFTDFEEVRLEIEAETDRVTGTNKGISPVPINLRVYSPHVLNLTLVDLPGMTKVPVGDQPPDIEFQIRDMLMQFVTKENCLILAVSPANSDLANSDALKVAKEVDPQGQRTIGVITKLDLMDEGTDARDVLENKLLPLRRGYIGVVNRSQKDIDGKKDITAALAAERKFFLSHPSYRHLADRMGTPYLQKVLNQQLTNHIRDTLPGLRNKLQSQLLSIEKEVEEYKNFRPDDPARKTKALLQMVQQFAVDFEKRIEGSGDQIDTYELSGGARINRIFHERFPFELVKMEFDEKELRREISYAIKNIHGIRTGLFTPDLAFEATVKKQVQKLKEPSIKCVDMVVSELTATIRKCSEKLQQYPRLREEMERIVTTHIREREGRTKEQVMLLIDIELAYMNTNHEDFIGFANAQQRSNQMNKKKTSGNQDEILVIRKGWLTINNIGIMKGGSKEYWFVLTAENLSWYKDDEEKEKKYMLSVDNLKLRDVEKGFMSSKHIFALFNTEQRNVYKDYRQLELACETQEEVDSWKASFLRAGVYPERVGDKEKASETEENGSDSFMHSMDPQLERQVETIRNLVDSYMAIVNKTVRDLMPKTIMHLMINNTKEFIFSELLANLYSCGDQNTLMEESAEQAQRRDEMLRMYHALKEALSIIGDINTTTVSTPMPPPVDDSWLQVQSVPAGRRSPTSSPTPQRRAPAVPPARPGSRGPAPGPPPAGSALGGAPPVPSRPGASPDPFGPPPQVPSRPNRAPPGVPRITISDP

SEQ ID NO: 843126 - protein, 277 aa, Homo sapiens
WAPPYQLRKHIFALFNTEQRNVYKDYRQLELACETQEEVDSWKASFLRAGVYPERVGDKEKASETEENGSDSFMHSMDPQLERQVETIRNLVDSYMAIVNKTVRDLMPKTIMHLMINNTKEFIFSELLANLYSCGDQNTLMEESAEQAQRRDEMLRMYHALKEALSIIGDINTTTVSTPMPPPVDDSWLQVQSVPAGRRSPTSSPTPQRRAPAVPPARPGSRGPAPGPPPAGSALGGAPPVPSRPGASPDPFGPPPQVPSRPNRAPPGVPRITISDP

SEQ ID NO: 843127 - protein, 841 aa, Homo sapiens
RGPRGAGSLGARLQRRSRKSEPGALAAAGSQPAGPAAAMGNRGMEDLIPLVNRLQDAFSAIGQNADLDLPQIAVVGGQSAGKSSVLENFVGRDFLPRGSGIVTRRPLVLQLVNATTEYAEFLHCKGKKFTDFEEVRLEIEAETDRVTGTNKGISPVPINLRVYSPHVLNLTLVDLPGMTKVPVGDQPPDIEFQIRDMLMQFVTKENCLILAVSPANSDLANSDALKVAKEVDPQGQRTIGVITKLDLMDEGTDARDVLENKLLPLRRGYIGVVNRSQKDIDGKKDITAALAAERKFFLSHPSYRHLADRMGTPYLQKVLNQQLTNHIRDTLPGLRNKLQSQLLSIEKEVEEYKNFRPDDPARKTKALLQMVQQFAVDFEKRIEGSGDQIDTYELSGGARINRIFHERFPFELVKMEFDEKELRREISYAIKNIHGIRTGLFTPDMAFETIVKKQVKKIREPCLKCVDMVISELISTVRQCTKKLQQYPRLREEMERIVTTHIREREGRTKEQVMLLIDIELAYMNTNHEDFIGFANAQQRSNQMNKKKTSGNQDEILVIRKGWLTINNIGIMKGGSKEYWFVLTAENLSWYKDDEEKEKKYMLSVDNLKLRDVEKGFMSSKHIFALFNTEQRNVYKDYRQLELACETQEEVDSWKASFLRAGVYPERVGDKEKASETEENGSDSFMHSMDPQLERQVETIRNLVDSYMAIVNKTVRDLMPKTIMHLMINNTKEFIFSELLANLYSCGDQNTLMEESAEQAQRRDEMLRMYHALKEALSIIGDINTTTVSTPMPPPVDDSWLQVAHVQAHAAEPSTAARAHAEHRTPEYAGNLENPGTQSNE

SEQ ID NO: 843128 - protein, 802 aa, Homo sapiens
RGPRGAGSLGARLQRRSRKSEPGALAAAGSQPAGPAAAMGNRGMEDLIPLVNRLQDAFSAIGQNADLDLPQIAVVGGQSAGKSSVLENFVGRDFLPRGSGIVTRRPLVLQLVNATTEYAEFLHCKGKKFTDFEEVRLEIEAETDRVTGTNKGISPVPINLRVYSPHVLNLTLVDLPGMTKVPVGDQPPDIEFQIRDMLMQFVTKENCLILAVSPANSDLANSDALKVAKEVDPQGQRTIGVITKLDLMDEGTDARDVLENKLLPLRRGYIGVVNRSQKDIDGKKDITAALAAERKFFLSHPSYRHLADRMGTPYLQKVLNQQLTNHIRDTLPGLRNKLQSQLLSIEKEVEEYKNFRPDDPARKTKALLQMVQQFAVDFEKRIEGSGDQIDTYELSGGARINRIFHERFPFELVKMEFDEKELRREISYAIKNIHGIRTGLFTPDMAFETIVKKQVKKIREPCLKCVDMVISELISTVRQCTKKLQQYPRLREEMERIVTTHIREREGRTKEQVMLLIDIELAYMNTNHEDFIGFANAQQRSNQMNKKKTSGNQDEILVIRKGWLTINNIGIMKGGSKEYWFVLTAENLSWYKDDEEKEKKYMLSVDNLKLRDVEKGFMSSKHIFALFNTEQRNVYKDYRQLELACETQEEVDSWKASFLRAGVYPERVGDKEKASETEENGSDSFMHSMDPQLERQVETIRNLVDSYMAIVNKTVRDLMPKTIMHLMINNTKEFIFSELLANLYSCGDQNTLMEESAEQAQRRDEMLRMYHALKEALSIIGDMVFPAVSPSTPKPVSWSWLF

SEQ ID NO: 843129 - protein, 329 aa, Homo sapiens
RGPRGAGSLGARLQRRSRKSEPGALAAAGSQPAGPAAAMGNRGMEDLIPLVNRLQDAFSAIGQNADLDLPQIAVVGGQSAGKSSVLENFVGRDFLPRGSGIVTRRPLVLQLVNATTEYAEFLHCKGKKFTDFEEVRLEIEAETDRVTGTNKGISPVPINLRVYSPHVLNLTLVDLPGMTKVPVGDQPPDIEFQIRDMLMQFVTKENCLILAVSPANSDLANSDALKVAKEVDPQGQRTIGVITKLDLMDEGTDARDVLENKLLPLRRGYIGVVNRSQKDIDGKKDITAALAAERKFFLSHPSYRHLADRMGTPYLQKVLNQVGDQARMG

SEQ ID NO: 843130 - protein, 902 aa, Homo sapiens
RGPRGAGSLGARLQRRSRKSEPGALAAAGSQPAGPAAAMGNRGMEDLIPLVNRLQDAFSAIGQNADLDLPQIAVVGGQSAGKSSVLENFVGRDFLPRGSGIVTRRPLVLQLVNATTEYAEFLHCKGKKFTDFEEVRLEIEAETDRVTGTNKGISPVPINLRVYSPHVLNLTLVDLPGMTKVPVGDQPPDIEFQIRDMLMQFVTKENCLILAVSPANSDLANSDALKVAKEVDPQGQRTIGVITKLDLMDEGTDARDVLENKLLPLRRGYIGVVNRSQKDIDGKKDITAALAAERKFFLSHPSYRHLADRMGTPYLQKVLNQQLTNHIRDTLPGLRNKLQSQLLSIEKEVEEYKNFRPDDPARKTKALLQMVQQFAVDFEKRIEGSGDQIDTYELSGGARINRIFHERFPFELVKMEFDEKELRREISYAIKNIHGIRTGLFTPDMAFETIVKKQVKKIREPCLKCVDMVISELISTVRQCTKKLQQYPRLREEMERIVTTHIREREGRTKEQVMLLIDIELAYMNTNHEDFIGFANAQQRSNQMNKKKTSGNQDEILVIRKGWLTINNIGIMKGGSKEYWFVLTAENLSWYKDDEEKEKKYMLSVDNLKLRDVEKGFMSSKHIFALFNTEQRNVYKDYRQLELACETQEEVDSWKASFLRAGVYPERVGDKEKASETEENGSDSFMHSMDPQLERQVETIRNLVDSYMAIVNKTVRDLMPKTIMHLMINNTKEFIFSELLANLYSCGDQNTLMEESAEQAQRRDEMLRMYHALKEALSIIGDINTTTVSTPMPPPVDDSWLQVQSVPAGRRSPTSSPTPQRRAPAVPPARPGSRGPAPGPPPAGSALGGAPPVPSRPGASPDPFGPPPQVPSRPNRAPPGVPSRSGQASPSRPESPRPPFDL

SEQ ID NO: 843131 - protein, 133 aa, Homo sapiens
MVQQFAVDFEKRIEGSGDQIDTYELSGGARINRIFHERFPFELVKMEFDEKELRREISYAIKNIHGIRTGLFTPDLAFEATVKKQVQKLKEPSIKCVDMVVSELTATIRKCSEKLHSTPATGGDERLGSSYNA

SEQ ID NO: 843132 - protein, 727 aa, Homo sapiens
CVLLLRDPRLSGCSGMTKVPVGDQPPDIEFQIRDMLMQFVTKENCLILAVSPANSDLANSDALKVAKEVDPQGQRTIGVITKLDLMDEGTDARDVLENKLLPLRRGYIGVVNRSQKDIDGKKDITAALAAERKFFLSHPSYRHLADRMGTPYLQKVLNQQLTNHIRDTLPGLRNKLQSQLLSIEKEVEEYKNFRPDDPARKTKALLQMVQQFAVDFEKRIEGSGDQIDTYELSGGARINRIFHERFPFELVKMEFDEKELRREISYAIKNIHGIRTGLFTPDMAFETIVKKQVKKIREPCLKCVDMVISELISTVRQCTKKLQQYPRLREEMERIVTTHIREREGRTKEQVMLLIDIELAYMNTNHEDFIGFANAQQRSNQMNKKKTSGNQDEILVIRKGWLTINNIGIMKGGSKEYWFVLTAENLSWYKDDEEKEKKYMLSVDNLKLRDVEKGFMSSKHIFALFNTEQRNVYKDYRQLELACETQEEVDSWKASFLRAGVYPERVGDKEKASETEENGSDSFMHSMDPQLERQVETIRNLVDSYMAIVNKTVRDLMPKTIMHLMINNTKEFIFSELLANLYSCGDQNTLMEESAEQAQRRDEMLRMYHALKEALSIIGDINTTTVSTPMPPPVDDSWLQVQSVPAGRRSPTSSPTPQRRAPAVPPARPGSRGPAPGPPPAGSALGGAPPVPSRPGASPDPFGPPPQVPSRPNRAPPGVPRITISDP

SEQ ID NO: 843133 - protein, 531 aa, Homo sapiens
MLGSTWEVPTPGGKGGPVPRSHCLLFSLSLYLCRCLSLFPRARAILSTPGFLSLLGFHPLLLPTHGCSSSCPHLLPGCRTGLFTPDLAFEATVKKQVQKLKEPSIKCVDMVVSELTATIRKCSEKLQQYPRLREEMERIVTTHIREREGRTKEQVMLLIDIELAYMNTNHEDFIGFANAQQRSNQMNKKKTSGNQDEILVIRKGWLTINNIGIMKGGSKEYWFVLTAENLSWYKDDEEKEKKYMLSVDNLKLRDVEKGFMSSKHIFALFNTEQRNVYKDYRQLELACETQEEVDSWKASFLRAGVYPERVGDKEKASETEENGSDSFMHSMDPQLERQVETIRNLVDSYMAIVNKTVRDLMPKTIMHLMINNTKEFIFSELLANLYSCGDQNTLMEESAEQAQRRDEMLRMYHALKEALSIIGDINTTTVSTPMPPPVDDSWLQVQSVPAGRRSPTSSPTPQRRAPAVPPARPGSRGPAPGPPPAGSALGGAPPVPSRPGASPDPFGPPPQVPSRPNRAPPGVPRITISDP

SEQ ID NO: 843134 - protein, 902 aa, Homo sapiens; identical to SEQ ID NO: 843130

SEQ ID NO: 843135 - protein, 484 aa, Homo sapiens
RGPRGAGSLGARLQRRSRKSEPGALAAAGSQPAGPAAAMGNRGMEDLIPLVNRLQDAFSAIGQNADLDLPQIAVVGGQSAGKSSVLENFVGRDFLPRGSGIVTRRPLVLQLVNATTEYAEFLHCKGKKFTDFEEVRLEIEAETDRVTGTNKGISPVPINLRVYSPHVLNLTLVDLPGMTKVPVGDQPPDIEFQIRDMLMQFVTKENCLILAVSPANSDLANSDALKVAKEVDPQGQRTIGVITKLDLMDEGTDARDVLENKLLPLRRGYIGVVNRSQKDIDGKKDITAALAAERKFFLSHPSYRHLADRMGTPYLQKVLNQQLTNHIRDTLPGLRNKLQSQLLSIEKEVEEYKNFRPDDPARKTKALLQMVQQFAVDFEKRIEGSGDQIDTYELSGGARINRIFHERFPFELVKMEFDEKELRREISYAIKNIHGIRTGLFTPDLAFEATVKKQVQKLKEPSIKCVDMVVSELTATIRKCSEKV

SEQ ID NO: 843136 - protein, 123 aa, Homo sapiens
DGVLEDPYSERHQDLGTLKKLECLKSLDLFNCEVTNLNDYRESVFKLLPQLTYLDGYDREDQEAPDSDAEVDGVDEEEEDEEGEDEEDEDDEDGEEEEFDEEDDEDEDVEGDEDDDEVSEEKN

SEQ ID NO: 843137 - protein, 251 aa, Homo sapiens; identical to SEQ ID NO: 820284

SEQ ID NO: 843138 - protein, 251 aa, Homo sapiens; identical to SEQ ID NO: 820284

SEQ ID NO: 843139 - protein, 251 aa, Homo sapiens; identical to SEQ ID NO: 820284

SEQ ID NO: 843140 - protein, 251 aa, Homo sapiens; identical to SEQ ID NO: 820284

SEQ ID NO: 843141 - protein, 251 aa, Homo sapiens; identical to SEQ ID NO: 820284

SEQ ID NO: 843142 - protein, 251 aa, Homo sapiens; identical to SEQ ID NO: 820284

SEQ ID NO: 843143 - protein, 217 aa, Homo sapiens
MDMKRRIHLELRNRTPAAVRELVLDNCKSNDGKIEGLTAEFVNLEFLSLINVGLISVSNLPKLPKLKKLELSENRIFGGLDMLAEKLPNLTHLNLSGNKLKDISTLEPLKKLECLKSLDLFNCEVTNLNDYRESVFKLLPQLTYLDGYDREDQEAPDSDAEVDGVDEEEEDEEGEDEEDEDDEDGEEEEFDEEDDEDEDVEGDEDDDEVSEEEERNR

SEQ ID NO: 843144 - protein, 217 aa, Homo sapiens; identical to SEQ ID NO: 843143

SEQ ID NO: 843145 - protein, 214 aa, Homo sapiens
MDMKRRIHLELRNRTPAAVRELVLDNCKSNDGKIEGLTAEFVNLEFLSLINVGLISVSNLPKLPKLKKLELSENRIFGGLDMLAEKLPNLTHLNLSGNKLKDISTLEPLKKLECLKSLDLFNCEVTNLNDYRESVFKLLPQLTYLDGYDREDQEAPDSDAEVDGVDEEEEDEEGEDEEDEDDEDGEEEEFDEEDDEDEDVEGDEDDDEVSEEKN

SEQ ID NO: 843146 - protein, 251 aa, Homo sapiens; identical to SEQ ID NO: 820284

SEQ ID NO: 843147 - protein, 217 aa, Homo sapiens
MDMKRRIHLELRNRTPAAVRELVLDNCKSNDGKIEGLTAEFVNLEFLSLINVGLISVSNLPKLPKLKKLELSENRIFGGLDMLAEKLPNLTHLNLSGNKLKDISTLEPLKKLECLKSLDLFNCEVTNLNDYRESVFKLLPQLTYLDGYDREDQEAPDSDAEVDGVDEEEEDEEGEDEEDEDDEDGEEEEFDEEAKAKTMMKNAQKKMNRLGKKRGGG

SEQ ID NO: 843148 - protein, 251 aa, Homo sapiens; identical to SEQ ID NO: 820284

SEQ ID NO: 843149 - protein, 330 aa, Homo sapiens
VQLNNVKSLIKIEVEENSILPFQDRELPHRIWLSICAHFNLQVFESIHSSFNYPRQAFNVSCWCFYQTIKSILDNVIAADPLKRRIHLELRNRTPAAVRELVLDNCKSNDGKIEGLTAEFVNLEFLSLINVGLISVSNLPKLPKLKKLELSENRIFGGLDMLAEKLPNLTHLNLSGNKLKDISTLEPLKKLECLKSLDLFNCEVTNLNDYRESVFKLLPQLTYLDGYDREDQEAPDSDAEVDGVDEEEEDEEGEDEEDEDDEDGEEEEFDEEDDEDEDVEGDEDDDEVSEEEEEFGLDEEDEDEDEDEEEEEGGKGEKRKRETDDEGEDD

SEQ ID NO: 843150 - protein, 174 aa, Homo sapiens [sequence omitted]

SEQ ID NO: 843151 - protein, 166 aa, Homo sapiens
RPPTTTKFAAASTKLKDISTLEPLKKLECLKSLDLFNCEVTNLNDYRESVFKLLPQLTYLDGYDREDQEAPDSDAEVDGVDEEEEDEEGEDEEDEDDEDGEEEEFDEEDDEDEDVEGDEDDDEVSEEEEEFGLDEEDEDEDEDEEEEEGGKGEKRKRETDDEGEDD

SEQ ID NO: 843152 - protein, 196 aa, Homo sapiens
IELGPPEVAQLKKLELSENRIFGGLDMLAEKLPNLTHLNLSGNKLKDISTLEPLKKLECLKSLDLFNCEVTNLNDYRESVFKLLPQLTYLDGYDREDQEAPDSDAEVDGVDEEEEDEEGEDEEDEDDEDGEEEEFDEEDDEDEDVEGDEDDDEVSEEEEEFGLDEEDEDEDEDEEEEEGGKGEKRKRETDDEGEDD

SEQ ID NO: 843153 - protein, 192 aa, Homo sapiens
GRVGRPTRPLELSENRIFGGLDMLAEKLPNLTHLNLSGNKLKDISTLEPLKKLECLKSLDLFNCEVTNLNDYRESVFKLLPQLTYLDGYDREDQEAPDSDAEVDGVDEEEEDEEGEDEEDEDDEDGEEEEFDEEDDEDEDVEGDEDDDEVSEEEEEFGLDEEDEDEDEDEEEEEGGKGEKRKRETDDEGEDD

SEQ ID NO: 843154 - protein, 176 aa, Homo sapiens
EIEYESLEFYLFKRWICYLYSFGLGVVVFDPFLQKKLECLKSLDLFNCEVTNLNDYRESVFKLLPQLTYLDGYDREDQEAPDSDAEVDGVDEEEEDEEGEDEEDEDDEDGEEEEFDEEDDEDEDVEGDEDDDEVSEEEEEFGLDEEDEDEDEDEEEEEGGKGEKRKRETDDEGEDD

SEQ ID NO: 843155 - protein, 156 aa, Homo sapiens
DRSERIPSAPCESLKKLECLKSLDLFNCEVTNLNDYRESVFKLLPQLTYLDGYDREDQEAPDSDAEVDGVDEEEEDEEGEDEEDEDDEDGEEEEFDEEDDEDEDVEGDEDDDEVSEEEEEFGLDEEDEDEDEDEEEEEGGKGEKRKRETDDEGEDD

SEQ ID NO: 843156 - protein, 103 aa, Homo sapiens
MLAEKLPNLTHLNLSGNKLKDISTLEPLKKLECLKSLDLFNCEVTNLNDYRESVLTRKHLTQMPRWMVWMKRRRTKKEKMRKTRTMRMVKKRSLMKKMMKMKM

SEQ ID NO: 843157 - protein, 133 aa, Homo sapiens
TRRPRWMVWMKRNSKFTNSAVKPSIFPSFDLQLSKTSSRSDAEVDGVDEEEEDEEGEDEEDEDDEDGEEEEFDEEDDEDEDVEGDEDDDEVSEEEEEFGLDEEDEDEDEDEEEEEGGKGEKRKRETDDEGEDD

SEQ ID NO: 843158 - protein, 67 aa, Homo sapiens
TSAGLFGTRDDEDEDVEGDEDDDEVSEEEEEFGLDEEDEDEDEDEEEEEGGKGEKRKRETDDEGEDD

SEQ ID NO: 843159 - protein, 145 aa, Homo sapiens
QRWSSALTADPSKSDGPAQTYQDQWEDRIQVWHAEHRGMLKDNAMLEYLKIAQDLEMYGINYFEIKNKKGTDLWLGVDALGLNIYEKDDEDEDVEGDEDDDEVSEEEEEFGLDEEDEDEDEDEEEEEGGKGEKRKRETDDEGEDD

SEQ ID NO: 843160 - protein, 155 aa, Homo sapiens
MDMKRRIHLELRNRTPAAVRELVLDNCKSNDGKIEGLTAEFVNLEFLSLINVGLISVSNLPKLPKLKKLELSENRIFGGLDMLAEKLPNLTHLNLSGNKLKDISTLEPLKKLECLKSLDLFNCEVTNLNDYRESVFLGNLPPSLWTSPQQNCKRC

SEQ ID NO: 843161 - protein, 144 aa, Homo sapiens
MDMKRRIHLELRNRTPAAVRELVLDNCKSNDGKIEGLTAEFVNLEFLSLINVGLISVSNLPKLPKLKKLELSENRIFGGLDMLAEKLPNLTHLNLSGNKLKDISTLEPLPKNSSCDIPPSFHVVPLGNLPPSLWTSPQQNCKRC

SEQ ID NO: 843162 - protein, 251 aa, Homo sapiens; identical to SEQ ID NO: 820284

SEQ ID NO: 843163 - protein, 165 aa, Homo sapiens
GRVGRPTRPLELSENRIFGGLDMLAEKLPNLTHLNLSGNKLKDISTLEPLKKLECLKSLDLFNCEVTNLNDYRESVFKLLPQLTYLDGYDREDQEAPDSDAEVDGVDEEEEDEEGEEKEEEEEERKKEKEDRRKEDRRRKEEKKNKEQEERRKKKRKKRKKKEKK

SEQ ID NO: 843164 - protein, 251 aa, Homo sapiens; identical to SEQ ID NO: 820284

SEQ ID NO: 843165 - protein, 251 aa, Homo sapiens; identical to SEQ ID NO: 820284

SEQ ID NO: 843166 - protein, 251 aa, Homo sapiens; identical to SEQ ID NO: 820284

SEQ ID NO: 843167 - protein, 196 aa, Homo sapiens
MDMKRRIHLELRNRTPAAVRELVLDNCKSNDGKIEGLTAEFVNLEFLSLINVGLISVSNLPKLPKLKKLELSENRIFGGLDMLAEKLPNLTHLNLSGNKLKDISTLEPLKKLECLKSLDLFNCEVTNLNDYRESVFKLLPQLTYLDGYDREDQEAPDSDAEVDGVDEEEEDEEGEDEEDEDDEDGEEEEFDEEEDD

SEQ ID NO: 843168 - protein, 250 aa, Homo sapiens
MDMKRRIHLELRNRTPAAVRELVLDNCKSNDGKIEGLTAEFVNLEFLSLINVGLISVSNLPKLPKLKKLELSENRIFGGLDMLAEKLPNLTHLNLSGNKLKDISTLEPLKKLECLKSLDLFNCEVTNLNDYRESVFKLLPQLTYLDGYDREDQEAPDSDAEVDGVDEEEEDEEGEDEEDEDDEDGEEEEFDEEDDEDEDVEGDEDDDEVSEERRRIWAVMKTMKIRIRIKRTKNVGIVKRGRVPLMNEDF

SEQ ID NO: 843169 - protein, 199 aa, Homo sapiens
MDMKRRIHLELRNRTPAAVRELVLDNCKSNDGKIEGLTAEFVNLEFLSLINVGLISVSNLPKLPKLKKLELSENRIFGGLDMLAEKLPNLTHLNLSGNKLKDISTLEPLKKLECLKSLDLFNCEVTNLNDYRESVFKLLPQLTYLDGYDREDQEAPDSDAEVDGVDEEEEDEEGEDEEDEDDEDGEEEEFDEEGRRIWT

SEQ ID NO: 843170 - protein, 251 aa, Homo sapiens; identical to SEQ ID NO: 820284

SEQ ID NO: 843171 - protein, 276 aa, Homo sapiens
EAEEEQEENLEASGDYEIFRKEEGNMDMKRRIHLELRNRTPAAVRELVLDNCKSNDGKIEGLTAEFVNLEFLSLINVGLISVSNLPKLPKLKKLELSENRIFGGLDMLAEKLPNLTHLNLSGNKLKDISTLEPLKKLECLKSLDLFNCEVTNLNDYRESVFKLLPQLTYLDGYDREDQEAPDSDAEVDGVDEEEEDEEGEDEEDEDDEDGEEEEFDEEDDEDEDVEGDEDDDEVSEEEEEFGLDEEDEDEDEDEEEEEGGKGEKRKRETDDEGEDD

SEQ ID NO: 843172 - protein, 215 aa, Homo sapiens
TRGSRLVQPFLSLINVGLISVSNLPKLPKLKKLELSENRIFGGLDMLAEKLPNLTHLNLSGNKLKDISTLEPLKKLECLKSLDLFNCEVTNLNDYRESVFKLLPQLTYLDGYDREDQEAPDSDAEVDGVDEEEEDEEGEDEEDEDDEDGEEEEFDEEDDEDEDVEGDEDDDEVSEEEEEFGLDEEDEDEDEDEEEEEGGKGEKRKRETDDEGEDD

SEQ ID NO: 843173 - protein, 160 aa, Homo sapiens
MVFYRIPTLKDISTLEPLKKLECLKSLDLFNCEVTNLNDYRESVFKLLPQLTYLDGYDREDQEAPDSDAEVDGVDEEEEDEEGEDEEDEDDEDGEEEEFDEEDDEDEDVEGDEDDDEVSEEEEEFGLDEEDEDEDEDEEEEEGGKGEKRKRETDDEGEDD

SEQ ID NO: 843174 - protein, 184 aa, Homo sapiens
MDMKRRIHLELRNRTPAAVRELVLDNCKSNDGKIEGLTAEFVNLEFLSLINVGLISVSNLPKLPKLKKLELSENRIFGGLDMLAEKLPNLTHLNLSGNKLKDISTLEPLKKLECLKSLDLFNCEVTNLNDYRESVLTRKHLTQMPRWMVWMKRRRTKKEKMRKTRTMRMVKKRSLMKKMMKMKM

SEQ ID NO: 843175 - protein, 204 aa, Homo sapiens
RPPTTTKFAAASTKLKDISTLEPLSLFPLKFRCVRFGSFSANMSSLNLSGNKLKDISTLEPLKKLECLKSLDLFNCEVTNLNDYRESVFKLLPQLTYLDGYDREDQEAPDSDAEVDGVDEEEEDEEGEDEEDEDDEDGEEEEFDEEDDEDEDVEGDEDDDEVSEEEEEFGLDEEDEDEDEDEEEEEGGKGEKRKRETDDEGEDD

SEQ ID NO: 843176 - protein, 170 aa, Homo sapiens
MTIPCTRRDTNLNLSGNKLKDISTLEPLKKLECLKSLDLFNCEVTNLNDYRESVFKLLPQLTYLDGYDREDQEAPDSDAEVDGVDEEEEDEEGEDEEDEDDEDGEEEEFDEEDDEDEDVEGDEDDDEVSEEEEEFGLDEEDEDEDEDEEEEEGGKGEKRKRETDDEGEDD

SEQ ID NO: 843177 - protein, 160 aa, Homo sapiens
DGVLEDPYSERHQDLGTLKKLECLKSLDLFNCEVTNLNDYRESVFKLLPQLTYLDGYDREDQEAPDSDAEVDGVDEEEEDEEGEDEEDEDDEDGEEEEFDEEDDEDEDVEGDEDDDEVSEEEEEFGLDEEDEDEDEDEEEEEGGKGEKRKRETDDEGEDD

SEQ ID NO: 843178 - protein, 145 aa, Homo sapiens
SKDPLHSQIITIHLFNCEVTNLNDYRESVFKLLPQLTYLDGYDREDQEAPDSDAEVDGVDEEEEDEEGEDEEDEDDEDGEEEEFDEEDDEDEDVEGDEDDDEVSEEEEEFGLDEEDEDEDEDEEEEEGGKGEKRKRETDDEGEDD

SEQ ID NO: 843179 - protein, 77 aa, Homo sapiens
QLQNYSSLLNDYISGKLNWSFCVVYAQMERLPWLDGFLVSLLESERSLLDKEKMRKTRTMRMVKKRSLMKKMMKMKM

SEQ ID NO: 843180 - protein, 144 aa, Homo sapiens; identical to SEQ ID NO: 843161

SEQ ID NO: 843181 - protein, 84 aa, Homo sapiens
VMVFYRIPTLKDISTLEPLKKLECLKSLDLFNCEVTNLNDYRESVFKLLPQLTYLDGYDREDQEAPDSDAEVDGVDEEEEDEGE

SEQ ID NO: 843182 - protein, 506 aa, Homo sapiens
MDDYMVLRMIGEGSFGRALLVQHESSNQMFAMKEIRLPKSFSNTQNSRKEAVLLAKMKHPNIVAFKESFEAEGHLYIVMEYCDGGDLMQKIKQQKGKLFPEDMILNWFTQMCLGVNHIHKKRVLHRDIKSKNIFLTQNGKVKLGDFGSARLLSNPMAFACTYVGTPYYVPPEIWENLPYNNKSDIWSLGCILYELCTLKHPFQANSWKNLILKVCQGCISPLPSHYSYELQFLVKQMFKRNPSHRPSATTLLSRGIVARLVQKCLPPEIIMEYGEEVLEEIKNSKHNTPRKKTNPSRIRIALGNEASTVQEEEQDRKGSHTDLESINENLVESALRRVNREEKGNKSVHLRKASSPNLHRRQWEKNVPNTALTALENASILTSSLTAEDDRGGSVIKYSKNTTRKQWLKETPDTLLNILKNADLSLAFQTYTIYRPGSEGFLKGPLSEETEASDSVDGGHDSVILDPERLEPGLDEEDTDFEEEDDNPDWVSELKKRAGWQGLCDR

SEQ ID NO: 843183 - protein, 461 aa, Homo sapiens
MDDYMVLRMIGEGSFGRALLVQHESSNQMFAMKEIRLPKSFSNTQNSRKEAVLLAKMKHPNIVAFKESFEAEGHLYIVMEYCDGGDLMQKIKQQKGKLFPEDMILNWFTQMCLGVNHIHKKRVLHRDIKSKNIFLTQNGKVKLGDFGSARLLSNPMAFACTYVGTPYYVPPEIWENLPYNNKSDIWSLGCILYELCTLKHPFQANSWKNLILKVCQGCISPLPSHYSYELQFLVKQMFKRNPSHRPSATTLLSRGIVARLVQKCLPPEIIMEYGEEVLEEIKNSKHNTPRKKTNPSRIRIALGNEASTVQEEEQDRKGSHTDLESINENLVESALRRVNREEKGNKSVHLRKASSPNLHRRQWEKNVPNTALTALENASILTSSLTAEDDRGSEGFLKGPLSEETEASDSVDGGHDSVILDPERLEPGLDEEDTDFEEEDDNPDWVSELKKRAGWQGLCDR

SEQ ID NO: 843184 - protein, 506 aa, Homo sapiens; identical to SEQ ID NO: 843182

SEQ ID NO: 843185 - protein, 444 aa, Homo sapiens
MDDYMVLRMIGEGSFGRALLVQHESSNQMFAMKEIRLPKSFSNTQNSRKEAVLLAKMKHPNIVAFKESFEAEGHLYIVMEYCDGGDLMQKIKQQKGKLFPEDMILNWFTQMCLGVNHIHKKRVLHRDIKSKNIFLTQNGKVKLGDFGSARLLSNPMAFACTYVGTPYYVPPEIWENLPYNNKSDIWSLGCILYELCTLKHPFQANSWKNLILKVCQGCISPLPSHYSYELQFLVKQMFKRNPSHRPSATTLLSRGIVARLVQKCLPPEIIMEYGEEVLEEIKNSKHNTPRKKQEEEQDRKGSHTDLESINENLVESALRRVNREEKGNKSVHLRKASSPNLHRRQWEKNVPNTALTALENASILTSSLTAEDDRGSEGFLKGPLSEETEASDSVDGGHDSVILDPERLEPGLDEEDTDFEEEDDNPDWVSELKKRAGWQGLCDR

SEQ ID NO: 843186 - protein, 273 aa, Homo sapiens
MDDYMVLRMIGEGSFGRALLVQHESSNQMFAMKEIRLPKSFSNTQNSRKEAVLLAKMKHPNIVAFKESFEAEGHLYIVMEYCDGGDLMQKIKQQKGKLFPEDMILNWFTQMCLGVNHIHKKRVLHRDIKSKNIFLTQNGKVKLGDFGSARLLSNPMAFACTYVGTPYYVPPEIWENLPYNNKSDIWSLGCILYELCTLKHPFQANSWKNLILKVCQGCISPLPSHYSYELQFLVKQMFKRNPSHRPSATTLLSRGIVARLVQKCLPPEIIMNM

SEQ ID NO: 843187 - protein, 506 aa, Homo sapiens; identical to SEQ ID NO: 843182

SEQ ID NO: 843188 - protein, 493 aa, Homo sapiens
MDDYMVLRMIGEGSFGRALLVQHESSNQMFAMKEIRLPKSFSNTQNSRKEAVLLAKMKHPNIVAFKESFEAEGHLYIVMEYCDGGDLMQKIKQQKGKLFPEDMILNWFTQMCLGVNHIHKKRVLHRDIKSKNIFLTQNGKVKLGDFGSARLLSNPMAFACTYVGTPYYVPPEIWENLPYNNKSDIWSLGCILYELCTLKHPFQANSWKNLILKVCQGCISPLPSHYSYELQFLVKQMFKRNPSHRPSATTLLSRGIVARLVQKCLPPEIIMEYGEEVLEEIKNSKHNTPRKKTNPSRIRIALGNEASTVQEEEQDRKGSHTDLESINENLVESALRRVNREEKGNKSVHLRKASSPNLHRRQWEKNVPNTALTALENASILTSSLTAEDDRGGSVIKYSKNTTRKQWLKETPDTLLNILKNADLSLAFQTYTIYRPEPRLGVRAEEASWMARPVRQIMPEEMFLSHAEESLHSGVHAEMIMSSCDVYFPLETE

SEQ ID NO: 843189 - protein, 497 aa, Homo sapiens
MDDYMVLRMIGEGSFGRALLVQHESSNQMFAMKEIRLPKSFSNTQNSRKEAVLLAKMKHPNIVAFKESFEAEGHLYIVMEYCDGGDLMQKIKQQKGKLFPEDMILNWFTQMCLGVNHIHKKRVLHRDIKSKNIFLTQNGKVKLGDFGSARLLSNPMAFACTYVGTPYYVPPEIWENLPYNNKSDIWSLGCILYELCTLKHPFQANSWKNLILKVCQGCISPLPSHYSYELQFLVKQMFKRNPSHRPSATTLLSRGIVARLVQKCLPPEIIMEYGEEVLEEIKNSKHNTPRKKTNPSRIRIALGNEASTVQEEEQDRKGSHTDLESINENLVESALRRVNREEKGNKSVHLRKASSPNLHRRQWEKNVPNTALTALENASILTSSLTAEDDRGGSVIKYSKNTTRKQWLKETPDTLLNILKNADLSLAFQTYTIYRPGSEGFLKGPLSEETEASDSVDGGHDSVILDPERLEPGLDEEDTYVVICIESCSWGWGCVCV

SEQ ID NO: 843190 - protein, 140 aa, Homo sapiens
MNDCIIRGDLANVRVGRHCVVKSRSVIRPPFKKFSKGVAFFPLHIGDHVFIEEDCVVNAAQIGSYVHVGKNCVIGRRCVLKDCCKILDNTVLPPETVVPPFTVFSGCPGLFSGELPECTQELMIDVTKSYYQKFLPLTQV

SEQ ID NO: 843191 - protein, 182 aa, Homo sapiens
MELGELLYNKSEYIETASGNKVSRQSVLCGSQNIVLNGKTIVMNDCIIRGDLANVRVGRHCVVKSRSVIRPPFKKFSKGVAFFPLHIGDHVFIEEDCVVNAAQIGSYVHVGKNCVIGRRCVLKDCCKILDNTVLPPETVVPPFTVFSGCPGLFSGELPECTQELMIDVTKSYYQKFLPLTQV

SEQ ID NO: 843192 - protein, 182 aa, Homo sapiens; identical to SEQ ID NO: 843191

SEQ ID NO: 843193 - protein, 182 aa, Homo sapiens; identical to SEQ ID NO: 843191

SEQ ID NO: 843194 - protein, 182 aa, Homo sapiens; identical to SEQ ID NO: 843191

SEQ ID NO: 843195 - protein, 182 aa, Homo sapiens; identical to SEQ ID NO: 843191

SEQ ID NO: 843196 - protein, 144 aa, Homo sapiens
MAMARLGSWLGEAQWLALVSLFVAALATVGLYLAQWALARARPQPQRRAVEPGEGPRPGSDALLSWILTLGSWRSQWQAAWVTALNEEAERKGVLQALGSARDRLAVGGTVRSAHPRQPVPALPGVPGRIPVPDRTLTELAHDT

SEQ ID NO: 843197 - protein, 128 aa, Homo sapiens
MLLENIILLLLATDFLQGASWTSLQTIAGVLSGFLIAQQASTTVTLRPAVGPSKPAPAPLTWGLVLLQHGPGQRFPSPLQQLLPSLQSLLSVTHTLKRCLEVASGSFLAHSSRGLDVACVSGLDLGKE

SEQ ID NO: 843198 - protein, 117 aa, Homo sapiens [sequence omitted]

SEQ ID NO: 843199 - protein, 483 aa, Homo sapiens
MKEEKEHRPKEKRVTLLTPAGATGSGGGTSGDSSKGEDKQDRNKEKKEALSKVVIRRLPPTLTKEQLQEHLQPMPEHDYFEFFSNDTSLYPHMYARAYINFKNQEDIILFRDRFDGYVFLDNKGQEYPAIVEFAPFQKAAKKKTKKRDTKVGTIDDDPEYRKFLESYATDNEKMTSTPETLLEEIEAKNRELIAKKTTPLLSFLKNKQRMREEKREERRRREIERKRQREEERRKWKEEEKRKRKDIEKLKKIDRIPERDKLKDEPKIKVHRFLLQAVNQKNLLKKPEKGDEKELDKREKAKKLDKENLSDERASGQSCTLPKRSDSELKDEKPKRPEDESGRDYREREREYERDQERILRERERLKRQEEERRRQKERYEKEKTFKRKEEEMKKEKDTLRDKGKKAESTESIGSSEKTEKKEEVVKRDRIRNKDRPAMQLYQPGARSRNRLCPPDDSTKSGDSAAERKQESGISHRKEGGEE

SEQ ID NO: 843200 - protein, 483 aa, Homo sapiens; identical to SEQ ID NO: 843199

SEQ ID NO: 843201 - protein, 479 aa, Homo sapiens
KNVTARYEAGVVEKEHRPKEKRVTLLTPAGATGSGGGTSGDSSKGEDKQDRNKEKKEALSKVVIRRLPPTLTKEQLQEHLQPMPEHDYFEFFSNDTSLYPHMYARAYINFKNQEDIILFRDRFDGYVFLDNKGQEYPAIVEFAPFQKAAKKKTKKRDTKVGTIDDDPEYRKFLESYATDNEKMTSTPETLLEEIEAKNRELIAKKTTPLLSFLKNKQRMREEKREERRRREIERKRQREEERRKWKEEEKRKRKDIEKLKKIDRIPERDKLKDEPKIKLLKKPEKGDEKELDKREKAKKLDKENLSDERASGQSCTLPKRSDSELKDEKPKRPEDESGRDYREREREYERDQERILRERERLKRQEEERRRQKERYEKEKTFKRKEEEMKKEKDTLRDKGKKAESTESIGSSEKTEKKEEVVKRDRIRNKDRPAMQLYQPGARSRNRLCPPDDSTKSGDSAAERKQESGISHRKEGGEE

SEQ ID NO: 843202 - protein, 483 aa, Homo sapiens; identical to SEQ ID NO: 843199

SEQ ID NO: 843203 - protein, 256 aa, Homo sapiens
MKEEKEHRPKEKRVTLLTPAGATGSGGGTSGDSSKGEDKQDRNKEKKEALSKVVIRRLPPTLTKEQLQEHLQPMPEHDYFEFFSNDTSLYPHMYARAYINFKNQEDIILFRDRFDGYVFLDNKGQEYPAIVEFAPFQKAAKKKTKKRDTKVGTIDDDPEYRKFLESYATDNEKMTSTPETLLEEIEAKNRELIAKKTTPLLSFLKNKQRMREEKRDDRGGERHSNETRPEKREGDWDERERKEDLKAEDDESEGLW

SEQ ID NO: 843204 - protein, 136 aa, Homo sapiens
KNVTARYEAGVVEKEHRPKEKRVTLLTPAGATGSGGGTSGDSSKGEDKQDRNKEKKEALSKVVIRRLPPTLTKEQLQEHLQPMPEHDYFEFFSNDTSLYPHMYARAYINFKNQEDIILFRDRFDGYVFLDNKGESW

SEQ ID NO: 843205 - protein, 470 aa, Homo sapiens
MKEEKEHRPKEKRVTLLTPAGATGSGGGTSGDSSKGEDKQDRNKEKKEALSKVVIRRLPPTLTKEQLQEHLQPMPEHDYFEFFSNDTSLYPHMYARAYINFKNQEDIILFRDRFDGYVFLDNKGQEYPAIVEFAPFQKAAKKKTKKRDTKVGTIDDDPEYRKFLESYATDNEKMTSTPETLLEEIEAKNRELIAKKTTPLLSFLKNKQRMREEKREERRRREIERKRQREEERRKWKEEEKRKRKDIEKLKKIDRIPERDKLKDEPKIKLLKKPEKGDEKELDKREKAKKLDKENLSDERASGQSCTLPKRSDSELKDEKPKRPEDESGRDYREREREYERDQERILRERERLKRQEEERRRQKERYEKEKTFKRKEEEMKKEKDTLRDKGKKAESTESIGSSEKTEKKEEVVKRDRIRNKDRPAMQLYQPGARSRNRLCPPDDSTKSGDSAAERKQESGISHRKEGGEE

SEQ ID NO: 843206 - protein, 483 aa, Homo sapiens; identical to SEQ ID NO: 843199

SEQ ID NO: 843207 - protein, 500 aa, Homo sapiens
MKEEKEHRPKEKRVTLLTPAGATGSGGGTSGDSSKGEDKQDRNKEKKEALSKVVIRRLPPTLTKEQLQEHLQPMPEHDYFEFFSNDTSLYPHMYARAYINFKNQEDIILFRDRFDGYVFLDNKGQEYPAIVEFAPFQKAAKKKTKKRDTKVGTIDDDPEYRKFLESYATDNEKMTSTPETLLEEIEAKNRELIAKKTTPLLSFLKNKQRMREEKREERRRREIERKRQREEERRKWKEEEKRKRKDIEKLKKIDRIPERDKLKDEPKIKVHRFLLQAVNQKNVRTKYMNRASSIMSHTQLLKKPEKGDEKELDKREKAKKLDKENLSDERASGQSCTLPKRSDSELKDEKPKRPEDESGRDYREREREYERDQERILRERERLKRQEEERRRQKERYEKEKTFKRKEEEMKKEKDTLRDKGKKAESTESIGSSEKTEKKEEVVKRDRIRNKDRPAMQLYQPGARSRNRLCPPDDSTKSGDSAAERKQESGISHRKEGGEE

SEQ ID NO: 843208 - protein, 455 aa, Homo sapiens
MKEEKEHRPKEKRVTLLTPAGATGSGGGTSGDSSKGEDKQDRNKEKKEALSKVVIRRLPPTLTKEQLQEHLQPMPEHDYFEFFSNDTSLYPHMYARAYINFKNQEDIILFRDRFDGYVFLDNKGQEYPAIVEFAPFQKAAKKKTKKRDTKVGTIDDDPEYRKFLESYATDNEKMTSTPETLLEEILSFLKNKQRMREEKREERRRREIERKRQREEERRKWKEEEKRKRKDIEKLKKIDRIPERDKLKDEPKIKLLKKPEKGDEKELDKREKAKKLDKENLSDERASGQSCTLPKRSDSELKDEKPKRPEDESGRDYREREREYERDQERILRERERLKRQEEERRRQKERYEKEKTFKRKEEEMKKEKDTLRDKGKKAESTESIGSSEKTEKKEEVVKRDRIRNKDRPAMQLYQPGARSRNRLCPPDDSTKSGDSAAERKQESGISHRKEGGEE

SEQ ID NO: 843209 - protein, 128 aa, Homo sapiens
LINLESFCLMQTGPFPSLSFFSKVPKGAERPLFPICSTELQCFLVIQSTSPQSCKTEKPNLQILYFLYDPQKHGETKGTISHRIKRMERGRNMNYRIEENGQKIENKRRRGNLLLPLSGKESDRNISY

SEQ ID NO: 843210 - protein, 108 aa, Homo sapiens
MHCPGSCRTPRVGRGRWLSRSSQVPATAVRDCPPLGIMCVGPGSTGVGAGDPRPRILRALPPFPGPRWPVGMRRAGRQSFGPKAGVGGSPLKFGAVSVVVAEDRRLGS

SEQ ID NO: 843211 - protein, 663 aa, Homo sapiens
MEAVLPIMSQFPEIETCVECSAKNLRNISELFYYAQKAVLHPTAPLYDPEAKQLRPACAQALTRIFRLSDQDLDQALSDEELNAFQKSCFGHPLAPQALEDVKTVVCRNVAGGVREDRLTLDGEAGARLCLGSVGRGLCLVLPLLCLGAGFLFLNTLFIQRGRHETTWTILRRFGYSDALELTADYLSPLIHVPPGCSTELNHLGYQFVQRVFEKHDQDRDGALSPVELQSLFSVFPAAPWGPELPRTVRTEAGRLPLHGYLCQWTLVTYLDVRSCLGHLGYLGYPTLCEQDQAHAITVTREKRLDQEKGQTQRSVLLCKVVGARGVGKSAFLQAFLGRGLGVSTLDSPTTPGAPGAGQGNLGGTAASECQDFTFPHQDTREQPPGYAIDTVQVNGQEKYLIVSAGAARPVPEGGPGDTQACLADLAQHGPRGTEPQGPFLRPLLSQLCEVGTDGLLATSLDATCDVACLMFDGSDPKSFAHCASVYKHHYMDGQTPCLFVSSKADLPEGVAVSGPSPAEFCRKHRLPAPVPFSCAGPAEPSTTIFTQLATMAAFPWVPSSAALGTSSVCHPSSGQRWCQAWNWGLAVSVIRAVGSSGVRPGTGARVAGWSFVWQMILLSCRHLVHAELHPSSFWLRGLLGVVGAAVAAVLSFSLYRVLVKSQ

SEQ ID NO: 843212 - protein, 653 aa, Homo sapiens
SGGTGSAGRARGQSERLEDQVGAGFRVGERLRAAAMRRDVRILLLGEAQVGKTSLILSLVGEEFPEEVPPRAEEITIPADVTPEKVPTHIVDYSEAEQTDEELREEIHKANVVCVVYDVSEEATIEKIRTKWIPLVNGGTTQGPRVPIILVGNKSDLRSGSSMEAVLPIMSQFPEIETCVECSAKNLRNISELFYYAQKAVLHPTAPLYDPEAKQLRPACAQALTRIFRLSDQDLDQALSDEELNAFQKSCFGHPLAPQALEDVKTVVCRNVAGGVREDRLTLDGFLFLNTLFIQRGRHETTWTILRRFGYSDALELTADYLSPLIHVPPGCSTELNHLGYQFVQRVFEKHDQDRDGALSPVELQSLFSVFPAAPWGPELPRTVRTEAGRLPLHGYLCQWTLVTYLDVRSCLGHLGYLGYPTLCEQDQAHAITVTREKRLDQEKGQTQRSVLLCKVVGARGVGKSAFLQAFLGRGLGHQDTREQPPGYAIDTVQVNGQEKYLILCEVGTDGLLATSLDATCDVACLMFDGSDPKSFAHCASVYKHHYMDGQTPCLFVSSKADLPEGVAVSGPSPAEFCRKHRLPAPVPFSCAGPAEPSTTIFTQLATMAAFPHLVHAELHPSSFWLRGLLGVVGAAVAAVLSFSLYRVLVKSQ

SEQ ID NO: 843213 - protein, 491 aa, Homo sapiens
MEAVLPIMSQFPEIETCVECSAKNLRNISELFYYAQKAVLHPTAPLYDPEAKQLRPACAQALTRIFRLSDQDLDQALSDEELNAFQKSCFGHPLAPQALEDVKTVVCRNVAGGVREDRLTLDGFLFLNTLFIQRGRHETTWTILRRFGYSDALELTADYLSPLIHVPPGCSTELNHLGYQFVQRVFEKHDQDRDGALSPVELQSLFSVFPAAPWGPELPRTVRTEAGRLPLHGYLCQWTLVTYLDVRSCLGHLGYLGYPTLCEQDQAHAITVTREKRLDQEKGQTQRSVLLCKVVGARGVGKSAFLQAFLGRGLGHQDTREQPPGYAIDTVQVNGQEKYLILCEVGTDGLLATSLDATCDVACLMFDGSDPKSFAHCASVYKHHYMDGQTPCLFVSSKADLPEGVAVSGPSPAEFCRKHRLPAPVPFSCAGPAEPSTTIFTQLATMAAFPHLVHAELHPSSFWLRGLLGVVGAAVAAVLSFSLYRVLVKSQ

SEQ ID NO: 843214 - protein, 491 aa, Homo sapiens; identical to SEQ ID NO: 843213

SEQ ID NO: 843215 - protein, 525 aa, Homo sapiens
MEAVLPIMSQFPEIETCVECSAKNLRNISELFYYAQKAVLHPTAPLYDPEAKQLRPACAQALTRIFRLSDQDLDQALSDEELNAFQKSCFGHPLAPQALEDVKTVVCRNVAGGVREDRLTLDGFLFLNTLFIQRGRHETTWTILRRFGYSDALELTADYLSPLIHVPPGCSTELNHLGYQFVQRVFEKHDQDRDGALSPVELQSLFSVFPAAPWGPELPRTVRTEAGRLPLHGYLCQWTLVTYLDVRSCLGHLGYLGYPTLCEQDQAHAITVTREKRLDQEKGQTQRSVLLCKVVGARGVGKSAFLQAFLGRGLGVSTLDSPTTPGAPGAGQGNLGGTAASECQDFTFPHQDTREQPPGYAIDTVQVNGQEKYLILCEVGTDGLLATSLDATCDVACLMFDGSDPKSFAHCASVYKHHYMDGQTPCLFVSSKADLPEGVAVSGPSPAEFCRKHRLPAPVPFSCAGPAEPSTTIFTQLATMAAFPHLVHAELHPSSFWLRGLLGVVGAAVAAVLSFSLYRVLVKSQ

SEQ ID NO: 843216 - protein, 359 aa, Homo sapiens
MRGRHETTWTILRRFGYSDALELTADYLSPLIHVPPGCSTELNHLGYQFVQRVFEKHDQDRDGALSPVELQSLFSVFPAAPWGPELPRTVRTEAGRLPLHGYLCQWTLVTYLDVRSCLGHLGYLGYPTLCEQDQAHAITVTREKRLDQEKGQTQRSVLLCKVVGARGVGKSAFLQAFLGRGLGHQDTREQPPGYAIDTVQVNGQEKYLILCEVGTDGLLATSLDATCDVACLMFDGSDPKSFAHCASVYKHHYMDGQTPCLFVSSKADLPEGVAVSGPSPAEFCRKHRLPAPVPFSCAGPAEPSTTIFTQLATMAAFPHLVHAELHPSSFWLRGLLGVVGAAVAAVLSFSLYRVLVKSQ

SEQ ID NO: 843217 - protein, 518 aa, Homo sapiens
MEAVLPIMSQFPEIETCVECSAKNLRNISELFYYAQKAVLHPTAPLYDPEAKQLRPACAQALTRIFRLSDQDLDQALSDEELNAFQKSCFGHPLAPQALEDVKTVVCRNVAGGVREDRLTLDGEAGCPPVPGECGEGAVPGAPLLCLGAGFLFLNTLFIQRGRHETTWTILRRFGYSDALELTADYLSPLIHVPPGCSTELNHLGYQFVQRVFEKHDQDRDGALSPVELQSLFSVFPAAPWGPELPRTVRTEAGRLPLHGYLCQWTLVTYLDVRSCLGHLGYLGYPTLCEQDQAHAITVTREKRLDQEKGQTQRSVLLCKVVGARGVGKSAFLQAFLGRGLGHQDTREQPPGYAIDTVQVNGQEKYLILCEVGTDGLLATSLDATCDVACLMFDGSDPKSFAHCASVYKHHYMDGQTPCLFVSSKADLPEGVAVSGPSPAEFCRKHRLPAPVPFSCAGPAEPSTTIFTQLATMAAFPHLVHAELHPSSFWLRGLLGVVGAAVAAVLSFSLYRVLVKSQ

SEQ ID NO: 843218 - protein, 491 aa, Homo sapiens; identical to SEQ ID NO: 843213

SEQ ID NO: 843219 - protein, 525 aa, Homo sapiens
MEAVLPIMSQFPEIETCVECSAKNLRNISELFYYAQKAVLHPTAPLYDPEAKQLRPACAQALTRIFRLSDQDLDQALSDEELNAFQKSCFGHPLAPQALEDVKTVVCRNVAGGVREDRLTLDGFLFLNTLFIQRGRHETTWTILRRFGYSDALELTADYLSPLIHVPPGCSTELNHLGYQFVQRVFEKHDQDRDGALSPVELQSLFSVFPAAPWGPELPRTVRTEAGRLPLHGYLCQWTLVTYLDVRSCLGHLGYLGYPTLCEQDQAHAITVTREKRLDQEKGQTQRSVLLCKVVGARGVGKSAFLQAFLGRGLGHQDTREQPPGYAIDTVQVNGQEKYLILCEVGTDGLLATSLDATCDVACLMFDGSDPKSFAHCASVYKVGPCRGHVAMGQGLSLQLCLGHPRTVPHTTLCPQHHYMDGQTPCLFVSSKADLPEGVAVSGPSPAEFCRKHRLPAPVPFSCAGPAEPSTTIFTQLATMAAFPHLVHAELHPSSFWLRGLLGVVGAAVAAVLSFSLYRVLVKSQ

SEQ ID NO: 843220 - protein, 548 aa, Homo sapiens
MEAVLPIMSQFPEIETCVECSAKNLRNISELFYYAQKAVLHPTAPLYDPEAKQLRPACAQALTRIFRLSDQDLDQALSDEELNAFQKSCFGHPLAPQALEDVKTVVCRNVAGGVREDRLTLDGFLFLNTLFIQRGRHETTWTILRRFGYSDALELTADYLSPLIHVPPGCSTELNHLGYQFVQRVFEKHDQDRDGALSPVELQSLFSVFPAAPWGPELPRTVRTEAGRLPLHGYLCQWTLVTYLDVRSCLGHLGYLGYPTLCEQDQAHAITVTREKRLDQEKGQTQRSVLLCKVVGARGVGKSAFLQAFLGRGLGHQDTREQPPGYAIDTVQVNGQEKYLILCEVGTDGLLATSLDATCDVACLMFDGSDPKSFAHCASVYKHHYMDGQTPCLFVSSKADLPEGVAVSGPSPAEFCRKHRLPAPVPFSCAGPAEPSTTIFTQLATMAAFPHLVHAELHPSSFWLRGLLGVVGAAVAAVLSFSLYSGGRHETTWTILRRFGYSDALELTADYLSPLIHVPPGCSTELNHLGYQFEGLYPPFLVLGGQWV

SEQ ID NO: 843221 - protein, 260 aa, Homo sapiens
MEAVLPIMSQFPEIETCVECSAKNLRNISELFYYAQKAVLHPTAPLYDPEAKQLRPACAQALTRIFRLSDQDLDQALSDEELNAFQKSCFGHPLAPQALEDVKTVVCRNVAGGVREDRLTLDGFLFLNTLFIQRGRHETTWTILTFGPRRAASLFLLAPGAAGGCRGRRGRSPQLLTLQGPGEEPVRPLVPKPPPLTWVCLAAGALQGQHSWGAGQAATPGTPLRRDFLFLKAVDLQRGLMLPCTALAPAGPPGWAVAGG

SEQ ID NO: 843222 - protein, 138 aa, Homo sapiens
MEAVLPIMSQFPEIETCVECSAKNLRNISELFYYAQKAVLHPTAPLYDPEAKQKSCFGHPLAPQALEDVKTVVCRNVAGGVREDRLTLDGFLFLNTLFIQRGRHETTWTILRRFGYSDALELTADYLSPLGSTPLSWS

SEQ ID NO: 843223 - protein, 209 aa, Homo sapiens
SGGTGSAGRARGQSERLEDQVGAGFRVGERLRAAAMRRDVRILLLGEAQVGKTSLILSLVGEEFPEEVPPRAEEITIPADVMGERVANPTIRGNKLQERPKPRREEGKPVRKGKIHKEFEKIRCEFPTGCALVGGSTNSDGGPRVCAPSHSIVGGTQGLETRARCGENVSCGSAVWFPRFLRSPRFSPEEIVERPWGVVRIGVRGQRNA

SEQ ID NO: 843224 - protein, 344 aa, Homo sapiens
SGGTGSAGRARGQSERLEDQVGAGFRVGERLRAAAMRRDVRILLLGEAQVGKTSLILSLVGEEFPEEVPPRAEEITIPADVTPEKVPTHIVDYSEAEQTDEELREEIHKANVVCVVYDVSEEATIEKIRTKWIPLVNGGTTQGPRVPIILVGNKSDLRSGSSMEAVLPIMSQFPEIETCVECSAKNLRNISELFYYAQKAVLHPTAPLYDPEAKQKSCFGHPLAPQALEDVKTVVCRNVAGGVREDRLTLDGFLFLNTLFIQRGRHETTWTILRRFGYSDAWDGWDMFPSDQCPGEEGQHWSPVAKVVSRTAEGPCGEKLRPQLANRNQEAADSLTGGDRDRRQ

SEQ ID NO: 843225 - protein, 457 aa, Homo sapiens
MEAVLPIMSQFPEIETCVELRPACAQALTRIFRLSDQDLDQALSDEELNAFQKSCFGHPLAPQALEDVKTVVCRNVAGGVREDRLTLDGFLFLNTLFIQRGRHETTWTILRRFGYSDALELTADYLSPLIHVPPGCSTELNHLGYQFVQRVFEKHDQDRDGALSPVELQSLFSVFPAAPWGPELPRTVRTEAGRLPLHGYLCQWTLVTYLDVRSCLGHLGYLGYPTLCEQDQAHAITVTREKRLDQEKGQTQRSVLLCKVVGARGVGKSAFLQAFLGRGLGHQDTREQPPGYAIDTVQVNGQEKYLILCEVGTDGLLATSLDATCDVACLMFDGSDPKSFAHCASVYKHHYMDGQTPCLFVSSKADLPEGVAVSGPSPAEFCRKHRLPAPVPFSCAGPAEPSTTIFTQLATMAAFPHLVHAELHPSSFWLRGLLGVVGAAVAAVLSFSLYRVLVKSQ

SEQ ID NO: 843226 - protein, 496 aa, Homo sapiens
MEAVLPIMSQFPEIETCVELRPACAQALTRIFRLSDQDLDQALSDEELNAFQVCPCPTLGAQPPGTSAAVSDWNGSSPGGWLTPNNFSRKQKSCFGHPLAPQALEDVKTVVCRNVAGGVREDRLTLDGFLFLNTLFIQRGRHETTWTILRRFGYSDALELTADYLSPLIHVPPGCSTELNHLGYQFVQRVFEKHDQDRDGALSPVELQSLFSVFPAAPWGPELPRTVRTEAGRLPLHGYLCQWTLVTYLDVRSCLGHLGYLGYPTLCEQDQAHAITVTREKRLDQEKGQTQRSVLLCKVVGARGVGKSAFLQAFLGRGLGHQDTREQPPGYAIDTVQVNGQEKYLILCEVGTDGLLATSLDATCDVACLMFDGSDPKSFAHCASVYKHHYMDGQTPCLFVSSKADLPEGVAVSGPSPAEFCRKHRLPAPVPFSCAGPAEPSTTIFTQLATMAAFPHLVHAELHPSSFWLRGLLGVVGAAVAAVLSFSLYRVLVKSQ

SEQ ID NO: 843227 - protein, 317 aa, Homo sapiens
LGRLLELLQRVFEKHDQDRDGALSPVELQSLFSVFPAAPWGPELPRTVRTEAGRLPLHGYLCQWTLVTYLDVRSCLGHLGYLGYPTLCEQDQAHAITVTREKRLDQEKGQTQRSVLLCKVVGARGVGKSAFLQAFLGRGLGHQDTREQPPGYAIDTVQVNGQEKYLILCEVGTDGLLATSLDATCDVACLMFDGSDPKSFAHCASVYKHHYMDGQTPCLFVSSKADLPEGVAVSGPSPAEFCRKHRLPAPVPFSCAGPAEPSTTIFTQLATMAAFPHLVHAELHPSSFWLRGLLGVVGAAVAAVLSFSLYRVLVKSQ

SEQ ID NO: 843228 - protein, 570 aa, Homo sapiens
MEAVLPIMSQFPEIETCVECSAKNLRNISELFYYAQKAVLHPTAPLYDPEAKQLRPACAQALTRIFRLSDQDLDQALSDEELNAFQKSCFGHPLAPQALEDVKTVVCRNVAGGVREDRLTLDGFLFLNTLFIQRGRHETTWTILRRFGYSDALELTADYLSPLIHVPPGCSTELNHLGYQFVQRVFEKHDQDRDGALSPVELQSLFSVFPAAPWGPELPRTVRTEAGRLPLHGYLCQWTLVTYLDVRSCLGHLGYLGYPTLCEQDQAHAITVTREKRLDQEKGQTQRSVLLCKVVGARGVGKSAFLQAFLGRGLGVSTLDSPTTPGAPGAGQGNLGGTAASECQDFTFPHQDTREQPPGYAIDTVQVNGQEKYLIVSAGAARPVPEGGPGDTQACLADLAQHGPRGTEPQGPFLRPLLSQLCEVGTDGLLATSLDATCDVACLMFDGSDPKSFAHCASVYKHHYMDGQTPCLFVSSKADLPEGVAVSGPSPAEFCRKHRLPAPVPFSCAGPAEPSTTIFTQLATMAAFPHLVHAELHPSSFWLRGLLGVVGAAVAAVLSFSLYRVLVKSQ

SEQ ID NO: 843229 - protein, 619 aa, Homo sapiens
MEAVLPIMSQFPEIETCVECSAKNLRNISELFYYAQKAVLHPTAPLYDPEAKQLRPACAQALTRIFRLSDQDLDQALSDEELNAFQKSCFGHPLAPQALEDVKTVVCRNVAGGVREDRLTLDGFLFLNTLFIQRGRHETTWTILRRFGYSDALELTADYLSPLIHVPPGCSTELNHLGYQFVQRVFEKHDQDRDGALSPVELQSLFSVFPAAPWGPELPRTVRTEAGRLPLHGYLCQWTLVTYLDVRSCLGHLGYLGYPTLCEQDQAHAITVTREKRLDQEKGQTQRSVLLCKVVGARGVGKSAFLQAFLGRGLGHQDTREQPPGYAIDTVQVNGQEKYLILCEVGTDGLLATSLDATCDVACLMFDGSDPKSFAHCASVYKHHYMDGQTPCLFVSSKADLPEGVAVSGPSPAEFCRKHRLPAPVPFSCAGPAEPSTTIFTQLATMAAFPWVPSSAALGTSSVCHPSSGQRWCQAWNWGLAVSVIRAVGSSGVRPGTGARVAGWSFVWQREAVPRLSLQGLASTGCASGLGSPPVGPCESRTWEGAQQQAGGMCLRYLQMILLSCRHLVHAELHPSSFWGTPLRRDFLFLKAVDLQRGLMLPCTALAPAGPPGWAVAGG

SEQ ID NO: 843230 - protein, 249 aa, Homo sapiens
MEAVLPIMSQFPEIETCVECSAKNLRNISELFYYAQKAVLHPTAPLYDPEAKQLRPACAQALTRIFRLSDQDLDQALSDEELNAFQKSCFGHPLAPQALEDVKTVVCRNVAGGVREDRLTLDGFLFLNTLFIQRGRHETTWTILRRFGYSDALELTADYLSPLIHVPPGCSTELNHLGYQFVQRVFEKHDQDRDGALSPVELQSLFSVFPAAPWGPELPRTVRTEAGRLPLHGYLCQWTERLCAGTFCF

SEQ ID NO: 843231 - protein, 69 aa, Homo sapiens
LGAGFLFLNTLFIQRGRHETTWTILRRFGYSDALELTADYLSPLVSDAGAVRPALPEGQELTADYLSPP

SEQ ID NO: 843232 - protein, 88 aa, Homo sapiens
MGVQGLWKLLECSGRQVSPEALEGKILAVGILNAALGLGVQGFGAGFLAGLCLGHSGICRMMVLGRGRGRYRISVTRFSKYSRPSVSP

SEQ ID NO: 843233 - protein, 873 aa, Homo sapiens
MHGMSFDVKSSPCEKLKTEKEPDATPPSPRTLLAMQAALLGSSSEEELESENRRQARGRNAPAAVDEGSISPRTLSAIKRALDDDEDVKVCAGDDVQTGGPGAEEMRINSSTENSDEGLKVRDGKGIPFTATLASSSVNSAEEHVASTNEGREPTDSVPKEQMSLVHVGTEAFPISDESMIKDRKDRLPLESAVVRHSDAPGLPNGRELTPASPTCTNSVSKNETHAEVLEQQNELCPYESKFDSSLLSSDDETKCKPNSASEVIGPVSLQETSSIVSVPSEAVDNVENVVSFNAKEHENFLETIQEQQTTESAGQDLISIPKAVEPMEIDSEESESDGSFIEVQSVISDEELQAEFPETSKPPSEQGEEELVGTREGEAPAESESLLRDNSERDDVDGEPQEAEKDAEDSLHEWQDINLEELETLESNLLAQQNSLKAQKQQQERIAATVTGQMFLESQELLRLFGIPYIQAPMEAEAQCAILDLTDQTSGTITDDSDIWLFGARHVYRNFFNKNKFVEYYQYVDFHNQLGLDRNKLINLAYLLGSDYTEGIPTVGCVTAMEILNEFPGHGLEPLLKFSEWWHEAQKNPKIRPNPHDTKVKKKLRTLQLTPGFPNPAVAEAYLKPVVDDSKGSFLWGKPDLDKIREFCQRYFGWNRTKTDESLFPVLKQLDAQQTQLRIDSFFRLAQQEKEDAKRIKSQRLNRAVTCMLRKEKEAAASEIEAVSVAMEKEFELLDKAKRKTQKRGITNTLEESSSLKRKRLSDSKRKNTCGGFLGETCLSESSDGSSSEDAESSSLMNVQRRTAAKEPKTSASDSQNSVKEAPVKNGGATTSSSSDSDDDGGKEKMVLVTARSVFGKKRRKLRRARGRKRKT

SEQ ID NO: 843234 - protein, 1032 aa, Homo sapiens
VDYYYKIRGRVDERMNQKQALQEEFFHNPQAIDIESEDFSSLPPEVKHEILTDMKEFTKRRRTLFEAMPEESDDFSQYQLKGLLKKNYLNQHIEHVQKEMNQQHSGHIRRQYEDEGGFLKEVESRRVVSEDTSHYILIKGIQAKTVAEVDSESLPSSSKMHGMSFDVKSSPCEKLKTEKEPDATPPSPRTLLAMQAALLGSSSEEELESENRRQARGRNAPAAVDEGSISPRTLSAIKRALDDDEDVKVCAGDDVQTGGPGAEEMRINSSTENSDEGLKVRDGKGIPFTATLASSSVNSAEEHVASTNEGREPTDSVPKEQMSLVHVGTEAFPISDESMIKDRKDRLPLESAVVRHSDAPGLPNGRELTPASPTCTNSVSKNETHAEVLEQQNELCPYESKFDSSLLSSDDETKCKPNSASEVIGPVSLQETSSIVSVPSEAVDNVENVVSFNAKEHENFLETIQEQQTTESAGQDLISIPKAVEPMEIDSEESESDGSFIEVQSVISDEELQAEFPETSKPPSEQGEEELVGTREGEAPAESESLLRDNSERDDVDGEPQEAEKDAEDSLHEWQDINLEELETLESNLLAQQNSLKAQKQQQERIAATVTGQMFLESQELLRLFGIPYIQAPMEAEAQCAILDLTDQTSGTITDDSDIWLFGARHVYRNFFNKNKFVEYYQYVDFHNQLGLDRNKLINLAYLLGSDYTEGIPTVGCVTAMEILNEFPGHGLEPLLKFSEWWHEAQKNPKIRPNPHDTKVKKKLRTLQLTPGFPNPAVAEAYLKPVVDDSKGSFLWGKPDLDKIREFCQRYFGWNRTKTDESLFPVLKQLDAQQTQLRIDSFFRLAQQEKEDAKRIKSQRLNRAVTCMLRKEKEAAASEIEAVSVAMEKEFELLDKAKRKTQKRGITNTLEESSSLKRKRLSDSKRKNTCGGFLGETCLSESSDGSSSEDAESSSLMNVQRRTAAKEPKTSASDSQNSVKEAPVKNGGATTSSSSDSDDDGGKEKMVLVTARSVFGKKRRKLRRARGRKRKT

SEQ ID NO: 843235 - protein, 856 aa, Homo sapiens
MGVQGLWKLLECSGRQVSPEALEGKILAVDISIWLNQALKGVRDRHGNSIENPHLLTLFHRLCKLLFFRIRPIFVFDGDAPLLKKQTLVKRRQRKDLASSDSRKTTEKLLKTFLKRQAIKTAFRSKRDEALPSLTQVRRENDLYVLPPLQEEEKHSSEEEDEKEWQERMNQKQALQEEFFHNPQAIDIESEDFSSLPPEVKHEILTDMKEFTKRRRTLFEAMPEESDDFSQYQLKGLLKKNYLNQHIEHVQKEMNQQHSGHIRRQYEDEGGFLKEVESRRVVSEDTSHYILIKGIQAKTVAEVDSESLPSSSKMHGMSFDVKSSPCEKLKTEKEPDATPPSPRTLLAMQAALLGSSSEEELESENRRQARGRNAPAAVDEGSISPRTLSAIKRALDDDEDVKVCAGDDVQTGGPGAEEMRINSSTENSDEGLKVRDGKGIPFTATLASSSVNSAEEHVASTNEGREPTDSVPKEQMSLVHVGTEAFPISDESMIKDRKDRLPLESAVVRHSDAPGLPNGRELTPASPTCTNSVSKNETHAEVLEQQNELCPYESKFDSSLLSSDDETKCKPNSASEVIGPVSLQETSSIVSVPSEAVDNVENVVSFNAKEHENFLETIQEQQTTESAGQDLISIPKAVEPMEIDSEESESDGSFIEVQSVISDEELQAEFPETSKPPSEQGEEELVGTREGEAPAESESLLRDNSERDDVDGEPQEAEKDAEDSLHEWQDINLEELETLESNLLAQQNSLKAQKQQQERIAATVTGQMFLESQELLRLFGIPYIQAPMEAEAQCAILDLTDQTSGTITDDSDIWLFGARHVYRNFFNKNKFVEYYQYVDFHNQLENGGMKLKKIQR

SEQ ID NO: 843236 - protein, 165 aa, Homo sapiens [sequence omitted]

SEQ ID NO: 843237 - protein, 1130 aa, Homo sapiens
MGVQGLWKLLECSGRQVSPEALEGKILAVDISIWLNQALKGVRDRHGNSIENPHLLTLFHRLCKLLFFRIRPIFVFDGDAPLLKKQTLVKRRQRKDLASSDSRKTTEKLLKTFLKRQAIKTAFRSKRDEALPSLTQVRRENDLYVLPPLQEEEKHSSEEEDEKEWQERMNQKQALQEEFFHNPQAIDIESEDFSSLPPEVKHEILTDMKEFTKRRRTLFEAMPEESDDFSQYQLKGLLKKNYLNQHIEHVQKEMNQQHSGHIRRQYEDEGGFLKEVESRRVVSEDTSHYILIKGIQAKTVAEVDSESLPSSSKMHGMSFDVKSSPCEKLKTEKEPDATPPSPRTLLAMQAALLGSSSEEELESENRRQARGRNAPAAVDEGSISPRTLSAIKRALDDDEDVKVCAGDDVQTGGPGAEEMRINSSTENSDEGLKVRDGKGIPFTATLASSSVNSAEEHVASTNEGREPTDSVPKEQMSLVHVGTEAFPISDESMIKDRKDRLPLESAVVRHSDAPGLPNGRELTPASPTCTNSVSKNETHAEVLEQQNELCPYESKFDSSLLSSDDETKCKPNSASEVIGPVSLQETSSIVSVPSEAVDNVENVVSFNAKEHENFLETIQEQQTTESAGQDLISIPKAVEPMEIDSEESESDGSFIEVQSVISDEELQAEFPETSKPPSEQGEEELVGTREGEAPAESESLLRDNSERDDVDGEPQEAEKDAEDSLHEWQDINLEELETLESNLLAQQNSLKAQKQQQERIAATVTGQMFLESQELLRLFGIPYIQAPMEAEAQCAILDLTDQTSGTITDDSDIWLFGARHVYRNFFNKNKFVEYYQYVDFHNQLGLDRNKLINLAYLLGSDYTEGIPTVGCVTAMEILNEFPGHGLEPLLKFSEWWHEAQKNPKIRPNPHDTKVKKKLRTLQLTPGFPNPAVAEAYLKPVVDDSKGSFLWGKPDLDKIREFCQRYFGWNRTKTDESLFPVLKQLDAQQTQLRIDSFFRLAQQEKEDAKRIKSQRLNRAVTCMLRKEKEAAASEIEAVSVAMEKEFELLDKAKRKTQKRGITNTLEESSSLKRKRLSDSKRKNTCGGFLGETCLSESSDGSSSEDAESSSLMNVQRRTAAKEPGGATTSSS

SEQ ID NO: 843238 - protein, 746 aa, Homo sapiens
MGVQGLWKLLECSGRQVSPEALEGKILAVDISIWLNQALKGVRDRHGNSIENPHLLTLFHRLCKLLFFRIRPIFVFDGDAPLLKKQTLVKRRQRKDLASSDSRKTTEKLLKTFLKRQAIKTAFRSKRDEALPSLTQVRRENDLYVLPPLQEEEKHSSEEEDEKEWQERMNQKQALQEEFFHNPQAIDIESEDFSSLPPEVKHEILTDMKEFTKRRRTLFEAMPEESDDFSQYQLKGLLKKNYLNQHIEHVQKEMNQQHSGHIRRQYEDEGGFLKEVESRRVVSEDTSHYILIKGIQAKTVAEVDSESLPSSSKMHGMSFDVKSSPCEKLKTEKEPDATPPSPRTLLAMQAALLGSSSEEELESENRRQARGRNAPAAVDEGSISPRTLSAIKRALDDDEDVKVCAGDDVQTGGPGAEEMRINSSTENSDEGLKVRDGKGIPFTATLASSSVNSAEEHVASTNEGREPTDSVPKEQMSLVHVGTEAFPISDESMIKDRKDRLPLESAVVRHSDAPGLPNGRELTPASPTCTNSVSKNETHAEVLEQQNELCPYESKFDSSLLSSDDETKCKPNSASEVIGPVSLQETSSIVSVPSEAVDNVENVVSFNAKEHENFLETIQEQQTTESAGQDLISIPKAVEPMEIDSEESESDGSFIEVQSVISDEELQAEFPETSKPPSEQGEEELVGTREGEAPAESESLLRDNSERDDVDGEPQEAEKDAEDSLHEWQDINLEELETLQPVLFLL

SEQ ID NO: 843239 - protein, 398 aa, Homo sapiens
MGVQGLWKLLECSGRQVSPEALEGKILAVDISIWLNQALKGVRDRHGNSIENPHLLTLFHRLCKLLFFRIRPIFVFDGDAPLLKKQTLVKRRQRKDLASSDSRKTTEKLLKTFLKRQAIKTAFRSKRDEALPSLTQVRRENDLYVLPPLQEEEKHSSEEEDEKEWQERMNQKQALQEEFFHNPQAIDIESEDFSSLPPEVKHEILTDMKEFTKRRRTLFEAMPEESDDFSQYQLKGLLKKNYLNQHIEHVQKEMNQQHSGHIRRQYEDEGGFLKEVESRRVVSEDTSHYILIKGIQAKTVAEVDSESLPSSSKMHGMSFDVKSSPCEKLKTEKEPDATPPSPRTLLAMQAALLGSSSEEELESENRRQARGRNAPHGPEEGHCKWELGLPKRPRAGAL

SEQ ID NO: 843240 - protein, 1186 aa, Homo sapiens
MGVQGLWKLLECSGRQVSPEALEGKILAVDISIWLNQALKGVRDRHGNSIENPHLLTLFHRLCKLLFFRIRPIFVFDGDAPLLKKQTLVKRRQRKDLASSDSRKTTEKLLKTFLKRQAIKTAFRSKRDEALPSLTQVRRENDLYVLPPLQEEEKHSSEEEDEKEWQERMNQKQALQEEFFHNPQAIDIESEDFSSLPPEVKHEILTDMKEFTKRRRTLFEAMPEESDDFSQYQLKGLLKKNYLNQHIEHVQKEMNQQHSGHIRRQYEDEGGFLKEVESRRVVSEDTSHYILIKGIQAKTVAEVDSESLPSSSKMHGMSFDVKSSPCEKLKTEKEPDATPPSPRTLLAMQAALLGSSSEEELESENRRQARGRNAPAAVDEGSISPRTLSAIKRALDDDEDVKVCAGDDVQTGGPGAEEMRINSSTENSDEGLKVRDGKGIPFTATLASSSVNSAEEHVASTNEGREPTDSVPKEQMSLVHVGTEAFPISDESMIKDRKDRLPLESAVVRHSDAPGLPNGRELTPASPTCTNSVSKNETHAEVLEQQNELCPYESKFDSSLLSSDDETKCKPNSASEVIGPVSLQETSSIVSVPSEAVDNVENVVSFNAKEHENFLETIQEQQTTESAGQDLISIPKAVEPMEIDSEESESDGSFIEVQSVISDEELQAEFPETSKPPSEQGEEELVGTREGEAPAESESLLRDNSERDDVDGEPQEAEKDAEDSLHEWQDINLEELETLESNLLAQQNSLKAQKQQQERIAATVTGQMFLESQELLRLFGIPYIQAPMEAEAQCAILDLTDQTSGTITDDSDIWLFGARHVYRNFFNKNKFVEYYQYVDFHNQLGLDRNKLINLAYLLGSDYTEGIPTVGCVTAMEILNEFPGHGLEPLLKFSEWWHEAQKNPKIRPNPHDTKVKKKLRTLQLTPGFPNPAVAEAYLKPVVDDSKGSFLWGKPDLDKIREFCQRYFGWNRTKTDESLFPVLKQLDAQQTQLRIDSFFRLAQQEKEDAKRIKSQRLNRAVTCMLRKEKEAAASEIEAVSVAMEKEFELLDKAKRKTQKRGITNTLEESSSLKRKRLSDSKRKNTCGGFLGETCLSESSDGSSSEDAESSSLMNVQRRTAAKEPKTSASDSQNSVKEAPVKNGGATTSSSSDSDDDGGKEKMVLVTARSVFGKKRRKLRRARGRKRKT

SEQ ID NO: 843241 - protein, 1168 aa, Homo sapiens
MHINTKFYLLRYISIWLNQALKGVRDRHGNSIENPHLLTLFHRLCKLLFFRIRPIFVFDGDAPLLKKQTLVKRRQRKDLASSDSRKTTEKLLKTFLKRQAIKTAFRSKRDEALPSLTQVRRENDLYVLPPLQEEEKHSSEEEDEKEWQERMNQKQALQEEFFHNPQAIDIESEDFSSLPPEVKHEILTDMKEFTKRRRTLFEAMPEESDDFSQYQLKGLLKKNYLNQHIEHVQKEMNQQHSGHIRRQYEDEGGFLKEVESRRVVSEDTSHYILIKGIQAKTVAEVDSESLPSSSKMHGMSFDVKSSPCEKLKTEKEPDATPPSPRTLLAMQAALLGSSSEEELESENRRQARGRNAPAAVDEGSISPRTLSAIKRALDDDEDVKVCAGDDVQTGGPGAEEMRINSSTENSDEGLKVRDGKGIPFTATLASSSVNSAEEHVASTNEGREPTDSVPKEQMSLVHVGTEAFPISDESMIKDRKDRLPLESAVVRHSDAPGLPNGRELTPASPTCTNSVSKNETHAEVLEQQNELCPYESKFDSSLLSSDDETKCKPNSASEVIGPVSLQETSSIVSVPSEAVDNVENVVSFNAKEHENFLETIQEQQTTESAGQDLISIPKAVEPMEIDSEESESDGSFIEVQSVISDEELQAEFPETSKPPSEQGEEELVGTREGEAPAESESLLRDNSERDDVDGEPQEAEKDAEDSLHEWQDINLEELETLESNLLAQQNSLKAQKQQQERIAATVTGQMFLESQELLRLFGIPYIQAPMEAEAQCAILDLTDQTSGTITDDSDIWLFGARHVYRNFFNKNKFVEYYQYVDFHNQLGLDRNKLINLAYLLGSDYTEGIPTVGCVTAMEILNEFPGHGLEPLLKFSEWWHEAQKNPKIRPNPHDTKVKKKLRTLQLTPGFPNPAVAEAYLKPVVDDSKGSFLWGKPDLDKIREFCQRYFGWNRTKTDESLFPVLKQLDAQQTQLRIDSFFRLAQQEKEDAKRIKSQRLNRAVTCMLRKEKEAAASEIEAVSVAMEKEFELLDKAKRKTQKRGITNTLEESSSLKRKRLSDSKRKNTCGGFLGETCLSESSDGSSSEDAESSSLMNVQRRTAAKEPKTSASDSQNSVKEAPVKNGGATTSSSSDSDDDGGKEKMVLVTARSVFGKKRRKLRRARGRKRKT

SEQ ID NO: 843242 - protein, 419 aa, Homo sapiens
MFLESQELLRLFGIPYIQAPMEAEAQCAILDLTDQTSGTITDDSDIWLFGARHVYRNFFNKNKFVEYYQYVDFHNQLGLDRNKLINLAYLLGSDYTEGIPTVGCVTAMEILNEFPGHGLEPLLKFSEWWHEAQKNPKIRPNPHDTKVKKKLRTLQLTPGFPNPAVAEAYLKPVVDDSKGSFLWGKPDLDKIREFCQRYFGWNRTKTDESLFPVLKQLDAQQTQLRIDSFFRLAQQEKEDAKRIKSQRLNRAVTCMLRKEKEAAASEIEAVSVAMEKEFELLDKAKRKTQKRGITNTLEESSSLKRKRLSDSKRKNTCGGFLGETCLSESSDGSSSEDAESSSLMNVQRRTAAKEPKTSASDSQNSVKEAPVKNGGATTSSSSDSDDDGGKEKMVLVTARSVFGKKRRKLRRARGRKRKT

SEQ ID NO: 843243 - protein, 1186 aa, Homo sapiens; identical to SEQ ID NO: 843240

SEQ ID NO: 843244 - protein, 882 aa, Homo sapiens
MGVQGLWKLLECSGRQVSPEALEGKILAVDISIWLNQALKGVRDRHGNSIENPHLLTLFHRLCKLLFFRIRPIFVFDGDAPLLKKQTLVKRRQRKDLASSDSRKTTEKLLKTFLKRQAIKTAFRSKRDEALPSLTQVRRENDLYVLPPLQEEEKHSSEEEDEKEWQERMNQKQALQEEFFHNPQAIDIESEDFSSLPPEVKHEILTDMKEFTKRRRTLFEAMPEESDDFSQYQLKGLLKKNYLNQHIEHVQKEMNQQHSGHIRRQYEDEGGFLKEVESRRVVSEDTSHYILIKGIQAKTVAEVDSESLPSSSKMHGMSFDVKSSPCEKLKTEKEPDATPPSPRTLLAMQAALLGSSSEEELESENRRQARGRNAPAAVDEGSISPRTLSAIKRALDDDEDVKVCAGDDVQTGGPGAEEMRINSSTENSDEGLKVRDGKGIPFTATLASSSVNSAEEHVASTNEGREPTDSVPKEQMSLVHVGTEAFPISDESMIKDRKDRLPLESAVVRHSDAPGLPNGRELTPASPTCTNSVSKNETHAEVLEQQNELCPYESKFDSSLLSSDDETKCKPNSASEVIGPVSLQETSSIVSVPSEAVDNVENVVSFNAKEHENFLETIQEQQTTESAGQDLISIPKAVEPMEIDSEESESDGSFIEVQSVISDEELQAEFPETSKPPSEQGEEELVGTREGEAPAESESLLRDNSERDDVDGEPQEAEKDAEDSLHEWQDINLEELETLESNLLAQQNSLKAQKQQQERIAATVTGQMFLESQELLRLFGIPYIQAPMEAEAQCAILDLTDQTSGTITDDSDIWLFGARHVYRNSSNTRALPSYTYVALHNPMRTRLTSATHRLHSSRRCLPLYVSSHLLTLSSGLASFLLP

SEQ ID NO: 843245 - protein, 142 aa, Homo sapiens [sequence omitted]

SEQ ID NO: 843246 - protein, 255 aa, Homo sapiens
MDPTCSSECIYNLIPSDLKEPPQPPRYISIFKATVKDDMQKAKTAMKTMGPAKVEVPSPKDFLKKHSKEKTLPPKKNFDRNVPKKPAVPLKTDHPVMGIQSGKNFINTNAADIIMGVAKKPKPIYVDKRTGDKHDLEPSGLVPKYINKKDYGVTPEYICKRNEEIKKAQEDYDRYIQENLKKAAMKRLSDEEREAVLQGLKKNWEEVHKEFQSLSVFIDSIPKKIRKQRLEEEMKQLEHDIGIIEKHKIIYIANK

SEQ ID NO: 843247 - protein, 159 aa, Homo sapiens
MGIQSGKNFINTNAADIIMGVAKKPKPIYVDKRTGDKHDLEPSGLVPKYINKKDYGVTPEYICKRNEEIKKAQEDYDRYIQENLKKAAMKRLSDEEREAVLQGLKKNWEEVHKEFQSLSVFIDSIPKKIRKQRLEEEMKQLEHDIGIIEKHKIIYIANK

SEQ ID NO: 843248 - protein, 121 aa, Homo sapiens
PPVSKDATMKRHSGGYDWVVTVAHARRASPPQPLCHLRACSPATCPRARIQACKRPHAMRRHISGGQPGTRCGVSLAAVPPKRGGPCRTTARPPARAREVMGTARDMPNPTGGLGGEALSS

SEQ ID NO: 843249 - protein, 68 aa, Homo sapiens
NHRCGVLGKIKVESAFHTPTGDVRRHGGPDTKLRHSTVQFGEYTRPGLASWSGGTSSEQKSDKETCVH

SEQ ID NO: 843250 - protein, 615 aa, Homo sapiens
MNALALGPSEYDSLPENSETGGNESQPDSQEDPREVLKKTLEFCLSRENLASDMYLISQMDSDQYVPITTVANLDHIKKLSTDVDLIVEVLRSLPLVQVDEKGEKVRPNQNRCIVILREISESTPVEEVEALFKGDNLPKFINCEFAYNDNWFITFETEADAQQAYKYLREEVKTFQGKPIKARIKAKAIAINTFLPKNGFRPLDVSLYAQQRYATSFYFPPMYSPQQQFPLYSLITPQTWSATHSYLDPPLVTPFPNTGFINGFTSPAFKPAASPLTSLRQYPPRSRNPSKSHLRHAIPSAERGPGLLESPSIFNFTADRLINGVRSPQTRQAGQTRTRIQNPSAYAKREAGPGRVEPGSLESSPGLGRGRKNSFGYRKKREEKFTSSQTQSPTPPKPPSPSFELGLSSFPPLPGAAGNLKTEDLFENRLSSLIIGPSKERTLSADASVNTLPVVVSREPSVPASCAVSATYERSPSPAHLPDDPKVAEKQRETHSVDRLPSALTATACKSVQVNGAATELRKPSYAEICQRTSKEPPSSPLQPQKEQKPNTVGCGKEEKKLAEPAERYREPPALKSTPGAPRDQRRPAGGRPSPSAMGKRLSREQSTPPKSPQ

SEQ ID NO: 843251 - protein, 738 aa, Homo sapiens
MTSDQDAKVVAEPQTQRVQEGKDSAHLMNGPISQTTSQTSSIPPLSQVPATKVSELNPNAEVWGAPVLHLEASSAADGVSAAWEEVAGHHADRGPQGSDANGDGDQGHENAALPDPQESDPADMNALALGPSEYDSLPENSETGGNESQPDSQEDPREVLKKTLEFCLSRENLASDMYLISQMDSDQYVPITTVANLDHIKKLSTDVDLIVEVLRSLPLVQVDEKGEKVRPNQNRCIVILREISESTPVEEVEALFKGDNLPKFINCEFAYNDNWFITFETEADAQQAYKYLREEVKTFQGKPIKARIKAKAIAINTFLPKNGFRPLDVSLYAQQRYATSFYFPPMYSPQQQFPLYSLITPQTWSATHSYLDPPLVTPFPNTGFINGFTSPAFKPAASPLTSLRQYPPRSRNPSKSHLRHAIPSAERGPGLLESPSIFNFTADRLINGVRSPQTRQAGQTRTRIQNPSAYAKREAGPGRVEPGSLESSPGLGRGRKNSFGYRKKREEKFTSSQTQSPTPPKPPSPSFELGLSSFPPLPGAAGNLKTEDLFENRLSSLIIGPSKERTLSADASVNTLPVVVSREPSVPASCAVSATYERSPSPAHLPDDPKVAEKQRETHSVDRLPSALTATACKSVQVNGAATELRKPSYAEICQRTSKEPPSSPLQPQKEQKPNTVGCGKEEKKLAEPAERYREPPALKSTPGAPRDQRRPAGGRPSPSAMGKRLSREQSTPPKSPQ

SEQ ID NO: 843252 - protein, 773 aa, Homo sapiens
MTSDQDAKVVAEPQTQRVQEGKDSAHLMNGPISQTTSQTSSIPPLSQVPATKVSELNPNAEVWGAPVLHLEASSAADGVSAAWEEVAGHHADRGPQGSDANGDGDQGHENAALPDPQESDPADMNALALGPSEYDSLPENSETGGNESQPDSQEDPREVLKKTLEFCLSRENLASDMYLISQMDSDQYVPITTVANLDHIKKLSTDVDLIVEVLRSLPLVQVDEKGEKVRPNQNRCIVILREISESTPVEEVEALFKGDNLPKFINCEFAYNDNWFITFETEADAQQAYKYLREEVKTFQGKPIKARIKAKAIAINTFLPKNGFRPLDVSLYAQQRYATSFYFPPMYSPQQQFPLYSLITPQTWSATHSYLDPPLVTPFPNTGFINGFTSPAFKPAASPLTSLRQYPPRSRNPSKSHLRHAIPSAERGPGLLESPSIFNFTADRLINGVRSPQTRQAGQTRTRIQNPSAYAKREAGPGRVEPGSLESSPGLGRGRKNSFGYRKKREEKFTSSQTQSPTPPKPPSPSFELGLSSFPPLPGAAGNLKTEDLFENRLSSLIIGPSKERTLSADASVNTLPVVVSREPSVPASCAVSATYERSPSPAHLPDDPKVAEKQRETHSVDRLPSALTATACKSVQVNGAATVRTSCLPSCTTAARLWCEQTLRTPAPARFLITSNLELRKPSYAEICQRTSKEPPSSPLQPQKEQKPNTVGCGKEEKKLAEPAERYREPPALKSTPGAPRDQRRPAGGRPSPSAMGKRLSREQSTPPKSPQ

SEQ ID NO: 843253 - protein, 738 aa, Homo sapiens; identical to SEQ ID NO: 843251

SEQ ID NO: 843254 - protein, 393 aa, Homo sapiens [sequence omitted]

SEQ ID NO: 843255 - protein, 128 aa, Homo sapiens
KDCFWSLPFRVEYRVRVHCPPWAPGTPFCCPELAEPVWAASGLFLGFRIAQAGIGLGRDGVESALFFVMPFLILSITTVAQRECSAAGETKSLDFMNFLKVKNTSEDGNLVTVENSFILSELDFLSCP

SEQ ID NO: 843256 - protein, 738 aa, Homo sapiens; identical to SEQ ID NO: 843251

SEQ ID NO: 843257 - protein, 738 aa, Homo sapiens; identical to SEQ ID NO: 843251

SEQ ID NO: 843258 - protein, 513 aa, Homo sapiens [sequence omitted]

SEQ ID NO: 843259 - protein, 160 aa, Homo sapiens
MTSDQDAKVVAEPQTQRVQEGKDSAHLMNGPISQTTSQTSSIPPLSQVPATKVSELNPNAEVWGAPVLHLEASSAADGVSAAWEEVAGHHADRGPQGSDANGDGDQGHENAALPDPQESDPADMNALALGPSEYDSLPENSETGGNESQPDSQELVDRYR

SEQ ID NO: 843260 - protein, 738 aa, Homo sapiens; identical to SEQ ID NO: 843251

SEQ ID NO: 843261 - protein, 738 aa, Homo sapiens; identical to SEQ ID NO: 843251

SEQ ID NO: 843262 - protein, 738 aa, Homo sapiens; identical to SEQ ID NO: 843251

SEQ ID NO: 843263 - protein, 738 aa, Homo sapiens; identical to SEQ ID NO: 843251

SEQ ID NO: 843264 - protein, 393 aa, Homo sapiens [sequence omitted]

SEQ ID NO: 843265 - protein, 176 aa, Homo sapiens
MFQTLSADASVNTLPVVVSREPSVPASCAVSATYERSPSPAHLPDDPKVAEKQRETHSVDRLPSALTATACKSVQVNGAATELRKPSYAEICQRTSKEPPSSPLQPQKEQKPNTVGCGKEEKKLAEPAERYREPPALKSTPGAPRDQRRPAGGRPSPSAMGKRLSREQSTPPKSPQ

SEQ ID NO: 843266 - protein, 738 aa, Homo sapiens; identical to SEQ ID NO: 843251

SEQ ID NO: 843267 - protein, 714 aa, Homo sapiens
MTSDQDAKVVAEPQTQRVQEGKDSAHLMNGPISQTTSQTSSIPPLSQVPATKVSELNPNAEVWGAPVLHLEASSAADGVSAAWEEVAGHHADRGPQGSDANGDGDQGHENAALPDPQESDPADMNALALGPSEYDSLPENSETGGNESQPDSQEDPREVLKKTLEFCLSRENLASDMYLISQMDSDQYVPITTVANLDHIKKLSTDVDLIVEVLRSLPLVQVDEKGEKVRPNQNRCIVILREISESTPVEEVEALFKGDNLPKFINCEFAYNDNWFITFETEADAQQAYKYLREEVKTFQGKPIKARIKAKAIAINTFLPKNGFRPLDVSLYAQQRYATSFYFPPMYSPQQQFPLYSLITPQTWSATHSYLDPPLVTPFPNTGFINGFTSPAFKPAASPLTSLRQYPPRSRNPSKSHLRHAIPSAERGPGLLESPSIFNFTADRLINGVRSPQTRQAGQTRTRIQNPSAYAKREAGPGRVEPGSLESSPGLGRGRKNSFGYRKKREEKFTSSQTQSPTPPKPPSPSFELGLSSFPPLPGAAGNLKTEDLFENRLSSLIIGPSKERTLSADASVNTLPVVVSREPSVPASCAVSATYERSPSPAHLPDDPKVAEKQRETHSVDRLPSALTATACKSVQVNGAATVRTSCLPSCTTAARLWCEQTLRTPAPARFLITSNLVGFYLRLSVLCFLYKIPLIFANNFPLTTLVLSQTTM

SEQ ID NO: 843268 - protein, 170 aa, Homo sapiens [sequence omitted]

SEQ ID NO: 843269 - protein, 50 aa, Homo sapiens
MRGGHVLEARGRIHTLSLHMAQPQTLDKMRGREWPLLQTQCIWPSPQRAS

SEQ ID NO: 843270 - protein, 310 aa, Homo sapiens
MGDNITSIREFLLLGFPVGPRIQMLLFGLFSLFYVFTLLGNGTILGLISLDSRLHAPMYFFLSHLAVVDIAYACNTVPRMLVNLLHPAKPISFAGRMMQTFLFSTFAVTECLLLVVMSYDLYVAICHPLRYLAIMTWRVCITLAVTSWTTGVLLSLIHLVLLLPLPFCRPQKIYHFFCEILAVLKLACADTHINENMVLAGAISGLVGPLSTIVVSYMCILCAILQIQSREVQRKAFRTCFSHLCVIGLVYGTAIIMYVGPRYGNPKEQKKYLLLFHSLFNPMLNPLICSLRNSEVKNTLKRVLGVERAL

SEQ ID NO: 843271 - protein, 245 aa, Homo sapiens
MPLFLLSLPTPPSASGHERRQRPEAKTSGSEKKYLRAMQANRSQLHSPPGTGSSEDASTPQCVHTRLTGEGSCPHSGDVHIQINSIPKECAENASSRNIRSGVHSCAHGCVHSRLRGHSHSEARLTDDTAAESGDHGSSSFSEFRYLFKWLQKSLPYILILSVKLVMQHITGISLGIGLLTTFMYANKSIVNQVFLRLNFFKSYFGPFELLGSILDCWNYRLHSEILFHGLKMPYFIGAFFHHAF

SEQ ID NO: 843272 - protein, 435 aa, Homo sapiens
MPLFLLSLPTPPSASGHERRQRPEAKTSGSEKKYLRAMQANRSQLHSPPGTGSSEDASTPQCVHTRLTGEGSCPHSGDVHIQINSIPKECAENASSRNIRSGVHSCAHGCVHSRLRGHSHSEARLTDDTAAESGDHGSSSFSEFRYLFKWLQKSLPYILILSVKLVMQHITGISLGIGLLTTFMYANKSIVNQVFLRERSSKIQCAWLLVFLAGSSVLLYYTFHSQSLYYSLIFLNPTLDHLSFWEVFWIVGITDFILKFFFMGLKCLILLVPSFIMPFKSKGYWYMLLEELCQYYRTFVPIPVWFRYLISYGEFGNVTRWSLGILLALLYLILKLLEFFGHLRTFRQVLRIFFTQPSYGVAASKRQCSDVDDICSICQAEFQKPILLICQHIFCEECMTLWFNREKTCPLCRTVISDHINKWKDGATSSHLQIY

SEQ ID NO: 843273 - protein, 435 aa, Homo sapiens; identical to SEQ ID NO: 843272

SEQ ID NO: 843274 - protein, 237 aa, Homo sapiens
MPLFLLSLPTPPSASGHERRQRPEAKTSGSEKKYLRAMQANRSQLHSPPGTGSSEDASTPQCVHTRLTGEGSCPHSGDVHIQINSIPKECAENASSRNIRSGVHSCAHGCVHSRLRGHSHSEARLTDDTAAESGDHGSSSFSEFRYLFKWLQKSLPYILILSVKLVMQHITGISLGIGLLTTFMYANKSIVNQVFLRERSSKIQCAWLLVFLAGSSVLLYYTFHSQSLYYRLERCQL

SEQ ID NO: 843275 - protein, 172 aa, Homo sapiens
MPLFLLSLPTPPSASGHERRQRPEAKTSGSEKKYLRAMQANRSQLHSPPGTGSSEDASTPQCVHTRLTGEGSCPHSGDVHIQINSIPKECAENASSRNIRSGVHSCAHGCVHSRLRGHSHSEARLTDDTAAESGDHGSSSFSEFRYLFKWLQKSLPYILILSVKLVMQHITA

SEQ ID NO: 843276 - protein, 398 aa, Homo sapiens
MQANRSQLHSPPGTGSSEDASTPQCVHTRLTGEGSCPHSGDVHIQINSIPKECAENASSRNIRSGVHSCAHGCVHSRLRGHSHSEARLTDDTAAESGDHGSSSFSEFRYLFKWLQKSLPYILILSVKLVMQHITGISLGIGLLTTFMYANKSIVNQVFLRERSSKIQCAWLLVFLAGSSVLLYYTFHSQSLYYSLIFLNPTLDHLSFWEVFWIVGITDFILKFFFMGLKCLILLVPSFIMPFKSKGYWYMLLEELCQYYRTFVPIPVWFRYLISYGEFGNVTRWSLGILLALLYLILKLLEFFGHLRTFRQVLRIFFTQPSYGVAASKRQCSDVDDICSICQAEFQKPILLICQHIFCEECMTLWFNREKTCPLCRTVISDHINKWKDGATSSHLQIY

SEQ ID NO: 843277 - protein, 199 aa, Homo sapiens
MPLFLLSLPTPPSASGHERRQRPEAKTSGSEKKYLRAMQANRSQLHSPPGTGSSEDASTPQCVHTRLTGEGSCPHSGDVHIQINSIPKECAENASSRNIRSGVHSCAHGCVHSRLRGHSHSEARLTDDTAAESGDHGSSSFSEFRYLFKWLQKSLPYILILSVKLVMQHITGISLGIGLLTTFMYANKSIVNQVFLRVR

SEQ ID NO: 843278 - protein, 435 aa, Homo sapiens; identical to SEQ ID NO: 843272

SEQ ID NO: 843279 - protein, 237 aa, Homo sapiens; identical to SEQ ID NO: 843274

SEQ ID NO: 843280 - protein, 438 aa, Homo sapiens
MPLFLLSLPTPPSASGHERRQRPEAKTSGSEKKYLRAMQANRSQLHSPPGTGSSEDASTPQCVHTRLTGEGSCPHSGDVHIQINSIPKECAENASSRNIRSGVHSCAHGCVHSRLRGHSHSEARLTDDTAAESGDHGSSSFSEFRYLFKWLQKSLPYILILSVKLVMQHITGISLGIGLLTTFMYANKSIVNQVFLRERSSKIQCAWLLVFLAGSSVLLYYTFHSQSLYYSLIFLNPTLDHLSFWEVFWIVGITDFILKFFFMGLKCLILLVPSFIMPFKSKGYWYMLLEELCQYYRTFVPIPVWFRYLISYGEFGNVTRWSLGILLALLYLILKLLEFFGHLRTFRQVLRIFFTQPSYGVAASKRQCSDVDDICSICQAEFQKPILLICQHIFCEECMTLWFNREKTCPLCRTVISDHINKWKDGANFQSKKLFQKI

SEQ ID NO: 843281 - protein, 67 aa, Homo sapiens
LRLCKAGCTLGSHVLQEEPSGNDRIGLEDKYPGLLIPQWDDSAACLRWLPGNSTPDAHTNNLVSHSS

SEQ ID NO: 843282 - protein, 252 aa, Homo sapiens
LPVFSIQDSPFGDAPLGRSHYWPSQSQTWCPKTLSPSRSQRSRLPQAPKALATGPNSPELFEESWPSSSGTPSLPSTTEGQMWASPAPTLIDSGDSVVAKYINRFRQAQPTSREERQPAGPTPADFWWLQSDSPDPSSQSAAAGANKPEGRPHTAVPTAVNVTSASHAVAPLQEIKQNLHTWNSSLLDLETLSLQSRAARLLKRSKASISSSSSLSPSDASTSSFPTSSDGLSPFSETFIPDSSKGLGPRAP

SEQ ID NO: 843283 - protein, 122 aa, Homo sapiens
CQFSPFKIVPLEMRPWVEATTGHPRARPGVPRYINRFRQAQPTSREERQPAGPTPADFWWLQSDSPDPSSQSAAAGANKPEGRPHTAVPTAVNVTSASHAVAPLQEIKQVTSPFTPSLGCLN

SEQ ID NO: 843284 - protein, 154 aa, Homo sapiens
LPVFSIQDSPFGDAPLGRSHYWPSQSQTWCPKTLSPSRSQRSRLPQAPKALATGPNSPELFEESWPSSSGTPSLPSTTEGQMWASPAPTLIDSGDSVVAKYINRFRQAQPTSREERQPAGPTPADFWWLQSDSPDPSSQSAAGTSFSAIHYSHP

SEQ ID NO: 843285 - protein, 190 aa, Homo sapiens
LPVFSIQDSPFGDAPLGRSHYWPSQSQTWCPKTLSPSRSQRSRLPQAPKALATGPNSPELFEESWPSSSGTPSLPSTTEGQMWASPAPTLIDSGDSVVAKYINRFRQAQPTSREERQPAGPTPADFWWLQSDSPDPSSQSAAAGANKPEGRPHTAVPTAVNVTSASHAVAPLQEIKQVTSPFTPSLGCLN

SEQ ID NO: 843286 - protein, 1055 aa, Homo sapiens
MIPICPVVSFTYVPSRLGEDAKMATGNYFGFTHSGAAAAAAAAQYSQQPASGVAYSHPTTVASYTVHQAPVAAHTVTAAYAPAAATVAVARPAPVAVAAAATAAAYGGYPTAHTATDYGYTQRQQEAPPPPPPATTQNYQDSYSYVRSTAPAVAYDSKQYYQQPTATAAAVAAAAQPQPSVAETYYQTAPKAGYSQGATQYTQAQQTRQVTAIKPATPSPATTTFSIYPVSSTVQPVAAAATVVPSYTQSATYSTTAVTYSGTSYSGYEAAVYSAASSYYQQQQQQQKQAAAAAAAAAATAAWTGTTFTKKAPFQNKQLKPKQPPKPPQIHYCDVCKISCAGPQTYKEHLEGQKHKKKEAALKASQNTSSSNSSTRGTQNQLRCELCDVSCTGADAYAAHIRGAKHQKVVKLHTKLGKPIPSTEPNVVSQATSSTAVSASKPTASPSSIAANNCTVNTSSIATSSMKGLTTTGNSSLNSTSNTKVSAVPTNMAAKKTSTPKINFVGGNKLQSTGNKAEDIKGTECVKSTPVTSAVQIPEVKQDTVSEPVTPASLAALQSDVQPVGHDYVEEVRNDEGKVIRFHCKLCECSFNDPNAKEMHLKGRRHRLQYKIQEEKMRKQMQKEEYWRRREEEERWRMEMRRYEEDMYWRRMEEEQHHWDDRRRMPDGGYPHGPPGPLGLLGVRPGMPPQPQGPAPLRRPDSSDDRYVMTKHATIYPTEEELQAVQKIVSITERALKLVSDSLSEHEKNKNKEGDDKKEGGKDRALKGVLRVGVLAKGLLLRGDRNVNLVLLCSEKPSKTLLSRIAENLPKQLAVISPEKYDIKCAVSEAAIILNSCVEPKMQVTITLTSPIIREENMREGDVTSGMVKDPPDVLDRQKCLDALAALRHAKWFQARANGLQSCVIIIRILRDLCQRVPTWSDFPSWAMELLVEKAISSASSPQSPGDALRRVFECISSGIILKGSPGLLDPCEKDPFDTLATMTDQQREDITSSAQFALRLLAFRQIHKVLGMDPLPQMSQRFNIHNNRKRRRDSDGVDGFEAEGKKDKKDYDNF

SEQ ID NO: 843287 - protein, 1037 aa, Homo sapiens
SSVLWSSMDQQPASGVAYSHPTTVASYTVHQAPVAAHTVTAAYAPAAATVAVARPAPVAVAAAATAAAYGGYPTAHTATDYGYTQRQQEAPPPPPPATTQNYQDSYSYVRSTAPAVAYDSKQYYQQPTATAAAVAAAAQPQPSVAETYYQTAPKAGYSQGATQYTQAQQTRQVTAIKPATPSPATTTFSIYPVSSTVQPVAAAATVVPSYTQSATYSTTAVTYSGTSYSGYEAAVYSAASSYYQQQQQQQKQAAAAAAAAAATAAWTGTTFTKKAPFQNKQLKPKQPPKPPQIHYCDVCKISCAGPQTYKEHLEGQKHKKKEAALKASQNTSSSNSSTRGTQNQLRCELCDVSCTGADAYAAHIRGAKHQKVVKLHTKLGKPIPSTEPNVVSQATSSTAVSASKPTASPSSIAANNCTVNTSSIATSSMKGLTTTGNSSLNSTSNTKVSAVPTNMAAKKTSTPKINFVGGNKLQSTGNKAEDIKGTECVKSTPVTSAVQIPEVKQDTVSEPVTPASLAALQSDVQPVGHDYVEEVRNDEGKVIRFHCKLCECSFNDPNAKEMHLKGRRHRLQYKKKVNPDLQVEVKPSIRARKIQEEKMRKQMQKEEYWRRREEEERWRMEMRRYEEDMYWRRMEEEQHHWDDRRRMPDGGYPHGPPGPLGLLGVRPGMPPQPQGPAPLRRPDSSDDRYVMTKHATIYPTEEELQAVQKIVSITERALKLVSDSLSEHEKNKNKEGDDKKEGGKDRALKGVLRVGVLAKGLLLRGDRNVNLVLLCSEKPSKTLLSRIAENLPKQLAVISPEKYDIKCAVSEAAIILNSCVEPKMQVTITLTSPIIREENMREGDVTSGMVKDPPDVLDRQKCLDALAALRHAKWFQARANGLQSCVIIIRILRDLCQRVPTWSDFPSWAMELLVEKAISSASSPQSPGDALRRVFECISSGIILKGSPGLLDPCEKDPFDTLATMTDQQREDITSSAQFALRLLAFRQIHKVLGMDPLPQMSQRFNIHNNRKRRRDSDGVDGFEAEGKKDKKDYDNF

SEQ ID NO: 843288 - protein, 954 aa, Homo sapiens
MIPICPVVSFTYVPSRLGEDAKMATGNYFGFTHSGAAAAAAAAQYSQQPASGVAYSHPTTVASYTVHQAPVAAHTVTAAYAPAAATVAVARPAPVAVAAAATAAAYGGYPTAHTATDYGYTQRQQEAPPPPPPATTQNYQDSYSYVRSTAPAVAYDSKQYYQQQQQQKQAAAAAAAAAATAAWTGTTFTKKAPFQNKQLKPKQPPKPPQIHYCDVCKISCAGPQTYKEHLEGQKHKKKEAALKASQNTSSSNSSTRGTQNQLRCELCDVSCTGADAYAAHIRGAKHQKVVKLHTKLGKPIPSTEPNVVSQATSSTAVSASKPTASPSSIAANNCTVNTSSIATSSMKGLTTTGNSSLNSTSNTKVSAVPTNMAAKKTSTPKINFVGGNKLQSTGNKAEDIKGTECVKSTPVTSAVQIPEVKQDTVSEPVTPASLAALQSDVQPVGHDYVEEVRNDEGKVIRFHCKLCECSFNDPNAKEMHLKGRRHRLQYKKKVNPDLQVEVKPSIRARKIQEEKMRKQMQKEEYWRRREEEERWRMEMRRYEEDMYWRRMEEEQHHWDDRRRMPDGGYPHGPPGPLGLLGVRPGMPPQPQGPAPLRRPDSSDDRYVMTKHATIYPTEEELQAVQKIVSITERALKLVSDSLSEHEKNKNKEGDDKKEGGKDRALKGVLRVGVLAKGLLLRGDRNVNLVLLCSEKPSKTLLSRIAENLPKQLAVISPEKYDIKCAVSEAAIILNSCVEPKMQVTITLTSPIIREENMREGDVTSGMVKDPPDVLDRQKCLDALAALRHAKWFQARANGLQSCVIIIRILRDLCQRVPTWSDFPSWAMELLVEKAISSASSPQSPGDALRRVFECISSGIILKGSPGLLDPCEKDPFDTLATMTDQQREDITSSAQFALRLLAFRQIHKVLGMDPLPQMSQRFNIHNNRKRRRDSDGVDGFEAEGKKDKKDYDNF

SEQ ID NO: 843289 - protein, 1074 aa, Homo sapiens [sequence omitted]

SEQ ID NO: 843290 - protein, 1074 aa, Homo sapiens [sequence omitted]

SEQ ID NO: 843291 - protein, 66 aa, Homo sapiens
LSFKSINSSLSLLRFLLLWMLKRMDPLPQMSQRFNIHNNRKRRRDSDGVDGFEAEGKKDKKDYDNF

SEQ ID NO: 843292 - protein, 608 aa, Homo sapiens
MIPICPVVSFTYVPSRLGEDAKMATGNYFGFTHSGAAAAAAAAQYSQQPASGVAYSHPTTVASYTVHQAPVAAHTVTAAYAPAAATVAVARPAPVAVAAAATAAAYGGYPTAHTATDYGYTQRQQEAPPPPPPATTQNYQDSYSYVRSTAPAVAYDSKQYYQQPTATAAAVAAAAQPQPSVAETYYQTAPKAGYSQGATQYTQAQQTRQVTAIKPATPSPATTTFSIYPVSSTVQPVAAAATVVPSYTQSATYSTTAVTYSGTSYSGYEAAVYSAASSYYQQQQQQQKQAAAAAAAAAATAAWTGTTFTKKAPFQNKQLKPKQPPKPPQIHYCDVCKISCAGPQTYKEHLEGQKHKKKEAALKASQNTSSSNSSTRGTQNQLRCELCDVSCTGADAYAAHIRGAKHQKVVKLHTKLGKPIPSTEPNVVSQATSSTAVSASKPTASPSSIAANNCTVNTSSIATSSMKGLTTTGNSSLNSTSNTKVSAVPTNMAAKKTSTPKINFVGGNKLQSTGNKAEDIKGTECVKSTPVTSAVQIPEVKQDTVSEPVTPASLAALQSDVQPVGHDYVEEVRNDEGKVIRFHCKLCECSTGAGLQLNCGGCWLHRQQ

SEQ ID NO: 843293 - protein, 140 aa, Homo sapiens
MIPICPVVSFTYVPSRLGEDAKMATGNYFGFTHSGAAAAAAAAQYSQQPASGVAYSHPTTVASYTVHQAPVAAHTVTAAYAPAAATVAVARPAPVAVAAAATAAAYGGYPTAHTATDYGYTQRQQEAPPLLPAPPPPPPR

SEQ ID NO: 843294 - protein, 1074 aa, Homo sapiens [sequence omitted]

SEQ ID NO: 843295 - protein, 715 aa, Homo sapiens
ARGPEEEGGGDDEEDAEAWAMELADVGAAASSQGVHDQVLPTPNASSRVIVHVDLDCFYAQVEMISNPELKDKPLGVQQKYLVVTCNYEARKLGVKKLMNVRDAKEKCPQLVLVNGEDLTRYREMSYKVTELLEEFSPVVERLGFDENFVDLTEMVEKRLQQLQSDELSAVTVSGHVYNNQSINLLDVLHIRLLVGSQIAAEMRESHDYVEEVRNDEGKVIRFHCKLCECSFNDPNAKEMHLKGRRHRLQYKKKVNPDLQVEVKPSIRARKIQEEKMRKQMQKEEYWRRREEEERWRMEMRRYEEDMYWRRMEEEQHHWDDRRRMPDGGYPHGPPGPLGLLGVRPGMPPQPQGPAPLRRPDSSDDRYVMTKHATIYPTEEELQAVQKIVSITERALKLVSDSLSEHEKNKNKEGDDKKEGGKDRALKGVLRVGVLAKGLLLRGDRNVNLVLLCSEKPSKTLLSRIAENLPKQLAVISPEKYDIKCAVSEAAIILNSCVEPKMQVTITLTSPIIREENMREGDVTSGMVKDPPDVLDRQKCLDALAALRHAKWFQARANGLQSCVIIIRILRDLCQRVPTWSDFPSWAMELLVEKAISSASSPQSPGDALRRVFECISSGIILKGSPGLLDPCEKDPFDTLATMTDQQREDITSSAQFALRLLAFRQIHKVLGMDPLPQMSQRFNIHNNRKRRRDSDGVDGFEAEGKKDKKDYDNF

SEQ ID NO: 843296 - protein, 514 aa, Homo sapiens
MMILEFFFHTKVRNDEGKVIRFHCKLCECSFNDPNAKEMHLKGRRHRLQYKKKVNPDLQVEVKPSIRARKIQEEKMRKQMQKEEYWRRREEEERWRMEMRRYEEDMYWRRMEEEQHHWDDRRRMPDGGYPHGPPGPLGLLGVRPGMPPQPQGPAPLRRPDSSDDRYVMTKHATIYPTEEELQAVQKIVSITERALKLVSDSLSEHEKNKNKEGDDKKEGGKDRALKGVLRVGVLAKGLLLRGDRNVNLVLLCSEKPSKTLLSRIAENLPKQLAVISPEKYDIKCAVSEAAIILNSCVEPKMQVTITLTSPIIREENMREGDVTSGMVKDPPDVLDRQKCLDALAALRHAKWFQARANGLQSCVIIIRILRDLCQRVPTWSDFPSWAMELLVEKAISSASSPQSPGDALRRVFECISSGIILKGSPGLLDPCEKDPFDTLATMTDQQREDITSSAQFALRLLAFRQIHKVLGMDPLPQMSQRFNIHNNRKRRRDSDGVDGFEAEGKKDKKDYDNF

SEQ ID NO: 843297 - protein, 881 aa, Homo sapiens
MIPICPVVSFTYVPSRLGEDAKMATGNYFGFTHSGAAAAAAAAQYSQQPASGVAYSHPTTVASYTVHQAPVAAHTVTAAYAPAAATVAVARPAPVAVAAAATAAAYGGYPTAHTATDYGYTQRQQEAPPPPPPATTQNYQDSYSYVRSTAPAVAYDSKQYYQQPTATAAAVAAAAQPQPSVAETYYQTAPKAGYSQGATQYTQAQQTRQVTAIKPATPSPATTTFSIYPVSSTVQPVAAAATVVPSYTQSATYSTTAVTYSGTSYSGYEAAVYSAASSYYQQQQQQQKQAAAAAAAAAATAAWTGTTFTKKAPFQNKQLKPKQPPKPPQIHYCDVCKISCAGPQTYKEHLEGQKHKKKEAALKASQNTSSSNSSTRGTQNQLRCELCDVSCTGADAYAAHIRGAKHQKVVKLHTKLGKPIPSTEPNVVSQATSSTAVSASKPTASPSSIAANNCTVNTSSIATSSMKGLTTTGNSSLNSTSNTKVSAVPTNMAAKKTSTPKINFVGGNKLQSTGNKAEDIKGTECVKSTPVTSAVQIPEVKQDTVSEPVTPASLAALQSDVQPVGHDYVEEVRNDEGKVIRFHCKLCECSFNDPNAKEMHLKGRRHRLQYKKKVNPDLQVEVKPSIRARKIQEEKMRKQMQKEEYWRRREEEERWRMEMRRYEEDMYWRRMEEEQHHWDDRRRMPDGGYPHGPPGPLGLLGVRPGMPPQPQGPAPLRRPDSSDDRYVMTKHATIYPTEEELQAVQKIVSITERALKLVSDSLSEHEKNKNKEGDDKKEGGKDRALKGVLRVGVLAKGLLLRGDRNVNLVLLCSEKPSKTLLSRIAENLPKQLAVISPEKYDIKCAVSEAAIILNSCVEPKMQVTITLTSPIIREENMREGG

SEQ ID NO: 843298 - protein, 1074 aa, Homo sapiens [sequence omitted]

SEQ ID NO: 843299 - protein, 352 aa, Homo sapiens
MIPICPVVSFTYVPSRLGEDAKMATGNYFGFTHSGAAAAAAAAQYSQQPASGVAYSHPTTVASYTVHQAPVAAHTVTAAYAPAAATVAVARPAPVAVAAAATAAAYGGYPTAHTATDYGYTQRQQEAPPPPPPATTQNYQDSYSYVRSTAPAVAYDSKQYYQQPTATAAAVAAAAQPQPSVAETYYQTAPKAGYSQGATQYTQAQQTRQVTAIKPATPSPATTTFSIYPVSSTVQPVAAAATVVPSYTQSATYSTTAVTYSGTSYSGYEAAVYSAASSYYQQQQQQQKQAAAAAAAAAATAAWTGTTFTKKAPFQNKQLKPKQPPKPPQIHYCDVCKISCAGPQVLTLYVLP

SEQ ID NO: 843300 - protein, 168 aa, Homo sapiens
MKYKRGEINPVSALHQFAQMQRVQLDLKETVTTGNVMGPYFAFCAVVDGIQYKTGLGQNKKESRSNAAKLALDELLQLDEPEPRILETSGPPPFPAEPVVLSELAYVSKVHYEGRHIQYAKISQIVKERFNQLISNRSEYLKYSSSLAAFIIERAGQHEVVAIGTGEY

SEQ ID NO: 843301 - protein, 255 aa, Homo sapiens
MASNNHWFQSSQVPSFAQMLKKNLPVQPATKTITTPTGWSSESYGLSKMASKVTQVTGNFPEPLLSKNLSSISNPVLPPKKIPKEFIMKYKRGEINPVSALHQFAQMQRVQLDLKETVTTGNVMGPYFAFCAVVDGIQYKTGLGQNKKESRSNAAKLALDELLQLDEPEPRILETSGPPPFPAEPVVLSELAYVSKVHYEGRHIQYAKISQIVKERFNQLISNRSEYLKYSSSLAAFIIERAGQHEVVAIGTGEY

SEQ ID NO: 843302 - protein, 255 aa, Homo sapiens; identical to SEQ ID NO: 843301

SEQ ID NO: 843303 - protein, 279 aa, Homo sapiens
TRSSAARRWRKRGGKSAGLRDGEKMASNNHWFQSSQVPSFAQMLKKNLPVQPATKTITTPTGWSSESYGLSKMASKVTQVTGNFPEPLLSKNLSSISNPVLPPKKIPKEFIMKYKRGEINPVSALHQFAQMQRVQLDLKETVTTGNVMGPYFAFCAVVDGIQYKTGLGQNKKESRSNAAKLALDELLQLDEPEPRILETSGPPPFPAEPVVLSELAYVSKVHYEGRHIQYAKISQIVKERFNQLISNRSEYLKYSSSLAAFIIERAGQHEVVAIGTGEY

SEQ ID NO: 843304 - protein, 255 aa, Homo sapiens; identical to SEQ ID NO: 843301

SEQ ID NO: 843305 - protein, 118 aa, Homo sapiens
MSGMKWSDERARRRWREAENLMHILEAKSTRLADGLKAEDFAIEKSLAFQSLQFGNQPTNQSTNQPTNQLLNRSTDSSRRQRLENCLNLVQRLKQSNTVSCTDLNSVKTVPHAVGSQP

SEQ ID NO: 843306 - protein, 251 aa, Homo sapiens
CEKVFSQSSSLTLHQRIHTGEKPYKCIECGKAFSQRSNLVQHQRIHTGEKPYECKECRKAFSQNAHLVQHLRVHTGEKPYECKVCRKAFSQFAYLAQHQRVHTGEKPYECIECGKAFSNRSSIAQHQRVHTGEKPYECNVCGKAFSLRAYLTVHQRIHTGERPYECKECGKAFSQNSHLAQHQRIHTGEKPYKCQECRKAFSQIAYLAQHQRVHTGEKPYECIECGKAFSNDSSLTQHQRVHTGEKPYECT

SEQ ID NO: 843307 - protein, 60 aa, Homo sapiens
NSCLMRWKVQVNSLMVLPSLTVCYSTHLSTGCRHIKVNVQVLENIQRILNVQNSEKQIYA

SEQ ID NO: 843308 - protein, 323 aa, Homo sapiens
  misc_feature (243)..(243): Xaa can be any naturally occurring amino acid
MGRWALDVAFLWKAVLTLGLVLLYYCFSIGITFYNKWLTKSFHFPLFMTMLHLAVIFLFSALSRALVQCSSHRARVVLSWADYLRRVAPTALATALDVGLSNWSFLYVTVSLYTMTKSSAVLFILIFSLIFKLEELRAALVLVVLLIAGGLFMFTYKSTQFHVEGFALVLGASFIGGIRWTLTQMLLQKGELGLQNSIDTMFHLQPLMFLGLFPLFAVFGRSPLSTSENIFRSQEPACSAGTXELFWGDAALVGGSRAPRSPELSSSFMPGFRSCLVGARGHNRSRGGSLARESPVPTSVGRLVPLPSREIVATTPHLCCLVR

SEQ ID NO: 843309 - protein, 323 aa, Homo sapiens; identical to SEQ ID NO: 843308
  misc_feature (243)..(243): Xaa can be any naturally occurring amino acid

SEQ ID NO: 843310 - protein, 1230 aa, Homo sapiens
MASASYHISNLLEKMTSSDKDFRFMATNDLMTELQKDSIKLDDDSERKVVKMILKLLEDKNGEVQNLAVKCLGPLVSKVKEYQVETIVDTLCTNMLSDKEQLRDISSIGLKTVIGELPPASSGSALAANVCKKITGRLTSAIAKQEDVSVQLEALDIMADMLSRQGGLLVNFHPSILTCLLPQLTSPRLAVRKRTIIALGHLVMSCGNIVFVDLIEHLLSELSKNDSMSTTRTYIQCIAAISRQAGHRIGEYLEKIIPLVVKFCNVDDDELREYCIQAFESFVRRCPKEVYPHVSTIINICLKYLTYDPNYNYDDEDEDENAMDADGGDDDDQGSDDEYSDDDDMSWKVRRAAAKCLDAVVSTRHEMLPEFYKTVSPALISRFKEREENVKADVFHAYLSLLKQTRPVQSWLCDPDAMEQGETPLTMLQSQVPNIVKALHKQMKEKSVKTRQCCFNMLTELVNVLPGALTQHIPVLVPGIIFSLNDKSSSSNLKIDALSCLYVILCNHSPQVFHPHVQALVPPVVACVGDPFYKITSEALLVTQQLVKVIRPLDQPSSFDATPYIKDLFTCTIKRLKAADIDQEVKERAISCMGQIICNLGDNLGSDLPNTLQIFLERLKNEITRLTTVKALTLIAGSPLKIDLRPVLGEGVPILASFLRKNQRALKLGTLSALDILIKNYSDSLTAAMIDAVLDELPPLISESDMHVSQMAISFLTTLAKVYPSSLSKISGSILNELIGLVRSPLLQGGALSAMLDFFQALVVTGTNNLGYMDLLRMLTGPVYSQSTALTHKQSYYSIAKCVAALTRACPKEGPAVVGQFIQDVKNSRSTDSIRLLALLSLGEVGHHIDLSGQLELKSVILEAFSSPSEEVKSAASYALGSISVGNLPEYLPFVLQEITSQPKRQYLLLHSLKEIISSASVVGLKPYVENIWALLLKHCECAEEGTRNVVAECLGKLTLIDPETLLPRLKGYLISGSSYARSSVVTAVKFTISDHPQPIDPLLKNCIGDFLKTLEDPDLNVRRVALVTFNSAAHNKPSLIRDLLDTVLPHLYNETKVRKELIREVEMGPFKHTVDDGLDIRKAAFECMYTLLDSCLDRLDIFEFLNHVEDGLKDHYDIKMLTFLMLVRLSTLCPSAVLQRLDRLVEPLRATCTTKVKANSVKQEFEKQDELKRSAMRAVAALLTIPEAEKSPLMSEFQSQISSNPELAAIFESIQKDSSSTNLESMDTS

SEQ ID NO: 843311 - protein, 1230 aa, Homo sapiens; identical to SEQ ID NO: 843310

SEQ ID NO: 843312 - protein, 908 aa, Homo sapiens
MDADGGDDDDQGSDDEYSDDDDMSWKVRRAAAKCLDAVVSTRHEMLPEFYKTVSPALISRFKEREENVKADVFHAYLSLLKQTRPVQSWLCDPDAMEQGETPLTMLQSQVPNIVKALHKQMKEKSVKTRQCCFNMLTELVNVLPGALTQHIPVLVPGIIFSLNDKSSSSNLKIDALSCLYVILCNHSPQVFHPHVQALVPPVVACVGDPFYKITSEALLVTQQLVKVIRPLDQPSSFDATPYIKDLFTCTIKRLKAADIDQEVKERAISCMGQIICNLGDNLGSDLPNTLQIFLERLKNEITRLTTVKALTLIAGSPLKIDLRPVLGEGVPILASFLRKNQRALKLGTLSALDILIKNYSDSLTAAMIDAVLDELPPLISESDMHVSQMAISFLTTLAKVYPSSLSKISGSILNELIGLVRSPLLQGGALSAMLDFFQALVVTGTNNLGYMDLLRMLTGPVYSQSTALTHKQSYYSIAKCVAALTRACPKEGPAVVGQFIQDVKNSRSTDSIRLLALLSLGEVGHHIDLSGQLELKSVILEAFSSPSEEVKSAASYALGSISVGNLPEYLPFVLQEITSQPKRQYLLLHSLKEIISSASVVGLKPYVENIWALLLKHCECAEEGTRNVVAECLGKLTLIDPETLLPRLKGYLISGSSYARSSVVTAVKFTISDHPQPIDPLLKNCIGDFLKTLEDPDLNVRRVALVTFNSAAHNKPSLIRDLLDTVLPHLYNETKVRKELIREVEMGPFKHTVDDGLDIRKAAFECMYTLLDSCLDRLDIFEFLNHVEDGLKDHYDIKMLTFLMLVRLSTLCPSAVLQRLDRLVEPLRATCTTKVKANSVKQEFEKQDELKRSAMRAVAALLTIPEAEKSPLMSEFQSQISSNPELAAIFESIQKDSSSTNLESMDTS

SEQ ID NO: 843313 - protein, 1230 aa, Homo sapiens; identical to SEQ ID NO: 843310

SEQ ID NO: 843314 - protein, 1230 aa, Homo sapiens; identical to SEQ ID NO: 843310

SEQ ID NO: 843315 - protein, 1197 aa, Homo sapiens
MASASYHISNLLEKMTSSDKDFRFMATNDLMTELQKDSIKLDDDSERKVVKMILKLLEDKNGEVQNLAVKCLGPLVSKVKEYQVETIVDTLCTNMLSDKEQLRDISSIGLKTVIGELPPASSGSALAANVCKKITGRLTSAIAKQEDVSVQLEALDIMADMLSRQGGLLVNFHPSILTCLLPQLTSPRLAVRKRTIIALGHLVMSCGNIVFVDLIEHLLSELSKNDSMSTTRTYIQCIAAISRQAGHRIGEYLEKIIPLVVKFCNVDDDELREYCIQAFESFVRRCPKEVYPHVSTIINICLKYLTYDPNYNYDDEDEDENAMDADGGDDDDQGSDDEYSDDDDMSWKVRRAAAKCLDAVVSTRHEMLPEFYKTVSPALISRFKEREENVKADVFHAYLSLLKQTRPVQSWLCDPDAMEQGETPLTMLQSQVPNIVKALHKQMKEKSVKTRQCCFNMLTELVNVLPGALTQHIPVLVPGIIFSLNDKSSSSNLKIDALSCLYVILCNHSPQVFHPHVQALVPPVVACVGDPFYKITSEALLVTQQLVKVIRPLDQPSSFDATPYIKDLFTCTIKRLKAADIDQEVKERAISCMGQIICNLGDNLGSDLPNTLQIFLERLKNEITRLTTVKALTLIAGSPLKIDLRPVLGEGVPILASFLRKNQRALKLGTLSALDILIKNYSDSLTAAMIDAVLDELPPLISESDMHVSQMAISFLTTLAKVYPSSLSKISGSILNELIGLVRSPLLQGGALSAMLDFFQALVVTGTNNLGYMDLLRMLTGPVYSQSTALTHKQSYYSIAKCVAALTRACPKEGPAVVGQFIQDVKNSRSTDSIRLLALLSLGEVGHHIDLSGQLELKSVILEAFSSPSEEVKSAASYALGSISVGNLPEYLPFVLQEITSQPKRQYLLLHSLKEIISSASVVGLKPYVENIWALLLKHCECAEEGTRNVVAECLGKLTLIDPETLLPRLKGYLISGSSYARSSVVTAVKFTISDHPQPIDPLLKNCIGDFLKTLEDPDLNVRRVALVTFNSAAHNKPSLIRDLLDTVLPHLYNETKVRKELIREVEMGPFKHTVDDGLDIRKAAFEMLTFLMLVRLSTLCPSAVLQRLDRLVEPLRATCTTKVKANSVKQEFEKQDELKRSAMRAVAALLTIPEAEKSPLMSEFQSQISSNPELAAIFESIQKDSSSTNLESMDTS

SEQ ID NO: 843316 - protein, 560 aa, Homo sapiens
MASASYHISNLLEKMTSSDKDFRFMATNDLMTELQKDSIKLDDDSERKVVKMILKLLEDKNGEVQNLAVKCLGPLVSKVKEYQVETIVDTLCTNMLSDKEQLRDISSIGLKTVIGELPPASSGSALAANVCKKITGRLTSAIAKQEDVSVQLEALDIMADMLSRQGGLLVNFHPSILTCLLPQLTSPRLAVRKRTIIALGHLVMSCGNIVFVDLIEHLLSELSKNDSMSTTRTYIQCIAAISRQAGHRIGEYLEKIIPLVVKFCNVDDDELREYCIQAFESFVRRCPKEVYPHVSTIINICLKYLTYDPNYNYDDEDEDENAMDADGGDDDDQGSDDEYSDDDDMSWKVRRAAAKCLDAVVSTRHEMLPEFYKTVSPALISRFKEREENVKADVFHAYLSLLKQTRPVQSWLCDPDAMEQGETPLTMLQSQVPNIVKALHKQMKEKSVKTRQCCFNMLTELVNVLPGALTQHIPVLVPGIIFSLNDKSSSSNLKIDALSCLYVILCNHSPQVFHPHVQALVPPVVACVGDPFYKITSEALLVTQQLVKAHHMPEAQWLRL

SEQ ID NO: 843317 - protein, 1230 aa, Homo sapiens; identical to SEQ ID NO: 843310

SEQ ID NO: 843318 - protein, 163 aa, Homo sapiens
DTHNQTRIPLTYGWYEARVECMYTLLDSCLDRLDIFEFLNHVEDGLKDHYDIKMLTFLMLVRLSTLCPSAVLQRLDRLVEPLRATCTTKVKANSVKQEFEKQDELKRSAMRAVAALLTIPEAEKSPLMSEFQSQISSNPELAAIFESIQKDSSSTNLESMDTS

SEQ ID NO: 843319 - protein, 679 aa, Homo sapiens
MASASYHISNLLEKMTSSDKDFRFMATNDLMTELQKDSIKLDDDSERKVVKMILKLLEDKNGEVQNLAVKCLGPLVSKVKEYQVETIVDTLCTNMLSDKEQLRDISSIGLKTVIGELPPASSGSALAANVCKKITGRLTSAIAKQEDVSVQLEALDIMADMLSRQGGLLVNFHPSILTCLLPQLTSPRLAVRKRTIIALGHLVMSCGNIVFVDLIEHLLSELSKNDSMSTTRTYIQCIAAISRQAGHRIGEYLEKIIPLVVKFCNVDDDELREYCIQAFESFVRRCPKEVYPHVSTIINICLKYLTYDPNYNYDDEDEDENAMDADGGDDDDQGSDDEYSDDDDMSWKVRRAAAKCLDAVVSTRHEMLPEFYKTVSPALISRFKEREENVKADVFHAYLSLLKQTRPVQSWLCDPDAMEQGETPLTMLQSQVPNIVKALHKQMKEKSVKTRQCCFNMLTELVNVLPGALTQHIPVLVPGIIFSLNDKSSSSNLKIDALSCLYVILCNHSPQVFHPHVQALVPPVVACVGDPFYKITSEALLVTQQLVKVIRPLDQPSSFDATPYIKDLFTCTIKRLKAADIDQEVKERAISCMGQIICNLGDNLGSDLPNTLQIFLERLKNEITRLTTVKALTLIAGSPLKIDLRPVLGEGVPILASFLRKNQRALKPEQCCIYLPCIF

SEQ ID NO: 843320 - protein, 184 aa, Homo sapiens
MASASYHISNLLEKMTSSDKDFRFMATNDLMTELQKDSIKLDDDSERKVVKMILKLLEDKNGEVQNLAVKCLGPLVSKVKEYQVETIVDTLCTNMLSDKEQLRDISSIGLKTVIGELPPASSGKQEHIFLPISFCVEVFLPTLFSPSGQGGREVAVLTDVHRNPFGQLRKLKREALFSLEINVK

SEQ ID NO: 843321 - protein, 141 aa, Homo sapiens
RRRRALAFCPRERVRSEWERDGPEWKCLAPRRGPSVRPAAHELVLTRTAPSLGWLCSLGLPRDRPTPRQGGGSPSRRLPSQRRRRAATLEAGAAASERRSSSGGGGGGSGSGQQLQQRQQAGSRPSTWRAPRTTFPICWKK

SEQ ID NO: 843322 - protein, 269 aa, Homo sapiens
MASASYHISNLLEKMTSSDKDFRFMAQQCICMHGHCSKAFHQVGMHASVHKAQVSAHTCISCTVPLRTASTHMRSRYQHISSIVNSIVLASPFECSSTGAPRTSPTAHPAQHIVDASQPHTIGPAFNSDWGRFSTSSLHHATAEKLSFGHENEFLPTSLTLRGSISDTKQGTTLSGQATTLPIHKDSYSAQRWRPIQSDHHLNDRLAHHTWHQMAYTTIRHFHRYETPGFPYTTQQGRPQISALKQPNGGKRTWLRSLGYPKAFSNNPH

SEQ ID NO: 843323 - protein, 1230 aa, Homo sapiens; identical to SEQ ID NO: 843310

SEQ ID NO: 843324 - protein, 1037 aa, Homo sapiens
PVGSTIINICLKYLTYDPNYNYDDEDEDENEWDSMSTTRTYIQCIAAISRQAGHRIGEYLEKIIPLVVKFCNVDDDELREYCIQAFESFVRRCPKEVYPHVSTIINICLKYLTYDPNYNYDDEDEDENAMDADGGDDDDQGSDDEYSDDDDMSWKVRRAAAKCLDAVVSTRHEMLPEFYKTVSPALISRFKEREENVKADVFHAYLSLLKQTRPVQSWLCDPDAMEQGETPLTMLQSQVPNIVKALHKQMKEKSVKTRQCCFNMLTELVNVLPGALTQHIPVLVPGIIFSLNDKSSSSNLKIDALSCLYVILCNHSPQVFHPHVQALVPPVVACVGDPFYKITSEALLVTQQLVKVIRPLDQPSSFDATPYIKDLFTCTIKRLKAADIDQEVKERAISCMGQIICNLGDNLGSDLPNTLQIFLERLKNEITRLTTVKALTLIAGSPLKIDLRPVLGEGVPILASFLRKNQRALKLGTLSALDILIKNYSDSLTAAMIDAVLDELPPLISESDMHVSQMAISFLTTLAKVYPSSLSKISGSILNELIGLVRSPLLQGGALSAMLDFFQALVVTGTNNLGYMDLLRMLTGPVYSQSTALTHKQSYYSIAKCVAALTRACPKEGPAVVGQFIQDVKNSRSTDSIRLLALLSLGEVGHHIDLSGQLELKSVILEAFSSPSEEVKSAASYALGSISVGNLPEYLPFVLQEITSQPKRQYLLLHSLKEIISSASVVGLKPYVENIWALLLKHCECAEEGTRNVVAECLGKLTLIDPETLLPRLKGYLISGSSYARSSVVTAVKFTISDHPQPIDPLLKNCIGDFLKTLEDPDLNVRRVALVTFNSAAHNKPSLIRDLLDTVLPHLYNETKVRKELIREVEMGPFKHTVDDGLDIRKAAFECMYTLLDSCLDRLDIFEFLNHVEDGLKDHYDIKMLTFLMLVRLSTLCPSAVLQRLDRLVEPLRATCTTKVKANSVKQEFEKQDELKRSAMRAVAALLTIPEAEKSPLMSEFQSQISSNPELAAIFESIQKDSSSTNLESMDTS

SEQ ID NO: 843325 - protein, 1230 aa, Homo sapiens; identical to SEQ ID NO: 843310

SEQ ID NO: 843326 - protein, 1136 aa, Homo sapiens
MASASYHISNLLEKMTSSDKDFRFMATNDLMTELQKDSIKLDDDSERKVVKMILKLLEDKNGEVQNLAVKCLGPLVSKVKEYQVETIVDTLCTNMLSDKEQLRDISSIGLKTVIGELPPASSGSALAANVCKKITGRLTSAIAKQEDVSVQLEALDIMADMLSRQGGLLVNFHPSILTCLLPQLTSPRLAVRKRTIIALGHLVMSCGNIVFVDLIEHLLSELSKNDSMSTTRTYIQCIAAISRQAGHRIGEYLEKIIPLVVKFCNVDDDELREYCIQAFESFVRRCPKEVYPHVSTIINICLKYLTYDPNYNYDDEDEDENAMDADGGDDDDQGSDDEYSDDDDMSWKVRRAAAKCLDAVVSTRHEMLPEFYKTVSPALISRFKEREENVKADVFHAYLSLLKQTRPVQSWLCDPDAMEQGETPLTMLQSQVPNIVKALHKQMKEKSVKTRQCCFNMLTELVNVLPGALTQHIPVLVPGIIFSLNDKSSSSNLKIDALSCLYVILCNHSPQVFHPHVQALVPPVVACVGDPFYKITSEALLVTQQLVKVIRPLDQPSSFDATPYIKDLFTCTIKRLKAADIDQEVKERAISCMGQIICNLGDNLGSDLPNTLQIFLERLKNEITRLTTVKALTLIAGSPLKIDLRPVLGEGVPILASFLRKNQRALKLGTLSALDILIKNYSDSLTAAMIDAVLDELPPLISESDMHVSQMAISFLTTLAKVYPSSLSKISGSILNELIGLVRSPLLQGGALSAMLDFFQALVVTGTNNLGYMDLLRMLTGPVYSQSTALTHKQSYYSIAKCVAALTRACPKEGPAVVGQFIQDVKNSRSTDSIRLLALLSLGEVGHHIDLSGQLELKSVILEAFSSPSEEVKSAASYALGSISVGNLPEYLPFVLQEITSQPKRQYLLLHSLKEIISSASVVGLKPYVENIWALLLKHCECAEEGTRNVVAECLGKLTLIDPETLLPRLKGYLISGSSYARSSVVTAVKFTISDHPQPIDPLLKNCIGDFLKTLEDPDLNVRRVALVTFNSAAHNKPSLIRDLLDTVLPHLYNETKVRKELIREVEMGPFKHTVDDGLDIRKAAFECMYTLLDSCLDRLDIFEFLNHVEDGLKDHYDIKVRCLCLFIQCFRRRLC

SEQ ID NO: 843327 - protein, 1230 aa, Homo sapiens; identical to SEQ ID NO: 843310

SEQ ID NO: 843328 - protein, 573 aa, Homo sapiens
TDVMSCEAGLVGTLSALDILIKNYSDSLTAAMIDAVLDELPPLISESDMHVSQMAISFLTTLAKVYPSSLSKISGSILNELIGLVRSPLLQGGALSAMLDFFQALVVTGTNNLGYMDLLRMLTGPVYSQSTALTHKQSYYSIAKCVAALTRACPKEGPAVVGQFIQDVKNSRSTDSIRLLALLSLGEVGHHIDLSGQLELKSVILEAFSSPSEEVKSAASYALGSISVGNLPEYLPFVLQEITSQPKRQYLLLHSLKEIISSASVVGLKPYVENIWALLLKHCECAEEGTRNVVAECLGKLTLIDPETLLPRLKGYLISGSSYARSSVVTAVKFTISDHPQPIDPLLKNCIGDFLKTLEDPDLNVRRVALVTFNSAAHNKPSLIRDLLDTVLPHLYNETKVRKELIREVEMGPFKHTVDDGLDIRKAAFECMYTLLDSCLDRLDIFEFLNHVEDGLKDHYDIKMLTFLMLVRLSTLCPSAVLQRLDRLVEPLRATCTTKVKANSVKQEFEKQDELKRSAMRAVAALLTIPEAEKSPLMSEFQSQISSNPELAAIFESIQKDSSSTNLESMDTS

SEQ ID NO: 843329 - protein, 1230 aa, Homo sapiens; identical to SEQ ID NO: 843310

SEQ ID NO: 843330 - protein, 451 aa, Homo sapiens
LPLLEHALKRDQHGFKRMVSLFNRLIKVTQRIIQSLPKYPGPSCKGHALSRVSITWGTETGSSATSVTSGDLSGQLELKSVILEAFSSPSEEVKSAASYALGSISVGNLPEYLPFVLQEITSQPKRQYLLLHSLKEIISSASVVGLKPYVENIWALLLKHCECAEEGTRNVVAECLGKLTLIDPETLLPRLKGYLISGSSYARSSVVTAVKFTISDHPQPIDPLLKNCIGDFLKTLEDPDLNVRRVALVTFNSAAHNKPSLIRDLLDTVLPHLYNETKVRKELIREVEMGPFKHTVDDGLDIRKAAFECMYTLLDSCLDRLDIFEFLNHVEDGLKDHYDIKMLTFLMLVRLSTLCPSAVLQRLDRLVEPLRATCTTKVKANSVKQEFEKQDELKRSAMRAVAALLTIPEAEKSPLMSEFQSQISSNPELAAIFESIQKDSSSTNLESMDTS

SEQ ID NO: 843331 - protein, 110 aa, Homo sapiens
MLTFLMLVRLSTLCPSAVLQRLDRLVEPLRATCTTKVKANSVKQEFEKQDELKRSAMRAVAALLTIPEAEKSPLMSEFQSQISSNPELAAIFESIQKDSSSTNLESMDTS

SEQ ID NO: 843332 - protein, 141 aa, Homo sapiens; identical to SEQ ID NO: 843321

SEQ ID NO: 843333 - protein, 424 aa, Homo sapiens
WEVLSRLIYSGPRGEGARTPRGLSSPACPFQRPRPRSMPRPRLLAALCGALLCAPSLLVALDICSKNPCHNGGLCEEISQEVRGDVFPSYTCTCLKGYAGNHCETKCVEPLGMENGNIANSQIAASSVRVTFLGLQHWVPELARLNRAGMVNAWTPSSNDDNPWIQVNLLRRMWVTGVVTQGASRLASHEYLKAFKVAYSLNGHEFDFIHDVNKKHKEFVGNWNKNAVHVNLFETPVEAQYVRLYPTSCHTACTLRFELLGCELNGCANPLGLKNNSIPDKQITASSSYKTWGLHLFSWNPSYARLDKQGNFNAWVAGSYGNDQWLQVDLGSSKEVTGIITQGARNFGSVQFVASYKVAYSNDSANWTEYQDPRTGSSKIFPGNWDNHSHKKNLFETPILARYVRILPVAWHNRIALRLELLGC

SEQ ID NO: 843334 - protein, 372 aa, Homo sapiens
WEVLSRLIYSGPRGEGARTPRGLSSPACPFQRPRPRSMPRPRLLAALCGALLCAPSLLVALDICSKNPCHNGGLCEEISQEVRGDVFPSYTCTCLKGYAGNHCETKCVEPLGMENGNIANSQIAASSVRVTFLGLQHWVPELARLNRAGMVNAWTPSSNDDNPWIQVNLLRRMWVTGVVTQGASRLASHEYLKAFKVAYSLNGHEFDFIHDVNKKHKEFVGNWNKNAVHVNLFETPVEAQYVRLYPTSCHTACTLRFELLGCELNGCANPLGLKNNSIPDKQITASSSYKTWGLHLFSWNPSYARLDKQGNFNAWVAGSYGNDQWLQIFPGNWDNHSHKKNLFETPILARYVRILPVAWHNRIALRLELLGC

SEQ ID NO: 843335 - protein, 424 aa, Homo sapiens; identical to SEQ ID NO: 843333

SEQ ID NO: 843336 - protein, 424 aa, Homo sapiens; identical to SEQ ID NO: 843333

SEQ ID NO: 843337 - protein, 424 aa, Homo sapiens; identical to SEQ ID NO: 843333

SEQ ID NO: 843338 - protein, 424 aa, Homo sapiens; identical to SEQ ID NO: 843333

SEQ ID NO: 843339 - protein, 424 aa, Homo sapiens; identical to SEQ ID NO: 843333

SEQ ID NO: 843340 - protein, 333 aa, Homo sapiens
WEVLSRLIYSGPRGEGARTPRGLSSPACPFQRPRPRSMPRPRLLAALCGALLCAPSLLVALDICSKNPCHNGGLCEEISQEVRGDVFPSYTCTCLKGYAGNHCETKCVEPLGMENGNIANSQIAASSVRVTFLGLQHWVPELARLNRAGMVNAWTPSSNDDNPWIQVNLLRRMWVTGVVTQGASRLASHEYLKAFKVAYSLNGHEFDFIHDVNKKHKEFVGNWNKNAVHVNLFETPVEAQYVRLYPTSCHTACTLRFELLGCELNARPGACISSAGTPPMHGWTSRATSTPGLRGATVTISGCRSSLATGTTTPTRRTCLRRPSWLAMCASCL

SEQ ID NO: 843341 - protein, 95 aa, Homo sapiens
VGGAEPPDLFRSQRRRRQNPAGSEQPSVPIPAPASPQHAAPPPAGRAVRRAALRPQPPRRPGYLFQKPLPQRWFMRGDFPRSARRCLPLVHLHVP

SEQ ID NO: 843342 - protein, 275 aa, Homo sapiens
WEVLSRLIYSGPRGEGARTPRGLSSPACPFQRPRPRSMPRPRLLAALCGALLCAPSLLVALDICSKNPCHNGGLCEEISQEVRGDVFPSYTCTCLKGYAGNHCETKCVEPLGMENGNIANSQIAASSVRVTFLGLQHWVPELARLNRAGMVNAWTPSSNDDNPWIQVNLLRRMWVTGVVTQGASRLASHEYLKAFKVAYSLNGHEFDFIHDVNKKHKEFVGNWNKNAVHVNLFETPVEAQYVRLYPTSCHTACTLRFELLGCELNGKLPQVSTDN

SEQ ID NO: 843343 - protein, 220 aa, Homo sapiens
MVASRKARKRQAGDNSLLPVGPASALGYPCGHNCCGPLSPRHFPLSPWLPLLPLVLKPSDTEGGGAGLWGERERGQRRAWVGRVGVWGPLCWLFTPEDTGSFQNIFIFFTGKKKKKKKKKKKKKKEEGGARAPKPPPPPPPPPPPPLFCKGGPPKGRRIIKQRRGERGARGLKNTRDQWRRTTGGTTGGTPSGEKRHTQLRGGGGEPQGGEHKHPQGGLL

SEQ ID NO: 843344 - protein, 110 aa, Homo sapiens
MVASRKARKRQAGDNSLLPVGPASALGYPCGHNCCGPLSPRHFPLSPWLPLLPLVLKPSDTEGGGAGLWGERERGQRRAWVGRVGVWGPLCWLFTPEDTGSFQNIFIFFT

SEQ ID NO: 843345 - protein, 424 aa, Homo sapiens; identical to SEQ ID NO: 843333

SEQ ID NO: 843346 - protein, 424 aa, Homo sapiens; identical to SEQ ID NO: 843333

SEQ ID NO: 843347 - protein, 424 aa, Homo sapiens; identical to SEQ ID NO: 843333

SEQ ID NO: 843348 - protein, 424 aa, Homo sapiens; identical to SEQ ID NO: 843333

SEQ ID NO: 843349 - protein, 380 aa, Homo sapiens
WEVLSRLIYSGPRGEGARTPRGLSSPACPFQRPRPRSMPRPRLLAALCGALLCAPSLLVALECVEPLGMENGNIANSQIAASSVRVTFLGLQHWVPELARLNRAGMVNAWTPSSNDDNPWIQVNLLRRMWVTGVVTQGASRLASHEYLKAFKVAYSLNGHEFDFIHDVNKKHKEFVGNWNKNAVHVNLFETPVEAQYVRLYPTSCHTACTLRFELLGCELNGCANPLGLKNNSIPDKQITASSSYKTWGLHLFSWNPSYARLDKQGNFNAWVAGSYGNDQWLQVDLGSSKEVTGIITQGARNFGSVQFVASYKVAYSNDSANWTEYQDPRTGSSKIFPGNWDNHSHKKNLFETPILARYVRILPVAWHNRIALRLELLGC

SEQ ID NO: 843350 - protein, 145 aa, Homo sapiens
FPVKKINIFWKLPVSSGVKSQHSEPGYRQDAHIAAWVAGSYGNDQWLQVDLGSSKEVTGIITQGARNFGSVQFVASYKVAYSNDSANWTEYQDPRTGSSKIFPGNWDNHSHKKNLFETPILARYVRILPVAWHNRIALRLELLGC

SEQ ID NO: 843351 - protein, 283 aa, Homo sapiens
WEVLSRLIYSGPRGEGARTPRGLSSPACPFQRPRPRSMPRPRLLAALCGALLCAPSLLVALDICSKNPCHNGGLCEEISQEVRGDVFPSYTCTCLKGYAGNHCETKCVEPLGMENGNIANSQIAASSVRVTFLGLQHWVPELARLNRAGMVNAWTPSSNDDNPWIQVNLLRRMWVTGVVTQGASRLASHEYLKAFKVAYSLNGHEFDFIHDVNKKHKEFVGNWNKNAVHVNLFETPVEAQYVRLYPTSCHTACTLRFELLGCELNDAPIPGPEGLPSRDPLDP

SEQ ID NO: 843352 - protein, 103 aa, Homo sapiens
VGGAEPPDLFRSQRRRRQNPAGSEQPSVPIPAPASPQHAAPPPAGRAVRRAALRPQPPRRPGGISAFQPEGPVCSYQMLPTLGELSGMSAHGPFQPSSSRNWN

SEQ ID NO: 843353 - protein, 212 aa, Homo sapiens
NLPGVPSPGSNARMPVSTSLHQDGSQERPVSLTSTTSSSGSSCDSRSAMEEPSSSEAPAKNGAGSLRSRHLPNSNNNSSSWLNVKGPLSPFNSRAAAGPAHHKLSYLGRVVREIVETERMYVQDLRSIVEDYLLKIIDTPGLLKPEQVSALFGNIENIYALNSSQEFDIYTQYCNNYPNSVAALTECMRDKQQAKFFRDRQELLQHSLPLGS

SEQ ID NO: 843354 - protein, 169 aa, Homo sapiens
EAPPGAPSRPLDRGSSRLDRSYSYSYSNGPGPFYNKGLISEEELGASVASLSSENPYATIRDLPSLPGGPRESSYMEMKGPPSGSPPRQPPQFWDSQRRRQPQPQRDSGTYEQPSPLIHDRDSVGSQPPLPPGLPPGHYDSPKNSHIPGHYDLPPVRHPPSPPLRRQDR

SEQ ID NO: 843355 - protein, 169 aa, Homo sapiens; identical to SEQ ID NO: 843354

SEQ ID NO: 843356 - protein, 152 aa, Homo sapiens
TILVDGVSEEFRLVDLLPSTHYTATMYATNGPLTSGTISTNFSTLLDPPANLTASEVTRQSALISWQPPRAEIENYVLTYKSTDGSRKELIVDAEDTWIRLEGLLENTDYTVLLQAAQDTTWSSITSTAFTTAPTRKPLTNKVTAGTSSTTP

SEQ ID NO: 843357 - protein, 157 aa, Homo sapiens
MSGSLGRAAAALLRWGRGAGGGGLWGPGVRAAGSGAGGGGSAEQLDALVKKDKVVVFLKGTPEQPQCGFSNAVVQILRLHGVRDYAAYNVLDDPELRQGIKDYSNWPTIPQVYLNGEFVGGCDILLQMHQNGDLVEELKKLGIHSALLDEKKDQDSK

SEQ ID NO: 843358 - protein, 52 aa, Homo sapiens
MKRKTKTPSEGGQVLAEQRGSRSCQRLTARKALPILVFTIETATACTDHFGS

SEQ ID NO: 843359 - protein, 52 aa, Homo sapiens; identical to SEQ ID NO: 843358

SEQ ID NO: 843360 - protein, 157 aa, Homo sapiens; identical to SEQ ID NO: 843357

SEQ ID NO: 843361 - protein, 157 aa, Homo sapiens; identical to SEQ ID NO: 843357

SEQ ID NO: 843362 - protein, 52 aa, Homo sapiens; identical to SEQ ID NO: 843358

SEQ ID NO: 843363 - protein, 257 aa, Homo sapiens
MPKGKKAKGKKVAPAPAVVKKQEAKKVVNPLFEKRPKNFGIGQDIQPKRDLTRFVKWPRYIRLQRQRAILYKRLKVPPAINQFTQALDRQTATQLLKLAHKYRPETKQEKKQRLLARAEKKAAGKGDVPTKRPPVLRAGVNTVTTLVENKKAQLVVIAHDVDPIELVVFLPALCRKMGVPYCIIKGKARLGRLVHRKTCTTVAFTQVNSEDKGALAKLVEAIRTNYNDRYDEIRRHWGGNVLGPKSVARIAKLEKAR

SEQ ID NO: 843364 - protein, 257 aa, Homo sapiens; identical to SEQ ID NO: 843363

SEQ ID NO: 843365 - protein, 123 aa, Homo sapiens
IFIIYCRHLEISVLISNYGTCSLNGHEVTIRTIFRMSLLDASSLKPYDSFLLAVLFLTRDNKGFASQVCMAKKVSTSVNGSFLMTSQQPLVKDVIEIVQRLGSVCFVLLLKSFHGSKLFLSIV

SEQ ID NO: 843366 - protein, 80 aa, Homo sapiens
LRIPTSTDAFSLQLEMVYNMTVWNVKRKQDIEEGAPPQVRKEPGRETSVNTPEEKMDIGKPNAQILINEARASWAPTIIN

SEQ ID NO: 843367 - protein, 171 aa, Homo sapiens
GSTHLSISGINIYEPAPPTGPTQRPLETLGNFRGWYIRTEKLQQNQSWTVKQQCVDLLAEGLWEELLDDEQPAITVMDWFEDSRLDACVYELHVWLLAADRRTVIAQHHVAPRTSGRGPPGRWVQVSHVFRHYGPGVRFIHFLHKAKNRMEPGGLRRTRVTDSSVSVQLRE

SEQ ID NO: 843368 - protein, 214 aa, Homo sapiens
AGWGRRRAGPAGSSGYRAGYSSSTPHDANMAAQKDQQKDAEAEGLSGTTLLPKLIPSGAGREWLERRRATIRPWSTFVDQQRFSRPRNLGELCQRLVRNVEYYQSNYVFVFLGLILYCVVTSPMLLVALAVFFGACYILYLRTLESKLVLFGREVSPAHQYALAGGISFPFFWLAGAGSAVFWVLGATLVVIGSHAAFHQIEAVDGEELQMEPV

SEQ ID NO: 843369 - protein, 185 aa, Homo sapiens
MAAQKDQQKDAEAEGLSGTTLLPKLIPSGAGREWLERRRATIRPWSTFVDQQRFSRPRNLGELCQRLVRNVEYYQSNYVFVFLGLILYCVVTSPMLLVALAVFFGACYILYLRTLESKLVLFGREVSPAHQYALAGGISFPFFWLAGAGSAVFWVLGATLVVIGSHAAFHQIEAVDGEELQMEPV

SEQ ID NO: 843370 - protein, 241 aa, Homo sapiens
MAKVRPGVNSAPRRKHGSAEGPAERCRGGRAERHVSELALGPRTRDPGVRAPGPLLPPPSRAWSPSPEPQKCWPRTLLPKLIPSGAGREWLERRRATIRPWSTFVDQQRFSRPRNLGELCQRLVRNVEYYQSNYVFVFLGLILYCVVTSPMLLVALAVFFGACYILYLRTLESKLVLFGREVSPAHQYALAGGISFPFFWLAGAGSAVFWVLGATLVVIGSHAAFHQIEAVDGEELQMEPV

SEQ ID NO: 843371 - protein, 186 aa, Homo sapiens
AGWGRRRAGPAGSSGYRAGYSSSTPHDANMAAQKDQQKDAEAEGLSGTTLLPKLIPSGAGREWLERRRATIRPWSTFVDQQRFSRPRNLGELCQRLVRNVEYYQSNYVFVFLGLILYCVVTSPMLLVALAVFFGACYILYLRTLESKLVLFGREVSPAHQYALAGGISFPFFWLAGAGSAVFWVLD

SEQ ID NO: 843372 - protein, 151 aa, Homo sapiens
MAAQKDQQKDAEAEGLSGTTLLPKLIPSGAGREWLERRRATIRPWSTFVDQQRFSRPRNLGELCQRLVRNVEYYQSNYVFVFLGLILYCVVTSPMLLVALAVFFGACYILYLRTLESKLVLFGATLVVIGSHAAFHQIEAVDGEELQMEPV

SEQ ID NO: 843373 - protein, 154 aa, Homo sapiens
MTLLPKLIPSGAGREWLERRRATIRPWSTFVDQQRFSRPRNLGELCQRLVRNVEYYQSNYVFVFLGLILYCVVTSPMLLVALAVFFGACYILYLRTLESKLVLFGEKPPAQMNPWSLKSWSFGMQTDLRPQIQVLQNPSPPKPRCTLDPPNLIP

SEQ ID NO: 843374 - protein, 185 aa, Homo sapiens; identical to SEQ ID NO: 843369

SEQ ID NO: 843375 - protein, 85 aa, Homo sapiens
SLTLEDPPRLVALAVFFGACYILYLRTLESKLVLFGEKPPAQMNPWSLKSWSFGMQTDLRPQIQVLQNPSPPKPRCTLDPPNLIP

SEQ ID NO: 843376 - protein, 214 aa, Homo sapiens; identical to SEQ ID NO: 843368

SEQ ID NO: 843377 - protein, 139 aa, Homo sapiens
MAAQKDQQKDAEAEGLSGTTLLPKLIPSGAGREWLERRRATIRPWSTFVDQQRFSRPRNLGELCQRLVRNVEYYQSNYVFVFLGLILYCVPRGEPSASVCSGWRHLLPLLLAGWCGLGRLLGAGSHPGGHRLPRCLPPD

SEQ ID NO: 843378 - protein, 172 aa, Homo sapiens
MAAQKDQQKDAEAEGLSGTTLLPKLIPSGAGREWLERRRATIRPWSTFVDQQRFSRPRNLGELCQRLVRNVEYYQSNYVFVFLGLILYCVVTSPMLLVALAVFFGACYILYLRTLESKLVLFGEKPPAQMNPWSLKSWSFGMQTDLRPQIQVLQNPSPPKPRCTLDPPNLIP

SEQ ID NO: 843379 - protein, 73 aa, Homo sapiens
AQRISMLWLEASPSPSSGWLVRARPSSGCWVSTGSEQLGWMVGARCRSVALSCRLSCRSHPGGHRLPRCLPPD

SEQ ID NO: 843380 - protein, 953 aa, Homo sapiens
MTAAENVCYTLINVPMDSEPPSEISLKNDLEKGDVKSKTEALKKVIIMILNGEKLPGLLMTIIRFVLPLQDHTIKKLLLVFWEIVPKTTPDGRLLHEMILVCDAYRKDLQHPNEFIRGSTLRFLCKLKEAELLEPLMPAIRACLEHRHSYVRRNAVLAIYTIYRNFEHLIPDAPELIHDFLVNEKDASCKRNAFMMLIHADQDRALDYLSTCIDQVQTFGDILQLVIVELIYKVCHANPSERARFIRCIYNLLQSSSPAVKYEAAGTLVTLSSAPTAIKAAAQCYIDLIIKESDNNVKLIVLDRLIELKEHPAHERVLQDLVMDILRVLSTPDLEVRKKTLQLALDLVSSRNVEELVIVLKKEVIKTNNVSEHEDTDKYRQLLVRTLHSCSVRFPDMAANVIPVLMEFLSDNNEAAAADVLEFVREAIQRFDNLRMLIVEKMLEVFHAIKSVKIYRGALWILGEYCSTKEDIQSVMTEIRRSLGEIPIVESEIKKEAGELKPEEEITVGPVQKLVTEMGTYATQSALSSSRPTKKEEDRPPLRGFLLDGDFFVAASLATTLTKIALRYVALVQEKKKQNSFVAEAMLLMATILHLGKSSLPKKPITDDDVDRISLCLKVLSECSPLMNDIFNKECRQSLSHMLSAKLEEEKLSQKKESEKRNVTVQPDDPISFMQLTAKNEMNCKEDQFQLSLLAAMGNTQRKEAADPLASKLNKVTQLTGFSDPVYAEAYVHVNQYDIVLDVLVVNQTSDTLQNCTLELATLGDLKLVEKPSPLTLAPHDFANIKANVKVASTENGIIFGNIVYDVSGAASDRNCVVLSDIHIDIMDYIQPATCTDAEFRQMWAEFEWENKVTVNTNMVDLNDYLQHILKSTNMKCLTPEKALSGYCGFMAANLYARSIFGEDALANVSIEKPIHQGPDAAVTGHIRIRAKSQGMALSLGDKINLSQKKTSI

SEQ ID NO: 843381 - protein, 953 aa, Homo sapiens; identical to SEQ ID NO: 843380

SEQ ID NO: 843382 - protein, 953 aa, Homo sapiens; identical to SEQ ID NO: 843380

SEQ ID NO: 843383 - protein, 935 aa, Homo sapiens
MTAAENVCYTLINVPMDSEPPSEISLKNDLEKGDVKSKTEALKKVIIMILNGEKLPGLLMTIIRFVLPLQDHTIKKLLLVFWEIVPKTTPDGRLLHEMILVCDAYRKDLQHPNEFIRGSTLRFLCKLKEAELLEPLMPAIRACLEHRHSYVRRNAVLAIYTIYRNFEHLIPDAPELIHDFLVNEKDASCKRNAFMMLIHADQDRALDYLSTCIDQVQTFGDILQLVIVELIYKVCHANPSERARFIRCIYNLLQSSSPAVKYEAAGTLVTLSSAPTAIKAAAQCYIDLIIKESDNNVKLIVLDRLIELKEHPAHERVLQDLVMDILRVLSTPDLEVRKKTLQLALDLVSSRNVEELVIVLKKEVIMRTLHSCSVRFPDMAANVIPVLMEFLSDNNEAAAADVLEFVREAIQRFDNLRMLIVEKMLEVFHAIKSVKIYRGALWILGEYCSTKEDIQSVMTEIRRSLGEIPIVESEIKKEAGELKPEEEITVGPVQKLVTEMGTYATQSALSSSRPTKKEEDRPPLRGFLLDGDFFVAASLATTLTKIALRYVALVQEKKKQNSFVAEAMLLMATILHLGKSSLPKKPITDDDVDRISLCLKVLSECSPLMNDIFNKECRQSLSHMLSAKLEEEKLSQKKESEKRNVTVQPDDPISFMQLTAKNEMNCKEDQFQLSLLAAMGNTQRKEAADPLASKLNKVTQLTGFSDPVYAEAYVHVNQYDIVLDVLVVNQTSDTLQNCTLELATLGDLKLVEKPSPLTLAPHDFANIKANVKVASTENGIIFGNIVYDVSGAASDRNCVVLSDIHIDIMDYIQPATCTDAEFRQMWAEFEWENKVTVNTNMVDLNDYLQHILKSTNMKCLTPEKALSGYCGFMAANLYARSIFGEDALANVSIEKPIHQGPDAAVTGHIRIRAKSQGMALSLGDKINLSQKKTSI

SEQ ID NO: 843384 - protein, 935 aa, Homo sapiens
MTAAENVCYTLINVPMDSEPPSEISLKNDLEKGDVKSKTEALKKVIIMILNGEKLPGLLMTIIRFVLPLQDHTIKKLLLVFWEIVPKTTPDGRLLHEMILVCDAYRKDLQHPNEFIRGSTLRFLCKLKEAELLEPLMPAIRACLEHRHSYVRRNAVLAIYTIYRNFEHLIPDAPELIHDFLVNEKDASCKRNAFMMLIHADQDRALDYLSTCIDQVQTFGDILQLVIVELIYKVCHANPSERARFIRCIYNLLQSSSPAVKYEAAGTLVTLSSAPTAIKAAAQCYIDLIIKESDNNVKLIVLDRLIELKEHPAHERVLQDLVMDILRVLSTPDLEVRKKTLQLALDLVSSRNVEELVIVLKKEVIKTNNVSEHEDTDKYRQLLVRTLHSCSVRFPDMAANVIPVLMEFLSDNNEAAAADVLEFVREAIQRFDNLRMLIVEKMLEVFHAIKSVKIYRGALWILGEYCSTKEDIQSVMTEIRRSLGEIPIVESEIKKEAGELKPEEEITVGPVQKLVTEMGTYATQSALSSSRPTKKEEDRPPLRGFLLDGDFFVAASLATTLTKIALRYVALVQEKKKQNSFVAEAMLLMATILHLGKSSLPKKPITDDDVDRISLCLKVLSECSPLMNDIFNKECRQSLSHMLSAKLEEEKLSQKMQLTAKNEMNCKEDQFQLSLLAAMGNTQRKEAADPLASKLNKVTQLTGFSDPVYAEAYVHVNQYDIVLDVLVVNQTSDTLQNCTLELATLGDLKLVEKPSPLTLAPHDFANIKANVKVASTENGIIFGNIVYDVSGAASDRNCVVLSDIHIDIMDYIQPATCTDAEFRQMWAEFEWENKVTVNTNMVDLNDYLQHILKSTNMKCLTPEKALSGYCGFMAANLYARSIFGEDALANVSIEKPIHQGPDAAVTGHIRIRAKSQGMALSLGDKINLSQKKTSI

SEQ ID NO: 843385 - protein, 937 aa, Homo sapiens
MTAAENVCYTLINVPMDSEPPSEISLKNDLEKGDVKSKTEALKKVIIMILNGEKLPGLLMTIIRFVLPLQDHTIKKLLLVFWEIVPKTTPDGRLLHEMILVCDAYRKDLQHPNEFIRGSTLRFLCKLKEAELLEPLMPAIRACLEHRHSYVRRNAVLAIYTIYRNFEHLIPDAPELIHDFLVNEKDASCKRNAFMMLIHADQDRALDYLSTCIDQVQTFGDILQLVIVELIYKVCHANPSERARFIRCIYNLLQSSSPAVKYEAAGTLVTLSSAPTAIKAAAQCYIDLIIKESDNNVKLIVLDRLIELKEHPAHERVLQDLVMDILRVLSTPDLEVRKKTLQLALDLVSSRNVEELVIVLKKEVIKTNNVSEHEDTDKYRQLLVRTLHSCSVRFPDMAANVIPVLMEFLSDNNEAAAADVLEFVREAIQRFDNLRMLIVEKMLEVFHAIKSVKIYRGALWILGEYCSTKEDIQSVMTEIRRSLGEIPIVESEIKKEAGELKPEEEITVGPVQKLVTEMGTYATQSALSSSRPTKKEEDRPPLRGFLLDGDFFVAASLATTLTKIALRYVALVQEKKKQNSFVAEAMLLMATILHLGKSSLPKKPITDDDVDRISLCLKVLSECSPLMNDIFNKECRQSLSHMLSAKLEEEKLSQKKESEKRNVTVQPDDPISFMQLTAKNEMNCKEDQFQLSLLAAMGNTQRKEAADPLASKLNKVTQLTGFSDPVYAEAYVHVNQYDIVLDVLVVNQTSDTLQNCTLELATLGDLKLVEKPSPLTLAPHDFANIKANVKVASTENGIIFGNIVYDVSGAASDRNCVVLSDIHIDIMDYIQPATCTDAEFRQMWAEFEWENKILKSTNMKCLTPEKALSGYCGFMAANLYARSIFGEDALANVSIEKPIHQGPDAAVTGHIRIRAKSQGMALSLGDKINLSQKKTSI

SEQ ID NO: 843386 - protein, 953 aa, Homo sapiens; identical to SEQ ID NO: 843380

SEQ ID NO: 843387 - protein, 946 aa, Homo sapiens [sequence omitted]

SEQ ID NO: 843388 - protein, 886 aa, Homo sapiens
MTAAENVCYTLINVPMDSEPPSEISLKNDLEKGDVKSKTEALKKVIIMILNGEKLPGLLMTIIRFVLPLQDHTIKKLLLVFWEIVPKTTPDGRLLHEMILVCDAYRKDLQHPNEFIRGSTLRFLCKLKEAELLEPLMPAIRACLEHRHSYVRRNAVLAIYTIYRNFEHLIPDAPELIHDFLVNEKDASCKRNAFMMLIHADQDRALDYLSTCIDQVQTFGDILQLVIVELIYKVCHANPSERARFIRCIYNLLQSSSPAVKYEAAGTLVTLSSAPTAIKAAAQCYIDLIIKESDNNVKLIVLDRLIELKEHPAHERVLQDLVMDILRVLSTPDLEVRKKTLQLALDLVSSRNVEELVIVLKKEVIKTNNVSEHEDTDKYRQLLVRTLHSCSVRFPDMAANVIPVLMEFLSDNNEAAAADVLEFVREAIQRFDNLRMLIVEKMLEVFHAIKSVKIYRGALWILGEYCSTKEDIQSVMTEIRRSLGEIPIVESEIKKEAGELKPEEEITVGPVQKLVTEMGTYATQSALSSSRPTKKEEDRPPLRGFLLDGDFFVAASLATTLTKIALRYVALVQEKKKQNSFVAEAMLLMATILHLGKSSLPKKPITDDDVDRISLCLKVLSECSPLMNDIFNKECRQSLSHMLSAKLEEEKLSQKKESEKRNVTVQPDDPISFMQLTAKNEMNCKEDQFQLSLLAAMGNTQRKEAADPLASKLNKVTQLTGFSDPVYAEAYVHVNQYDIVLDVLVVNQTSDTLQNCTLELATLGDLKLVEKPSPLTLAPHDFANIKANVKVASTENGIIFGNIVYDVSGAASDRNCVVLSDIHIDIMDYIQPATCTDAEFRQMWAEFEWENKVTVNTNMVDLNDYLQHILKSTNMKCLTPEKVKFD

SEQ ID NO: 843389 - protein, 516 aa, Homo sapiens
MTAAENVCYTLINVPMDSEPPSEISLKNDLEKGDVKSKTEALKKVIIMILNGEKLPGLLMTIIRFVLPLQDHTIKKLLLVFWEIVPKTTPDGRLLHEMILVCDAYRKDLQHPNEFIRGSTLRFLCKLKEAELLEPLMPAIRACLEHRHSYVRRNAVLAIYTIYRNFEHLIPDAPELIHDFLVNEKDASCKRNAFMMLIHADQDRALDYLSTCIDQVQTFGDILQLVIVELIYKVCHANPSERARFIRCIYNLLQSSSPAVKYEAAGTLVTLSSAPTAIKAAAQCYIDLIIKESDNNVKLIVLDRLIELKEHPAHERVLQDLVMDILRVLSTPDLEVRKKTLQLALDLVSSRNVEELVIVLKKEVIKTNNVSEHEDTDKYRQLLVRTLHSCSVRFPDMAANVIPVLMEFLSDNNEAAAADVLEFVREAIQRFDNLRMLIVEKMLEVFHAIKSVKIYRGALWILGEYCSTKEDIQSVMTEIRRSLGEIPIVESEIKKDVESKLKQHQVPTVVTFLIKI

SEQ ID NO: 843390 - protein, 953 aa, Homo sapiens; identical to SEQ ID NO: 843380

SEQ ID NO: 843391 - protein, 953 aa, Homo sapiens; identical to SEQ ID NO: 843380

SEQ ID NO: 843392 - protein, 643 aa, Homo sapiens
SVNCDLTHSERGISYRLLDHMRVELRKENSVLRTEDLVSARSGEQLVIVLKKEVIKTNNVSEHEDTDKYRQLLVRTLHSCSVRFPDMAANVIPVLMEFLSDNNEAAAADVLEFVREAIQRFDNLRMLIVEKMLEVFHAIKSVKIYRGALWILGEYCSTKEDIQSVMTEIRRSLGEIPIVESEIKKEAGELKPEEEITVGPVQKLVTEMGTYATQSALSSSRPTKKEEDRPPLRGFLLDGDFFVAASLATTLTKIALRYVALVQEKKKQNSFVAEAMLLMATILHLGKSSLPKKPITDDDVDRISLCLKVLSECSPLMNDIFNKECRQSLSHMLSAKLEEEKLSQKKESEKRNVTVQPDDPISFMQLTAKNEMNCKEDQFQLSLLAAMGNTQRKEAADPLASKLNKVTQLTGFSDPVYAEAYVHVNQYDIVLDVLVVNQTSDTLQNCTLELATLGDLKLVEKPSPLTLAPHDFANIKANVKVASTENGIIFGNIVYDVSGAASDRNCVVLSDIHIDIMDYIQPATCTDAEFRQMWAEFEWENKVTVNTNMVDLNDYLQHILKSTNMKCLTPEKALSGYCGFMAANLYARSIFGEDALANVSIEKPIHQGPDAAVTGHIRIRAKSQGMALSLGDKINLSQKKTSI

SEQ ID NO: 843393 - protein, 840 aa, Homo sapiens
MTAAENVCYTLINVPMDSEPPSEISLKNDLEKGDVKSKTEALKKVIIMILNGEKLPGLLMTIIRFVLPLQDHTIKKLLLVFWEIVPKTTPDGRLLHEMILVCDAYRKDLQHPNEFIRGSTLRFLCKLKEAELLEPLMPAIRACLEHRHSYVRRNAVLAIYTIYRNFEHLIPDAPELIHDFLVNEKDASCKRNAFMMLIHADQDRALDYLSTCIDQVQTFGDILQLVIVELIYKVCHANPSERARFIRCIYNLLQSSSPAVKYEAAGTLVTLSSAPTAIKAAAQCYIDLIIKESDNNVKLIVLDRLIELKEHPAHERVLQDLVMDILRVLSTPDLEVRKKTLQLALDLVSSRNVEELVIVLKKEVIKTNNVSEHEDTDKYRQLLVRTLHSCSVRFPDMAANVIPVLMEFLSDNNEAAAADVLEFVREAIQRFDNLRMLIVEKMLEVFHAIKSVKIYRGALWILGEYCSTKEDIQSVMTEIRRSLGEIPIVESEIKKEAGELKPEEEITVGPVQKLVTEMGTYATQSALSSSRPTKKEEDRPPLRGFLLDGDFFVAASLATTMQLTAKNEMNCKEDQFQLSLLAAMGNTQRKEAADPLASKLNKVTQLTGFSDPVYAEAYVHVNQYDIVLDVLVVNQTSDTLQNCTLELATLGDLKLVEKPSPLTLAPHDFANIKANVKVASTENGIIFGNIVYDVSGAASDRNCVVLSDIHIDIMDYIQPATCTDAEFRQMWAEFEWENKVTVNTNMVDLNDYLQHILKSTNMKCLTPEKALSGYCGFMAANLYARSIFGEDALANVSIEKPIHQGPDAAVTGHIRIRAKSQGMALSLGDKINLSQKKTSI

SEQ ID NO: 843394 - protein, 953 aa, Homo sapiens; identical to SEQ ID NO: 843380

SEQ ID NO: 843395 - protein, 111 aa, Homo sapiens
MWAEFEWENKVTVNTNMVDLNDYLQHILKSTNMKCLTPEKALSGYCGFMAANLYARSIFGEDALANVSIEKPIHQGPDAAVTGHIRIRAKSQGMALSLGDKINLSQKKTSI

SEQ ID NO: 843396 - protein, 138 aa, Homo sapiens
KQKVKNLWFPCISTRFVHNPPPSAKQKSDHWGHFEMEHKVPLPPTWLIKCLLTAHLRSPYIKACLKKALSGYCGFMAANLYARSIFGEDALANVSIEKPIHQGPDAAVTGHIRIRAKSQGMALSLGDKINLSQKKTSI

SEQ ID NO: 843397 - protein, 1433 aa, Homo sapiens
IEVRGRLGARQADTPLGSSPAAAAARSGLRGSGAAASGRLAARITRGSGCLLAGAARRALRARGRRRRTRGRTLAAGSLAAGSAGTGRAGRVALTMVSYWDTGVLLCALLSCLLLTGSSSGSKLKDPELSLKGTQHIMQAGQTLHLQCRGEAAHKWSLPEMVSKESERLSITKSACGRNGKQFCSTLTLNTAQANHTGFYSCKYLAVPTSKKKETESAIYIFISDTGRPFVEMYSEIPEIIHMTEGRELVIPCRVTSPNITVTLKKFPLDTLIPDGKRIIWDSRKGFIISNATYKEIGLLTCEATVNGHLYKTNYLTHRQTNTIIDVQISTPRPVKLLRGHTLVLNCTATTPLNTRVQMTWSYPDEKNKRASVRRRIDQSNSHANIFYSVLTIDKMQNKDKGLYTCRVRSGPSFKSVNTSVHIYDKAFITVKHRKQQVLETVAGKRSYRLSMKVKAFPSPEVVWLKDGLPATEKSARYLTRGYSLIIKDVTEEDAGNYTILLSIKQSNVFKNLTATLIVNVKPQIYEKAVSSFPDPALYPLGSRQILTCTAYGIPQPTIKWFWHPCNHNHSEARCDFCSNNEESFILDADSNMGNRIESITQRMAIIEGKNKMASTLVVADSRISGIYICIASNKVGTVGRNISFYITDVPNGFHVNLEKMPTEGEDLKLSCTVNKFLYRDVTWILLRTVNNRTMHYSISKQKMAITKEHSITLNLTIMNVSLQDSGTYACRARNVYTGEEILQKKEITIRDQEAPYLLRNLSDHTVAISSSTTLDCHANGVPEPQITWFKNNHKIQQEPGIILGPGSSTLFIERVTEEDEGVYHCKATNQKGSVESSAYLTVQGTSDKSNLELITLTCTCVAATLFWLLLTLFIRKMKRSSSEIKTDYLSIIMDPDEVPLDEQCERLPYDASKWEFARERLKLGKSLGRGAFGKVVQASAFGIKKSPTCRTVAVKMLKEGATASEYKALMTELKILTHIGHHLNVVNLLGACTKQGGPLMVIVEYCKYGNLSNYLKSKRDLFFLNKDAALHMEPKKEKMEPGLEQGKKPRLDSVTSSESFASSGFQEDKSLSDVEEEEDSDGFYKEPITMEDLISYSFQVARGMEFLSSRKCIHRDLAARNILLSENNVVKICDFGLARDIYKNPDYVRKGDTRLPLKWMAPESIFDKIYSTKSDVWSYGVLLWEIFSLGGSPYPGVQMDEDFCSRLREGMRMRAPEYSTPEIYQIMLDCWHRDPKERPRFAELVEKLGDLLQANVQQDGKDYIPINAILTGNSGFTYSTPAFSEDFFKESISAPKFNSGSSDDVRYVNAFKFMSLERIKTFEELLPNATSMFDDYQGDSSTLLASPMLKRFTWTDSKPKASLKIDLRVTSKSKESGLSDVSRPSFCHSSCGHVSEGKRRFTYDHAELERKIACCSPPPDYNSVVLYSTPPI

SEQ ID NO: 843398 - protein, 278 aa, Homo sapiens
IEVRGRLGARQADTPLGSSPAAAAARSGLRGSGAAASGRLAARITRGSGCLLAGAARRALRARGRRRRTRGRTLAAGSLAAGSAGTGRAGRVALTMVSYWDTGVLLCALLSCLLLTGSSSGSKLKDPELSLKGTQHIMQAGQTLHLQCRGEAAHKWSLPEMVSKESERLSITKSACGRNGKQFCSTLTLNTAQANHTGFYSCKYLAVPTSKKKETESAIYIFISGKTSIFYILFAFALQMSHKSTLIHWKGCFPSEYERNGLGKRFHPSCRHFRGCQF

SEQ ID NO: 843399 - protein, 391 aa, Homo sapiens
SRSAGGSERARRTLLSAPPRQRRRLGAGSGARVQRPAGAWRRGLPGEVVVSWLEPRDGRSGRGAGGGEREDGLWRPGRWPRGARAPGEQAASRSPWSATGTPGSCCARCSAVCFSQVRRGWGPGPEAGCDGAAGGQSLRGQGGVHAGRRGCSPEKLATARTWDTSCSGHAWGRCALSPRERLEEWLAWTREHQRSDGSALGLSVCDRIADPLSSCRVGVSLPRPWALRSSTHRDLPGTQSPFPEDLGQVRRVPRSREQRVLKACPGGRGLAEARGLLVFGTGRDLASSRRVYEGSRFGGDSCLRGSRRISGEGQRRHSHDPLRVPKPDCPGERFGERPAPPPPLSDRGAPVRCAQPPGWGLCREQAWCAVQSVSRTSVTLTHKGSPGPKYR

SEQ ID NO: 843400 - protein, 98 aa, Homo sapiens
  misc_feature (56)..(56): Xaa can be any naturally occurring amino acid
  misc_feature (78)..(78): Xaa can be any naturally occurring amino acid
  misc_feature (81)..(82): Xaa can be any naturally occurring amino acid
  misc_feature (88)..(88): Xaa can be any naturally occurring amino acid
  misc_feature (93)..(93): Xaa can be any naturally occurring amino acid
  misc_feature (97)..(97): Xaa can be any naturally occurring amino acid
RGPREARSAPGGHSSRLLPGSGGGSERAPGLGCSGQRAPGGEDYPGKWLSPFFILXTFSHFSFPSSSNYITYSFFRFXVRXXRLHLSXIPLLXHHFXL

SEQ ID NO: 843401 - protein, 1433 aa, Homo sapiens; identical to SEQ ID NO: 843397

SEQ ID NO: 843402 - protein, 1433 aa, Homo sapiens; identical to SEQ ID NO: 843397

SEQ ID NO: 843403 - protein, 1455 aa, Homo sapiens
IEVRGRLGARQADTPLGSSPAAAAARSGLRGSGAAASGRLAARITRGSGCLLAGAARRALRARGRRRRTRGRTLAAGSLAAGSAGTGRAGRVALTMVSYWDTGVLLCALLSCLLLTGSSSGSKLKDPELSLKGTQHIMQAGQTLHLQCRGEAAHKWSLPEMVSKESERLSITKSACGRNGKQFCSTLTLNTAQANHTGFYSCKYLAVPTSKKKETESAIYIFISDTGRPFVEMYSEIPEIIHMTEGRELVIPCRVTSPNITVTLKKFPLDTLIPDGKRIIWDSRKGFIISNATYKEIGLLTCEATVNGHLYKTNYLTHRQTNTIIDVQISTPRPVKLLRGHTLVLNCTATTPLNTRVQMTWSYPDEKNKRASVRRRIDQSNSHANIFYSVLTIDKMQNKDKGLYTCRVRSGPSFKSVNTSVHIYDKAFITVKHRKQQVLETVAGKRSYRLSMKVKAFPSPEVVWLKDGLPATEKSARYLTRGYSLIIKDVTEEDAGNYTILLSIKQSNVFKNLTATLIVNVKPQIYEKAVSSFPDPALYPLGSRQILTCTAYGIPQPTIKWFWHPCNHNHSEARCDFCSNNEESFILDADSNMGNRIESITQRMAIIEGKNKMASTLVVADSRISGIYICIASNKVGTVGRNISFYITELSNFELPSSLLSGIEFYLIGSHVPNGFHVNLEKMPTEGEDLKLSCTVNKFLYRDVTWILLRTVNNRTMHYSISKQKMAITKEHSITLNLTIMNVSLQDSGTYACRARNVYTGEEILQKKEITIRDQEAPYLLRNLSDHTVAISSSTTLDCHANGVPEPQITWFKNNHKIQQEPGIILGPGSSTLFIERVTEEDEGVYHCKATNQKGSVESSAYLTVQGTSDKSNLELITLTCTCVAATLFWLLLTLFIRKMKRSSSEIKTDYLSIIMDPDEVPLDEQCERLPYDASKWEFARERLKLGKSLGRGAFGKVVQASAFGIKKSPTCRTVAVKMLKEGATASEYKALMTELKILTHIGHHLNVVNLLGACTKQGGPLMVIVEYCKYGNLSNYLKSKRDLFFLNKDAALHMEPKKEKMEPGLEQGKKPRLDSVTSSESFASSGFQEDKSLSDVEEEEDSDGFYKEPITMEDLISYSFQVARGMEFLSSRKCIHRDLAARNILLSENNVVKICDFGLARDIYKNPDYVRKGDTRLPLKWMAPESIFDKIYSTKSDVWSYGVLLWEIFSLGGSPYPGVQMDEDFCSRLREGMRMRAPEYSTPEIYQIMLDCWHRDPKERPRFAELVEKLGDLLQANVQQDGKDYIPINAILTGNSGFTYSTPAFSEDFFKESISAPKFNSGSSDDVRYVNAFKFMSLERIKTFEELLPNATSMFDDYQGDSSTLLASPMLKRFTWTDSKPKASLKIDLRVTSKSKESGLSDVSRPSFCHSSCGHVSEGKRRFTYDHAELERKIACCSPPPDYNSVVLYSTPPI

SEQ ID NO: 843404 - protein, 1303 aa, Homo sapiens
IEVRGRLGARQADTPLGSSPAAAAARSGLRGSGAAASGRLAARITRGSGCLLAGAARRALRARGRRRRTRGRTLAAGSLAAGSAGTGRAGRVALTMVSYWDTGVLLCALLSCLLLTGSSSGSKLKDPELSLKGTQHIMQAGQTLHLQCRGEAAHKWSLPEMVSKESERLSITKSACGRNGKQFCSTLTLNTAQANHTGFYSCKYLAVPTSKKKETESAIYIFISDTGRPFVEMYSEIPEIIHMTEGRELVIPCRVTSPNITVTLKKFPLDTLIPDGKRIIWDSRKGFIISNATYKEIGLLTCEATVNGHLYKTNYLTHRQTNTIIDVQISTPRPVKLLRGHTLVLNCTATTPLNTRVQMTWSYPDEKNKRASVRRRIDQSNSHANIFYSVLTIDKMQNKDKGLYTCRVRSGPSFKSVNTSVHIYDKAFITVKHRKQQVLETVAGKRSYRLSMKVKAFPSPEVVWLKDGLPATEKSARYLTRGYSLIIKDVTEEDAGNYTILLSIKQSNVFKNLTATLIVNVKPQIYEKAVSSFPDPALYPLGSRQILTCTAYGIPQPTIKWFWHPCNHNHSEARCDFCSNNEESFILDADSNMGNRIESITQRMAIIEGKNKMASTLVVADSRISGIYICIASNKVGTVGRNISFYITDVPNGFHVNLEKMPTEGEDLKLSCTVNKFLYRDVTWILLRTVNNRTMHYSISKQKMAITKEHSITLNLTIMNVSLQDSGTYACRARNVYTGEEILQKKEITIRDQEAPYLLRNLSDHTVAISSSTTLDCHANGVPEPQITWFKNNHKIQQEPGIILGPGSSTLFIERVTEEDEGVYHCKATNQKGSVESSAYLTVQGTSDKSNLELITLTCTCVAATLFWLLLTLFIRKMKRSSSEIKTDYLSIIMDPDEVPLDEQCERLPYDASKWEFARERLKLGKSLGRGAFGKVVQASAFGIKKSPTCRTVAVKMLKEGATASEYKALMTELKILTHIGHHLNVVNLLGACTKQGGPLMVIVEYCKYGNLSNYLKSKRDLFFLNKDAALHMEPKKEKMEPGLEQGKKPRLDSVTSSESFASSGFQEDKSLSDVEEEEDSDGFYKEPITMEDLISYSFQVARGMEFLSSRKCIHRDLAARNILLSENNVVKICDFGLARDIYKNPDYVRKGDTRLPLKWMAPESIFDKIYSTKSDVWSYGVLLWEIFSLGGSPYPGVQMDEDFCSRLREGMRMRAPEYSTPEIYQIMLDCWHRDPKERPRFAELVEKLGDLLQANVQQDGKDYIPINAILTGNSGFTYSTPAFSEDFQLRSLIQEALMMSDM

SEQ ID NO: 843405 - protein, 821 aa, Homo sapiens
MASTLVVADSRISGIYICIASNKVGTVGRNISFYITDVPNGFHVNLEKMPTEGEDLKLSCTVNKFLYRDVTWILLRTVNNRTMHYSISKQKMAITKEHSITLNLTIMNVSLQDSGTYACRARNVYTGEEILQKKEITIRDQEAPYLLRNLSDHTVAISSSTTLDCHANGVPEPQITWFKNNHKIQQEPGIILGPGSSTLFIERVTEEDEGVYHCKATNQKGSVESSAYLTVQGTSDKSNLELITLTCTCVAATLFWLLLTLFIRKMKRSSSEIKTDYLSIIMDPDEVPLDEQCERLPYDASKWEFARERLKLGKSLGRGAFGKVVQASAFGIKKSPTCRTVAVKMLKEGATASEYKALMTELKILTHIGHHLNVVNLLGACTKQGGPLMVIVEYCKYGNLSNYLKSKRDLFFLNKDAALHMEPKKEKMEPGLEQGKKPRLDSVTSSESFASSGFQEDKSLSDVEEEEDSDGFYKEPITMEDLISYSFQVARGMEFLSSRKCIHRDLAARNILLSENNVVKICDFGLARDIYKNPDYVRKGDTRLPLKWMAPESIFDKIYSTKSDVWSYGVLLWEIFSLGGSPYPGVQMDEDFCSRLREGMRMRAPEYSTPEIYQIMLDCWHRDPKERPRFAELVEKLGDLLQANVQQDGKDYIPINAILTGNSGFTYSTPAFSEDFFKESISAPKFNSGSSDDVRYVNAFKFMSLERIKTFEELLPNATSMFDDYQGDSSTLLASPMLKRFTWTDSKPKASLKIDLRVTSKSKESGLSDVSRPSFCHSSCGHVSEGKRRFTYDHAELERKIACCSPPPDYNSVVLYSTPPI

SEQ ID NO: 843406 - protein, 1411 aa, Homo sapiens
IEVRGRLGARQADTPLGSSPAAAAARSGLRGSGAAASGRLAARITRGSGCLLAGAARRALRARGRRRRTRGRTLAAGSLAAGSAGTGRAGRVALTMVSYWDTGVLLCALLSCLLLTGSSSGSKLKDPELSLKGTQHIMQAGQTLHLQCRGEAAHKWSLPEMVSKESERLSITKSACGRNGKQFCSTLTLNTAQANHTGFYSCKYLAVPTSKKKETESAIYIFISDTGRPFVEMYSEIPEIIHMTEGRELVIPCRVTSPNITVTLKKFPLDTLIPDGKRIIWDSRKGFIISNATYKEIGLLTCEATVNGHLYKTNYLTHRQTNTIIDVQISTPRPVKLLRGHTLVLNCTATTPLNTRVQMTWSYPDEKNKRASVRRRIDQSNSHANIFYSVLTIDKMQNKDKGLYTCRVRSGPSFKSVNTSVHIYDKAFITVKHRKQQVLETVAGKRSYRLSMKVKAFPSPEVVWLKDGLPATEKSARYLTRGYSLIIKDVTEEDAGNYTILLSIKQSNVFKNLTATLIVNVKPQIYEKAVSSFPDPALYPLGSRQILTCTAYGIPQPTIKWFWHPCNHNHSEARCDFCSNNEESFILDADSNMGNRIESITQRMAIIEGKNKMASTLVVADSRISGIYICIASNKVGTVGRNISFYITDVPNGFHVNLEKMPTEGEDLKLSCTVNKFLYRDVTWILLRTVNNRTMHYSISKQKMAITKEHSITLNLTIMNVSLQDSGTYACRARNVYTGEEILQKKEITIRDQEAPYLLRNLSDHTVAISSSTTLDCHANGVPEPQITWFKNNHKIQQEPGIILGPGSSTLFIERVTEEDEGVYHCKATNQKGSVESSAYLTVQGTSDKSNLELITLTCTCVAATLFWLLLTLFIRKMKRSSSEIKTDYLSIIMDPDEVPLDEQCERLPYDASKWEFARERLKLGKSLGRGAFGKVVQASAFGIKKSPTCRTVAVKMLKEGATASEYKALMTELKILTHIGHHLNVVNLLGACTKQGGPLMVIVEYCKYGNLSNYLKSKRDLFFLNKDAALHMEPKKEKMEPGLEQGKKPRLDSVTSSESFASSGFQEDKSLSDVEEEEDSDGFYKEPITMEDLISYSFQVARGMEFLSSRKCIHRDLAARNILLSENNVVKICDFGLARDIYKNPDYVRKGDTRLPLKWMAPESIFDKIYSTKSDVWSYGVLLWEIFSLGGSPYPGVQMDEDFCSRLREGMRMRAPEYSTPEIYQIMLDCWHRDPKERPRFAELVEKLGDLLQANVQQDGKDYIPINAILTGNSGFTYSTPAFSEDFFKESISAPKFNSGSSDDVRYVNAFKFMSLERIKTFEELLPNATSMFDDYQGDSSTLLASPMLKRFTWTDSKPKASLKIDLRVTSKSKESGLSDVSRPSFCHSSCGHVSEVSCERKLRRMKMQS

SEQ ID NO: 843407 - protein, 828 aa, Homo sapiens
IEVRGRLGARQADTPLGSSPAAAAARSGLRGSGAAASGRLAARITRGSGCLLAGAARRALRARGRRRRTRGRTLAAGSLAAGSAGTGRAGRVALTMVSYWDTGVLLCALLSCLLLTGSSSGSKLKDPELSLKGTQHIMQAGQTLHLQCRGEAAHKWSLPEMVSKESERLSITKSACGRNGKQFCSTLTLNTAQANHTGFYSCKYLAVPTSKKKETESAIYIFISDTGRPFVEMYSEIPEIIHMTEGRELVIPCRVTSPNITVTLKKFPLDTLIPDGKRIIWDSRKGFIISNATYKEIGLLTCEATVNGHLYKTNYLTHRQTNTIIDVQISTPRPVKLLRGHTLVLNCTATTPLNTRVQMTWSYPDEKNKRASVRRRIDQSNSHANIFYSVLTIDKMQNKDKGLYTCRVRSGPSFKSVNTSVHIYDKAFITVKHRKQQVLETVAGKRSYRLSMKVKAFPSPEVVWLKDGLPATEKSARYLTRGYSLIIKDVTEEDAGNYTILLSIKQSNVFKNLTATLIVNVKPQIYEKAVSSFPDPALYPLGSRQILTCTAYGIPQPTIKWFWHPCNHNHSEARCDFCSNNEESFILDADSNMGNRIESITQRMAIIEGKNKMASTLVVADSRISGIYICIASNKVGTVGRNISFYITDVPNGFHVNLEKMPTEGEDLKLSCTVNKFLYRDVTWILLRTVNNRTMHYSISKQKMAITKEHSITLNLTIMNVSLQDSGTYACRARNVYTGEEILQKKEITIRDQEAPYLLRNLSDHTVAISSSTTLDCHANGVPEPQITWFKNNHKIQQEPELYTSTSPSSSSSSPLSSSSSSSSSSSS

SEQ ID NO: 843408 - protein, 1303 aa, Homo sapiens; identical to SEQ ID NO: 843404

SEQ ID NO: 843409 - protein, 119 aa, Homo sapiens [sequence omitted]

SEQ ID NO: 843410 - protein, 854 aa, Homo sapiens
IEVRGRLGARQADTPLGSSPAAAAARSGLRGSGAAASGRLAARITRGSGCLLAGAARRALRARGRRRRTRGRTLAAGSLAAGSAGTGRAGRVALTMVSYWDTGVLLCALLSCLLLTGSSSGSKLKDPELSLKGTQHIMQAGQTLHLQCRGEAAHKWSLPEMVSKESERLSITKSACGRNGKQFCSTLTLNTAQANHTGFYSCKYLAVPTSKKKETESAIYIFISDTGRPFVEMYSEIPEIIHMTEGRELVIPCRVTSPNITVTLKKFPLDTLIPDGKRIIWDSRKGFIISNATYKEIGLLTCEATVNGHLYKTNYLTHRQTNTIIDVQISTPRPVKLLRGHTLVLNCTATTPLNTRVQMTWSYPDEKNKRASVRRRIDQSNSHANIFYSVLTIDKMQNKDKGLYTCRVRSGPSFKSVNTSVHIYDKAFITVKHRKQQVLETVAGKRSYRLSMKVKAFPSPEVVWLKDGLPATEKSARYLTRGYSLIIKDVTEEDAGNYTILLSIKQSNVFKNLTATLIVNVKPQIYEKAVSSFPDPALYPLGSRQILTCTAYGIPQPTIKWFWHPCNHNHSEARCDFCSNNEESFILDADSNMGNRIESITQRMAIIEGKNKMASTLVVADSRISGIYICIASNKVGTVGRNISFYITDVPNGFHVNLEKMPTEGEDLKLSCTVNKFLYRDVTWILLRTVNNRTMHYSISKQKMAITKEHSITLNLTIMNVSLQDSGTYACRARNVYTGEEILQKKEITIRDQEAPYLLRNLSDHTVAISSSTTLDCHANGVPEPQITWFKNNHKIQQEPDQASVPDQASVPDQASVPDQASVPDQASVPDQASVPDQASVDQASVPDQASVPD

SEQ ID NO: 843411 - protein, 613 aa, Homo sapiens
IEVRGRLGARQADTPLGSSPAAAAARSGLRGSGAAASGRLAARITRGSGCLLAGAARRALRARGRRRRTRGRTLAAGSLAAGSAGTGRAGRVALTMVSYWDTGVLLCALLSCLLLTGSSSGSKLKDPELSLKGTQHIMQAGQTLHLQCRGEAAHKWSLPEMVSKESERLSITKSACGRNGKQFCSTLTLNTAQANHTGFYSCKYLAVPTSKKKETESAIYIFISDTGRPFVEMYSEIPEIIHMTEGRELVIPCRVTSPNITVTLKKFPLDTLIPDGKRIIWDSRKGFIISNATYKEIGLLTCEATVNGHLYKTNYLTHRQTNTIIDVQISTPRPVKLLRGHTLVLNCTATTPLNTRVQMTWSYPDEKNKRASVRRRIDQSNSHANIFYSVLTIDKMQNKDKGLYTCRVRSGPSFKSVNTSVHIYDKAFITVKHRKQQVLETVAGKRSYRLSMKVKAFPSPEVVWLKDGLPATEKSARYLTRGYSLIIKDVTEEDAGNYTILLSIKQSNVFKNLTATLIVNVKPQIYEKAVSSFPDPALYPLGSRQILTCTAYGIPQPTIKWFWHPCNHNHSEARCDFCSNNEESFILDADSNMGNRIESITQRMAIIEGKNKL

SEQ ID NO: 843412 - protein, 782 aa, Homo sapiens
IEVRGRLGARQADTPLGSSPAAAAARSGLRGSGAAASGRLAARITRGSGCLLAGAARRALRARGRRRRTRGRTLAAGSLAAGSAGTGRAGRVALTMVSYWDTGVLLCALLSCLLLTGSSSGSKLKDPELSLKGTQHIMQAGQTLHLQCRGEAAHKWSLPEMVSKESERLSITKSACGRNGKQFCSTLTLNTAQANHTGFYSCKYLAVPTSKKKETESAIYIFISDTGRPFVEMYSEIPEIIHMTEGRELVIPCRVTSPNITVTLKKFPLDTLIPDGKRIIWDSRKGFIISNATYKEIGLLTCEATVNGHLYKTNYLTHRQTNTIIDVQISTPRPVKLLRGHTLVLNCTATTPLNTRVQMTWSYPDEKNKRASVRRRIDQSNSHANIFYSVLTIDKMQNKDKGLYTCRVRSGPSFKSVNTSVHIYDKAFITVKHRKQQVLETVAGKRSYRLSMKVKAFPSPEVVWLKDGLPATEKSARYLTRGYSLIIKDVTEEDAGNYTILLSIKQSNVFKNLTATLIVNVKPQIYEKAVSSFPDPALYPLGSRQILTCTAYGIPQPTIKWFWHPCNHNHSEARCDFCSNNEESFILDADSNMGNRIESITQRMAIIEGKNKMASTLVVADSRISGIYICIASNKVGTVGRNISFYITDVPNGFHVNLEKMPTEGEDLKLSCTVNKFLYRDVTWILLRTVNNRTMHYSISKQKMAITKEHSITLNLTIMNVSLQDSGTYACRARNVYTGEEILQKKEITIRGEHCNKKAVFSRISKFKSTRNDCTTQSNVKH

SEQ ID NO: 843413 - protein, 1433 aa, Homo sapiens; identical to SEQ ID NO: 843397

SEQ ID NO: 843414 - protein, 1461 aa, Homo sapiens
IEVRGRLGARQADTPLGSSPAAAAARSGLRGSGAAASGRLAARITRGSGCLLAGAARRALRARGRRRRTRGRTLAAGSLAAGSAGTGRAGRVALTMVSYWDTGVLLCALLSCLLLTGSSSGSKLKDPELSLKGTQHIMQAGQTLHLQCRGEAAHKWSLPEMVSKESERLSITKSACGRNGKQFCSTLTLNTAQANHTGFYSCKYLAVPTSKKKETESAIYIFISDTGRPFVEMYSEIPEIIHMTEGRELVIPCRVTSPNITVTLKKFPLDTLIPDGKRIIWDSRKGFIISNATYKEIGLLTCEATVNGHLYKTNYLTHRQTNTIIDVQISTPRPVKLLRGHTLVLNCTATTPLNTRVQMTWSYPDEKNKRASVRRRIDQSNSHANIFYSVLTIDKMQNKDKGLYTCRVRSGPSFKSVNTSVHIYDKAFITVKHRKQQVLETVAGKRSYRLSMKVKAFPSPEVVWLKDGLPATEKSARYLTRGYSLIIKDVTEEDAGNYTILLSIKQSNVFKNLTATLIVNVKPQIYEKAVSSFPDPALYPLGSRQILTCTAYGIPQPTIKWFWHPCNHNHSEARCDFCSNNEESFILDADSNMGNRIESITQRMAIIEGKNKLPPATVLSCCHLQASLPTTSISFRDSKRMASTLVVADSRISGIYICIASNKVGTVGRNISFYITDVPNGFHVNLEKMPTEGEDLKLSCTVNKFLYRDVTWILLRTVNNRTMHYSISKQKMAITKEHSITLNLTIMNVSLQDSGTYACRARNVYTGEEILQKKEITIRDQEAPYLLRNLSDHTVAISSSTTLDCHANGVPEPQITWFKNNHKIQQEPGIILGPGSSTLFIERVTEEDEGVYHCKATNQKGSVESSAYLTVQGTSDKSNLELITLTCTCVAATLFWLLLTLFIRKMKRSSSEIKTDYLSIIMDPDEVPLDEQCERLPYDASKWEFARERLKLGKSLGRGAFGKVVQASAFGIKKSPTCRTVAVKMLKEGATASEYKALMTELKILTHIGHHLNVVNLLGACTKQGGPLMVIVEYCKYGNLSNYLKSKRDLFFLNKDAALHMEPKKEKMEPGLEQGKKPRLDSVTSSESFASSGFQEDKSLSDVEEEEDSDGFYKEPITMEDLISYSFQVARGMEFLSSRKCIHRDLAARNILLSENNVVKICDFGLARDIYKNPDYVRKGDTRLPLKWMAPESIFDKIYSTKSDVWSYGVLLWEIFSLGGSPYPGVQMDEDFCSRLREGMRMRAPEYSTPEIYQIMLDCWHRDPKERPRFAELVEKLGDLLQANVQQDGKDYIPINAILTGNSGFTYSTPAFSEDFFKESISAPKFNSGSSDDVRYVNAFKFMSLERIKTFEELLPNATSMFDDYQGDSSTLLASPMLKRFTWTDSKPKASLKIDLRVTSKSKESGLSDVSRPSFCHSSCGHVSEGKRRFTYDHAELERKIACCSPPPDYNSVVLYSTPPI

SEQ ID NO: 843415 - protein, 980 aa, Homo sapiens
MYSLIIKDVTEEDAGNYTILLSIKQSNVFKNLTATLIVNVKPQIYEKAVSSFPDPALYPLGSRQILTCTAYGIPQPTIKWFWHPCNHNHSEARCDFCSNNEESFILDADSNMGNRIESITQRMAIIEGKNKLPPATVLSCCHLQASLPTTSISFRDSKRMASTLVVADSRISGIYICIASNKVGTVGRNISFYITDVPNGFHVNLEKMPTEGEDLKLSCTVNKFLYRDVTWILLRTVNNRTMHYSISKQKMAITKEHSITLNLTIMNVSLQDSGTYACRARNVYTGEEILQKKEITIRDQEAPYLLRNLSDHTVAISSSTTLDCHANGVPEPQITWFKNNHKIQQEPGIILGPGSSTLFIERVTEEDEGVYHCKATNQKGSVESSAYLTVQGTSDKSNLELITLTCTCVAATLFWLLLTLFIRKMKRSSSEIKTDYLSIIMDPDEVPLDEQCERLPYDASKWEFARERLKLGKSLGRGAFGKVVQASAFGIKKSPTCRTVAVKMLKEGATASEYKALMTELKILTHIGHHLNVVNLLGACTKQGGPLMVIVEYCKYGNLSNYLKSKRDLFFLNKDAALHMEPKKEKMEPGLEQGKKPRLDSVTSSESFASSGFQEDKSLSDVEEEEDSDGFYKEPITMEDLISYSFQVARGMEFLSSRKCIHRDLAARNILLSENNVVKICDFGLARDIYKNPDYVRKGDTRLPLKWMAPESIFDKIYSTKSDVWSYGVLLWEIFSLGGSPYPGVQMDEDFCSRLREGMRMRAPEYSTPEIYQIMLDCWHRDPKERPRFAELVEKLGDLLQANVQQDGKDYIPINAILTGNSGFTYSTPAFSEDFFKESISAPKFNSGSSDDVRYVNAFKFMSLERIKTFEELLPNATSMFDDYQGDSSTLLASPMLKRFTWTDSKPKASLKIDLRVTSKSKESGLSDVSRPSFCHSSCGHVSEGKRRFTYDHAELERKIACCSPPPDYNSVVLYSTPPI

SEQ ID NO: 843416 - protein, 1431 aa, Homo sapiens
IEVRGRLGARQADTPLGSSPAAAAARSGLRGSGAAASGRLAARITRGSGCLLAGAARRALRARGRRRRTRGRTLAAGSLAAGSAGTGRAGRVALTMVSYWDTGVLLCALLSCLLLTGSSSGSKLKDPELSLKGTQHIMQAGQTLHLQCRGEAAHKWSLPEMVSKESERLSITKSACGRNGKQFCSTLTLNTAQANHTGFYSCKYLAVPTSKKKETESAIYIFISDTGRPFVEMYSEIPEIIHMTEGRELVIPCRVTSPNITVTLKKFPLDTLIPDGKRIIWDSRKGFIISNATYKEIGLLTCEATVNGHLYKTNYLTHRQTNTIIDVQISTPRPVKLLRGHTLVLNCTATTPLNTRVQMTWSYPDEKNKRASVRRRIDQSNSHANIFYSVLTIDKMQNKDKGLYTCRVRSGPSFKSVNTSVHIYDKAFITVKHRKQQVLETVAGKRSYRLSMKVKAFPSPEVVWLKDGLPATEKSARYLTRGYSLIIKDVTEEDAGNYTILLSIKQSNVFKNLTATLIVNVKPQIYEKAVSSFPDPALYPLGSRQILTCTAYGIPQPTIKWFWHPCNHNHSEARCDFCSNNEESFILDADSNMGNRIESITQRMAIIEGKNKMASTLVVADSRISGIYICIASNKVGTVGRNISFYITDVPNGFHVNLEKMPTEGEDLKLSCTVNKFLYRDVTWILLRTVNNRTMHYSISKQKMAITKEHSITLNLTIMNVSLQDSGTYACRARNVYTGEEILQKKEITIRDQEAPYLLRNLSDHTVAISSSTTLDCHANGVPEPQITWFKNNHKIQQEPGIILGPGSSTLFIERVTEEDEGVYHCKATNQKGSVESSAYLTVQGTSDKSNLELITLTCTCVAATLFWLLLTLFIRKMKRSSSEIKTDYLSIIMDPDEVPLDEQCERLPYDASKWEFARERLKLGKSLGRGAFGKVVQASAFGIKKSPTCRTVAVKMLKEGATASEYKALMTELKILTHIGHHLNVVNLLGACTKQGGPLMVIVEYCKYGNLSNYLKSKRDLFFLNKDAALHMEPKKEKMEPGLEQGKKPRLDSVTSSESFASSGFQEDKSLSDVEEEEDSDGFYKEPITMEDLISYSFQVARGMEFLSSRKCIHRDLAARNILLSENNVVKICDFGLARDIYKNPDYVRKGDTRLPLKWMAPESIFDKIYSTKSDVWSYGVLLWEIFSLGGSPYPGVQMDEDFCSRLREGMRMRAPEYSTPEIYQIMLDCWHRDPKERPRFAELVEKLGDLLQANVQQDGKDYIPINAILTGNSGFTYSTPAFSEDFFKESISAPKFNSGSSDDVRYVNAFKFMSLERIKTFEELLPNATSMFDDYQGDSSTLLASPMLKRFTWTDSKPKASLKIDLRVTSKSKESGLSDVSRPSFCHSSCGHVSEGKRRFTYDHAELERKIACCSPPPDYNSVLVVKES

SEQ ID NO: 843417 - protein, 482 aa, Homo sapiens
LALWAACPAQACSGNAGQERGGLQSAAGLPSQPSCFLQTGVGLANQGPLMVIVEYCKYGNLSNYLKSKRDLFFLNKDAALHMEPKKEKMEPGLEQGKKPRLDSVTSSESFASSGFQEDKSLSDVEEEEDSDGFYKEPITMEDLISYSFQVARGMEFLSSRKCIHRDLAARNILLSENNVVKICDFGLARDIYKNPDYVRKGDTRLPLKWMAPESIFDKIYSTKSDVWSYGVLLWEIFSLGGSPYPGVQMDEDFCSRLREGMRMRAPEYSTPEIYQIMLDCWHRDPKERPRFAELVEKLGDLLQANVQQDGKDYIPINAILTGNSGFTYSTPAFSEDFFKESISAPKFNSGSSDDVRYVNAFKFMSLERIKTFEELLPNATSMFDDYQGDSSTLLASPMLKRFTWTDSKPKASLKIDLRVTSKSKESGLSDVSRPSFCHSSCGHVSEGKRRFTYDHAELERKIACCSPPPDYNSVVLYSTPPI

SEQ ID NO: 843418 - protein, 206 aa, Homo sapiens
MLDCWHRDPKERPRFAELVEKLGDLLQANVQQDGKDYIPINAILTGNSGFTYSTPAFSEDFFKESISAPKFNSGSSDDVRYVNAFKFMSLERIKTFEELLPNATSMFDDYQGDSSTLLASPMLKRFTWTDSKPKASLKIDLRVTSKSKESGLSDVSRPSFCHSSCGHVSEGKRRFTYDHAELERKIACCSPPPDYNSVVLYSTPPI

SEQ ID NO: 843419 - protein, 813 aa, Homo sapiens
IEVRGRLGARQADTPLGSSPAAAAARSGLRGSGAAASGRLAARITRGSGCLLAGAARRALRARGRRRRTRGRTLAAGSLAAGSAGTGRAGRVALTMVSYWDTGVLLCALLSCLLLTGSSSGSKLKDPELSLKGTQHIMQAGQTLHLQCRGEAAHKWSLPEMVSKESERLSITKSACGRNGKQFCSTLTLNTAQANHTGFYSCKYLAVPTSKKKETESAIYIFISDTGRPFVEMYSEIPEIIHMTEGRELVIPCRVTSPNITVTLKKFPLDTLIPDGKRIIWDSRKGFIISNATYKEIGLLTCEATVNGHLYKTNYLTHRQTNTIIDVQISTPRPVKLLRGHTLVLNCTATTPLNTRVQMTWSYPDEKNKRASVRRRIDQSNSHANIFYSVLTIDKMQNKDKGLYTCRVRSGPSFKSVNTSVHIYDKAFITVKHRKQQVLETVAGKRSYRLSMKVKAFPSPEVVWLKDGLPATEKSARYLTRGYSLIIKDVTEEDAGNYTILLSIKQSNVFKNLTATLIVNVKPQIYEKAVSSFPDPALYPLGSRQILTCTAYGIPQPTIKWFWHPCNHNHSEARCDFCSNNEESFILDADSNMGNRIESITQRMAIIEGKNKMASTLVVADSRISGIYICIASNKVGTVGRNISFYITDVPNGFHVNLEKMPTEGEDLKLSCTVNKFLYRDVTWILLRTVNNRTMHYSISKQKMAITKEHSITLNLTIMNVSLQDSGTYACRARNVYTGEEILQKKEITIRDQEAPYLLRNLSDHTVAISSSTTLDCHANGVPEPQITWFKNNHKIQQEPGSANTAVNKKTEI

SEQ ID NO: 843420 - protein, 831 aa, Homo sapiens
IEVRGRLGARQADTPLGSSPAAAAARSGLRGSGAAASGRLAARITRGSGCLLAGAARRALRARGRRRRTRGRTLAAGSLAAGSAGTGRAGRVALTMVSYWDTGVLLCALLSCLLLTGSSSGSKLKDPELSLKGTQHIMQAGQTLHLQCRGEAAHKWSLPEMVSKESERLSITKSACGRNGKQFCSTLTLNTAQANHTGFYSCKYLAVPTSKKKETESAIYIFISDTGRPFVEMYSEIPEIIHMTEGRELVIPCRVTSPNITVTLKKFPLDTLIPDGKRIIWDSRKGFIISNATYKEIGLLTCEATVNGHLYKTNYLTHRQTNTIIDVQISTPRPVKLLRGHTLVLNCTATTPLNTRVQMTWSYPDEKNKRASVRRRIDQSNSHANIFYSVLTIDKMQNKDKGLYTCRVRSGPSFKSVNTSVHIYDKAFITVKHRKQQVLETVAGKRSYRLSMKVKAFPSPEVVWLKDGLPATEKSARYLTRGYSLIIKDVTEEDAGNYTILLSIKQSNVFKNLTATLIVNVKPQIYEKAVSSFPDPALYPLGSRQILTCTAYGIPQPTIKWFWHPCNHNHSEARCDFCSNNEESFILDADSNMGNRIESITQRMAIIEGKNKMASTLVVADSRISGIYICIASNKVGTVGRNISFYITDVPNGFHVNLEKMPTEGEDLKLSCTVNKFLYRDVTWILLRTVNNRTMHYSISKQKMAITKEHSITLNLTIMNVSLQDSGTYACRARNVYTGEEILQKKEITIRDQEAPYLLRNLSDHTVAISSSTTLDCHANGVPEPQITWFKNNHKIQQEPGKRLFFLPFIISHLSSAPLSLNSPVTCFQYV

SEQ ID NO: 843421 - protein, 512 aa, Homo sapiens
IEVRGRLGARQADTPLGSSPAAAAARSGLRGSGAAASGRLAARITRGSGCLLAGAARRALRARGRRRRTRGRTLAAGSLAAGSAGTGRAGRVALTMVSYWDTGVLLCALLSCLLLTGSSSGSKLKDPELSLKGTQHIMQAGQTLHLQCRGEAAHKWSLPEMVSKESERLSITKSACGRNGKQFCSTLTLNTAQANHTGFYSCKYLAVPTSKKKETESAIYIFISDTGRPFVEMYSEIPEIIHMTEGRELVIPCRVTSPNITVTLKKFPLDTLIPDGKRIIWDSRKGFIISNATYKEIGLLTCEATVNGHLYKTNYLTHRQTNTIIDVQISTPRPVKLLRGHTLVLNCTATTPLNTRVQMTWSYPDEKNKRASVRRRIDQSNSHANIFYSVLTIDKMQNKDKGLYTCRVRSGPSFKSVNTSVHIYDKAFITVKHRKQQVLETVAGKRSYRLSMKVKAFPSPEVVWLKDGLPATEKSARYLTRGYSLIIKDVTEEEEEFAQEEEEFAQEEEEFA

SEQ ID NO: 843422 - protein, 183 aa, Homo sapiens
ISFLIETGTLLHFPDTSHGLRNLYFLDPIWLSECLQRIFNIKGSRSVAKNGVIRAEDLRMLLVGTGFTQQTEEQYFQFLAKFEIALPVANDSYLLPHLLPSKPGLDTHGMRHPTANTIQRVFKMSFVPVGFWQRFIARMLISLAEMDLQLFENKKNTKSRNRKVTIYSFTGNQRSRCSTFRVK

SEQ ID NO: 843423 - protein, 92 aa, Homo sapiens
ISFLIETGTLLHFPDTSHGLRNLYFLDPIWLSECLQRIFNIKGSRSVAKNGVIRAEDLRMLLVGTGFTQQTEEQYFQFLAKFEIALPVANDR

SEQ ID NO: 843424 - protein, 177 aa, Homo sapiens
MPSSAVRVLEEALGMGLTAAGDARDTADAVAAEGAYYLEQVTITEASEDDYEYEEIPDDNFSIPEGEEDLAKAIQMAQEQATDTEILERKTVLPSKHAVPEVIEDFLCNFLIKMGMTRTLDCFQSEWYELIQKGVTELRTVGNVPDVYTQIMLLENENKNLKKDLKHYKQAAEYVIF

SEQ ID NO: 843425 - protein, 196 aa, Homo sapiens
MNMKRYQMTILASQKVKKIWQKQFRWPKNRLQILKFWYELIQKGVTELRTVGNVPDVYTQIMLLENENKNLKKDLKHYKQAADKAREDLLKIQKERDFHRMHHKRIVQEKNKLINDLKGLKLHYASYEPTIRVLHEKHHTLLKEKMLTSLERDKVVGQISGLQETLKKLQRGHSYHGPQIKVDHSREKENAPEGPT

SEQ ID NO: 843426 - protein, 129 aa, Homo sapiens
MDLQNDMIPDDNFSIPEGEEDLAKAIQMAQEQATDTEILERKTVLPSKHAVPEVIEDFLCNFLIKMGMTRTLDCFQSEWYELIQKGVTELRTVGNVPDVYTQIMLLENENKNLKKDLKHYKQAAEYVIF

SEQ ID NO: 843427 - protein, 276 aa, Homo sapiens
MPSSAVRVLEEALGMGLTAAGDARDTADAVAAEGAYYLEQVTITEASEDDYEYEEIPDDNFSIPEGEEDLAKAIQMAQEQATDTEILERKTVLPSKHAVPEVIEDFLCNFLIKMGMTRTLDCFQSEWYELIQKGVTELRTVGNVPDVYTQIMLLENENKNLKKDLKHYKQAADKAREDLLKIQKERDFHRMHHKRIVQEKNKLINDLKGLKLHYASYEPTIRVLHEKHHTLLKEKMLTSLERDKVVGQISGLQETLKKLQRGHSYHGPQIKGKCKM

SEQ ID NO: 843428 - protein, 74 aa, Homo sapiens
RCRNLARAPGGRWVASSLLPLGTAVGLLGVGARSARDGCSARDAQLRREGPGRGVGHGFDGSRGREGHGGRGGG

SEQ ID NO: 843429 - protein, 174 aa, Homo sapiens
MNMKRYQMTILASQKVKKIWQKQFRWPKNRLQILKFCKAREDLLKIQKERDFHRMHHKRIVQEKNKLINDLKGLKLHYASYEPTIRVLHEKHHTLLKEKMLTSLERDKVVGQISGLQETLKKLQRGHSYHGPQIKVASKRIKYLRIQLTKDVKDVFKENYKPLLNEVKEDTNKW

SEQ ID NO: 843430 - protein, 168 aa, Homo sapiens
MDLQNDMIPDDNFSIPEGEEDLAKAIQMAQEQATDTEILERKTVLPSKHAVPEVIEDFLCNFLIKMGMTRTLDCFQSEWYELIQKGVTELRTVGNVPDVYTQIMLLENENKNLKKDLKHYKQAADKAREDLLKIQKERDFHRMHHKRIVQEKNKLINDLKGFLDFKKH

SEQ ID NO: 843431 - protein, 2197 aa, Homo sapiens
DLKQTEMINILAIQNLNEILGMYLPDVDQKESDGGADLTLGLREALELIYPIPDQNDLIIMTLIVATIGAPLIERGRAILGHTQITEHERVLTQKKSIRRHTQGVPHLIPLLTVDLRTSSYSKSDRDCKTETSYLEMERRGKYSSKLERESKRTSENEAIKRCCSPPNELGFRRGSSYSKHDSSASRYKSTLSKPIPKSDKFKNSFCCTELNEEIKQSHSFSLQTPCSKGSELRMINKNPEREKAGSPAPSNRLNDSPTLKKLDELPIFKSEFITHDSHDSIKELDSLSKVKNDQLRSFCPIELNINGSPGAESDLATFCTSKTDAVLMTSDDSVTGSELSPLVKACMLSSNGFQNISRCKEKDLDDTCMLHKKSESPFRETEPLVSPHQDKLMSMPVMTVDYSKTVVKEPVDTRVSCCKTKDSDIYCTLNDSNPSLCNSEAENIEPSVMKISSNSFMNVHLESKPVICDSRNLTDHSKFACEEYKQSIGSTSSASVNHFDDLYQPIGSSGIASSLQSLPPGIKVDSLTLLKCGENTSPVLDAVLKSKKSSEFLKHAGKETIVEVGSDLPDSGKGFASRENRRNNGLSGKCLQEAQKEGNSILPERRGRPEISLDERGEGGHVHTSDDSEVVFSSCDLNLTMEDSDGVTYALKCDSSGHAPEIVSTVHEDYSGSSESSNDESDSEDTDSDDSSIPRNRLQSVVVVPKNSTLPMEETSPCSSRSSQSYRHYSDHWEDERLESRRHLYEEKFESIASKACPQTDKFFLHKGTEKNPEISFTQSSRKQIDNRLPELSHPQSDGVDSTSHTDVKSDPLGHPNSEETVKAKIPSRQQEELPIYSSDFEDVPNKSWQQTTFQNRPDSRLGKTELSFSSSCEIPQEDGLHSSEELRNLGWDFSQEKPSATYQQPDSSYGACGGHKYQQNAEQYGGTRDYWQGNGYWDPRSGRPPGTGVVYDRTQGQVPDSLTDDREEEENWDQQDGSHFSDQSDKFLLSLQKDKGSVQAPEISSNSIKDTLAVNEKKDFSKNLEKNDIKDRGPLKKRRQEIESDSESDGELQDRKKVRVEVEQGETSVPPGSALVGPSCVMDDFRDPQRWKECAKQGKMPCYFDLIEENVYLTERKKNKSHRDIKRMQCECTPLSKDERAQGEIACGEDCLNRLLMIECSSRCPNGDYCSNRRFQRKQHADVEVILTEKKGWGLRAAKDLPSNTFVLEYCGEVLDHKEFKARVKEYARNKNIHYYFMALKNDEIIDATQKGNCSRFMNHSCEPNCETQKWTVNGQLRVGFFTTKLVPSGSELTFDYQFQRYGKEAQKCFCGSANCRGYLGGENRVSIRAAGGKMKKERSRKKDSVDGELEALMENGEGLSDKNQVPSLSRLMVRIETLEQKLTCLELIQNTHSQSCLKSFLERHGLSLLWIWMAELGDGRESNQKLQEEIIKTLEHLPIPTKNMLEESKVLPIIQRWSQTKTAVPPLSEGDGYSSENTSRAHTPLNTPDPSTKLSTEADTDTPKKLMFRRLKIISENSMDSAISDATSELEGKDGKEDLDQLENVPVEEEEELQSQQLLPQQLPECKVDSETNIEASKLPTSEPEADAEIEPKESNGTKLEEPINEETPSQDEEEGVSDVESERSQEQPDKTVDISDLATKLLDSWKDLKEVYRIPKKSQTEKENTTTERGRDAVGFRDQTPAPKTPNRSRERDPDKQTQNKEKRKRRSSLSPPSSAYERGTKRPDDRYDTPTSKKKVRIKDRNKLSTEERRKLFEQEVAQREAQKQQQQMQNLGMTSPLPYDSLGYNAPHHPFAGYPPGYPMQAYVDPSNPNAGKVLLPTPSMDPVCSPAPYDHAQPLVGHSTEPLSAPPPVPVVPHVAAPVEVSSSQYVAQSDGVVHQDSSVAVLPVPAPGPVQGQNYSVWDSNQQSVSVQQQYSPAQSQATIYYQGQTCPTVYGVTSPYSQTTPPIVQSYAQPSLQYIQGQQIFTAHPQGVVVQPAAAVTTIVAPGQPQPLQPSEMVVTNNLLDLPPPSPPKPKTIVLPPNWKTARDPEGKIYYYHVITRQTQWDPPTWESPGDDASLEHEAEMDLGTPTYDENPMKASKKPKTAEADTSSELAKKSKEVFRKEMSQFIVQCLNPYRKPDCKVGRITTTEDFKHLARKLTHGVMNKELKYCKNPEDLECNENVKHKTKEYIKKYMQKFGAVYKPKEDTELE

SEQ ID NO: 843432 - protein, 2275 aa, Homo sapiens
DLKQTEMINILAIQNLNEILGMYLPDVDQKESDGGADLTLGLREALELIYPIPDQNDLIIMTLIVATIGAPLIERGRAILGHTQITEHERVLTQKKSIRRHTQGVPHLIPLLTVDLRTSSYSKSDRDCKTETSYLEMERRGKYSSKLERESKRTSENEAIKRCCSPPNELGFRRGSSYSKHDSSASRYKSTLSKPIPKSDKFKNSFCCTELNEEIKQSHSFSLQTPCSKGSELRMINKNPEREKAGSPAPSNRLNDSPTLKKLDELPIFKSEFITHDSHDSIKELDSLSKVKNDQLRSFCPIELNINGSPGAESDLATFCTSKTDAVLMTSDDSVTGSELSPLVKACMLSSNGFQNISRCKEKDLDDTCMLHKKSESPFRETEPLVSPHQDKLMSMPVMTVDYSKTVVKEPVDTRVSCCKTKDSDIYCTLNDSNPSLCNSEAENIEPSVMKISSNSFMNVHLESKPVICDSRNLTDHSKFACEEYKQSIGSTSSASVNHFDDLYQPIGSSGIASSLQSLPPGIKVDSLTLLKCGENTSPVLDAVLKSKKSSEFLKHAGKETIVEVGSDLPDSGKGFASRENRRNNGLSGKCLQEAQKEGNSILPERRGRPEISLDERGEGGHVHTSDDSEVVFSSCDLNLTMEDSDGVTYALKCDSSGHAPEIVSTVHEDYSGSSESSNDESDSEDTDSDDSSIPRNRLQSVVVVPKNSTLPMEETSPCSSRSSQSYRHYSDHWEDERLESRRHLYEEKFESIASKACPQTDKFFLHKGTEKNPEISFTQSSRKQIDNRLPELSHPQSDGVDSTSHTDVKSDPLGHPNSEETVKAKIPSRQQEELPIYSSDFEDVPNKSWQQTTFQNRPDSRLGKTELSFSSSCEIPQEDGLHSSEELRNLGWDFSQEKPSATYQQPDSSYGACGGHKYQQNAEQYGGTRDYWQGNGYWDPRSGRPPGTGVVYDRTQGQVPDSLTDDREEEENWDQQDGSHFSDQSDKFLLSLQKDKGSVQAPEISSNSIKDTLAVNEKKDFSKNLEKNDIKDRGPLKKRRQEIESDSESDGELQDRKKVRVEVEQGETSVPPGSALVGPSCVMDDFRDPQRWKECAKQGKMPCYFDLIEENVYLTERKKNKSHRDIKRMQCECTPLSKDERAQGEIACGEDCLNRLLMIECSSRCPNGDYCSNRRFQRKQHADVEVILTEKKGWGLRAAKDLPSNTFVLEYCGEVLDHKEFKARVKEYARNKNIHYYFMALKNDEIIDATQKGNCSRFMNHSCEPNCETQKWTVNGQLRVGFFTTKLVPSGSELTFDYQFQRYGKEAQKCFCGSANCRGYLGGENRVSIRAAGGKMKKERSRKKDSVDGELEALMENGEGLSDKNQVPSLSRLMVRIETLEQKLTCLELIQNTHSQSCLKSFLERHGLSLLWIWMAELGDGRESNQKLQEEIIKTLEHLPIPTKNMLEESKVLPIIQRWSQTKTAVPPLSEGDGYSSENTSRAHTPLNTPDPSTKLSTEADTDTPKKLMFRRLKIISENSMDSAISDATSELEGKDGKEDLDQLENVPVEEEEELQSQQLLPQQLPECKVDSETNIEASKLPTSEPEADAEIEPKESNGTKLEEPINEETPSQDEEEGVSDVESERSQEQPDKTVDISDLATKLLDSWKDLKEVYRIPKKSQTEKENTTTERGRDAVGFRDQTPAPKTPNEVKRESVSDVESERSQEQPDKTVDISDLATKLLDSWKDLKEVYRIPKKSQTEKENTTTERGRDAVGFRDQTPAPKTPNRSRERDPDKQTQNKEKRKRRSSLSPPSSAYERGTKRPDDRYDTPTSKKKVRIKDRNKLSTEERRKLFEQEVAQREAQKQQQQMQNLGMTSPLPYDSLGYNAPHHPFAGYPPGYPMQAYVDPSNPNAGKVLLPTPSMDPVCSPAPYDHAQPLVGHSTEPLSAPPPVPVVPHVAAPVEVSSSQYVAQSDGVVHQDSSVAVLPVPAPGPVQGQNYSVWDSNQQSVSVQQQYSPAQSQATIYYQGQTCPTVYGVTSPYSQTTPPIVQSYAQPSLQYIQGQQIFTAHPQGVVVQPAAAVTTIVAPGQPQPLQPSEMVVTNNLLDLPPPSPPKPKTIVLPPNWKTARDPEGKIYYYHVITRQTQWDPPTWESPGDDASLEHEAEMDLGTPTYDENPMKASKKPKTAEADTSSELAKKSKEVFRKEMSQFIVQCLNPYRKPDCKVGRITTTEDFKHLARKLTHGVMNKELKYCKNPEDLECNENVKHKTKEYIKKYMQKFGAVYKPKEDTELE

SEQ ID NO: 843433 - protein, 98 aa, Homo sapiens
ATSVTTEVQKEMSQFIVQCLNPYRKPDCKVGRITTTEDFKHLARKLTHGVMNKELKYCKNPEDLECNENVKHKTKEYIKKYMQKFGAVYKPKEDTELE

SEQ ID NO: 843434 - protein, 2197 aa, Homo sapiens; identical to SEQ ID NO: 843431

SEQ ID NO: 843435 - protein, 2212 aa, Homo sapiens
DLKQTEMINILAIQNLNEILGMYLPDVDQKESDGGADLTLGLREALELIYPIPDQNDLIIMTLIVATIGAPLIERGRAILGHTQITEHERVLTQKKSIRRHTQGVPHLIPLLTVDLRTSSYSKSDRDCKTETSYLEMERRGKYSSKLERESKRTSENEAIKRCCSPPNELGFRRGSSYSKHDSSASRYKSTLSKPIPKSDKFKNSFCCTELNEEIKQSHSFSLQTPCSKGSELRMINKNPEREKAGSPAPSNRLNDSPTLKKLDELPIFKSEFITHDSHDSIKELDSLSKVKNDQLRSFCPIELNINGSPGAESDLATFCTSKTDAVLMTSDDSVTGSELSPLVKACMLSSNGFQNISRCKEKDLDDTCMLHKKSESPFRETEPLVSPHQDKLMSMPVMTVDYSKTVVKEPVDTRVSCCKTKDSDIYCTLNDSNPSLCNSEAENIEPSVMKISSNSFMNVHLESKPVICDSRNLTDHSKFACEEYKQSIGSTSSASVNHFDDLYQPIGSSGIASSLQSLPPGIKVDSLTLLKCGENTSPVLDAVLKSKKSSEFLKHAGKETIVEVGSDLPDSGKGFASRENRRNNGLSGKCLQEAQKEGNSILPERRGRPEISLDERGEGGHVHTSDDSEVVFSSCDLNLTMEDSDGVTYALKCDSSGHAPEIVSTVHEDYSGSSESSNDESDSEDTDSDDSSIPRNRLQSVVVVPKNSTLPMEETSPCSSRSSQSYRHYSDHWEDERLESRRHLYEEKFESIASKACPQTDKFFLHKGTEKNPEISFTQSSRKQIDNRLPELSHPQSDGVDSTSHTDVKSDPLGHPNSEETVKAKIPSRQQEELPIYSSDFEDVPNKSWQQTTFQNRPDSRLGKTELSFSSSCEIPQEDGLHSSEELRNLGWDFSQEKPSATYQQPDSSYGACGGHKYQQNAEQYGGTRDYWQGNGYWDPRSGRPPGTGVVYDRTQGQVPDSLTDDREEEENWDQQDGSHFSDQSDKFLLSLQKDKGSVQAPEISSNSIKDTLAVNEKKDFSKNLEKNDIKDRGPLKKRRQEIESDSESDGELQDRKKVRVEVEQGETSVPPGSALVGPSCVMDDFRDPQRWKECAKQGKMPCYFDLIEENVYLTERKKNKSHRDIKRMQCECTPLSKDERAQGEIACGEDCLNRLLMIECSSRCPNGDYCSNRRFQRKQHADVEVILTEKKGWGLRAAKDLPSNTFVLEYCGEVLDHKEFKARVKEYARNKNIHYYFMALKNDEIIDATQKGNCSRFMNHSCEPNCETQKWTVNGQLRVGFFTTKLVPSGSELTFDYQFQRYGKEAQKCFCGSANCRGYLGGENRVSIRAAGGKMKKERSRKKDSVDGELEALMENGEGLSDKNQVPSLSRLMVRIETLEQKLTCLELIQNTHSQSCLKSFLERHGLSLLWIWMAELGDGRESNQKLQEEIIKTLEHLPIPTKNMLEESKVLPIIQRWSQTKTAVPPLSEGDGYSSENTSRAHTPLNTPDPSTKLSTEADTDTPKKLMFRRLKIISENSMDSAISDATSELEGKDGKEDLDQLENVPVEEEEELQSQQLLPQQLPECKVDSETNIEASKLPTSEPEADAEIEPKESNGTKLEEPINEETPSQDEEEGVSDVESERSQEQPDKTVDISDLATKLLDSWKDLKEVYRIPKKSQTEKENTTTERGRDAVGFRDQTPAPKTPNRSRERDPDKQTQNKEKRKRRSSLSPPSSAYERGTKRPDDRYDTPTSKKKVRIKDRNKLSTEERRKLFEQEVAQREAQKQQQQMQNLGMTSPLPYDSLGYNAPHHPFAGYPPGYPMQAYVDPSNPNAGKVLLPTPSMDPVCSPAPYDHAQPLVGHSTEPLSAPPPVPVVPHVAAPVEVSSSQYVAQSDGVVHQDSSVAVLPVPAPGPVQGQNYSVWDSNQQSVSVQQQYSPAQSQATIYYQGQTCPTVYGVTSPYSQTTPPIVQSYAQPSLQYIQGQQIFTAHPQGVVVQPAAAVTTIVAPGQPQPLQPSEMVVTNNLLDLPPPSPPKPKTIVLPPNWKTARDPEGKIYYYHVITRDRVFLCCPELICTNSWLQAILPPEASQNAGMTGVRHHTQLQLQTQWDPPTWESPGDDASLEHEAEMDLGTPTYDENPMKASKKPKTAEADTSSELAKKSKEVFRKEMSQFIVQCLNPYRKPDCKVGRITTTEDFKHLARKVLPLLLVAHQAMFWANCVPSKKPFSS

SEQ ID NO: 843436 - protein, 2147 aa, Homo sapiens
DLKQTEMINILAIQNLNEILGMYLPDVDQKESDGGADLTLGLREALELIYPIPDQNDLIIMTLIVATIGAPLIERGRAILGHTQITEHERVLTQKKSIRRHTQGVPHLIPLLTVDLRTSSYSKSDRDCKTETSYLEMERRGKYSSKLERESKRTSENEAIKRCCSPPNELGFRRGSSYSKHDSSASRYKSTLSKPIPKSDKFKNSFCCTELNEEIKQSHSFSLQTPCSKGSELRMINKNPEREKAGSPAPSNRLNDSPTLKKLDELPIFKSEFITHDSHDSIKELDSLSKVKNDQLRSFCPIELNINGSPGAESDLATFCTSKTDAVLMTSDDSVTGSELSPLVKACMLSSNGFQNISRCKEKDLDDTCMLHKKSESPFRETEPLVSPHQDKLMSMPVMTVDYSKTVVKEPVDTRVSCCKTKDSDIYCTLNDSNPSLCNSEAENIEPSVMKISSNSFMNVHLESKPVICDSRNLTDHSKFACEEYKQSIGSTSSASVNHFDDLYQPIGSSGIASSLQSLPPGIKVDSLTLLKCGENTSPVLDAVLKSKKSSEFLKHAGKETIVEVGSDLPDSGKGFASRENRRNNGLSGKCLQEAQKEGNSILPERRGRPEISLDERGEGGHVHTSDDSEVVFSSCDLNLTMEDSDGVTYALKCDSSGHAPEIVSTVHEDYSGSSESSNDESDSEDTDSDDSSIPRNRLQSVVVVPKNSTLPMEETSPCSSRSSQSYRHYSDHWEDERLESRRHLYEEKFESIASKACPQTDKFFLHKGTEKNPEISFTQSSRKQIDNRLPELSHPQSDGVDSTSHTDVKSDPLGHPNSEETVKAKIPSRQQEELPIYSSDFEDVPNKSWQQTTFQNRPDSRLGKTELSFSSSCEIPQEDGLHSSEELRNLGWDFSQEKPSATYQQPDSSYGACGGHKYQQNAEQYGGTRDYWQGNGYWDPRSGRPPGTGVVYDRTQGQVPDSLTDDREEEENWDQQDGSHFSDQSDKFLLSLQKDKGSVQAPEISSNSIKDTLAVNEKKDFSKNLEKNDIKDRGPLKKRRQEIESDSESDGELQDRKKVRVEVEQGETSVPPGSALVGPSCVMDDFRDPQRWKECAKQGKMPCYFDLIEENVYLTERKKNKSHRDIKRMQCECTPLSKDERAQGEIACGEDCLNRLLMIECSSRCPNGDYCSNRRFQRKQHADVEVILTEKKGWGLRAAKDLPSNTFVLEYCGEVLDHKEFKARVKEYARNKNIHYYFMALKNDEIIDATQKGNCSRFMNHSCEPNCETQKWTVNGQLRVGFFTTKLVPSGSELTFDYQFQRYGKEAQKCFCGSANCRGYLGGENRVSIRAAGGKMKKERSRKKDSVDGELEALMENGEGLSDKNQVPSLSRLMVRIETLEQKLTCLELIQNTHSQSCLKSFLERHGLSLLWIWMAELGDGRESNQKLQEEIIKTLEHLPIPTKNMLEESKVLPIIQRWSQTKTAVPPLSEGDGYSSENTSRAHTPLNTPDPSTKLSTEADTDTPKKLMFRRLKIISENSMDSAISDATSELEGKDGKEDLDQLENVPVEEEEELQSQQLLPQQLPECKVDSETNIEASKLPTSEPEADAEIEPKESNGTKLEEPINEETPSQDEEEGVSDVESERSQEQPDKTVDISDLATKLLDSWKDLKEVYRIPKKSQTEKENTTTERGRDAVGFRDQTPAPKTPNRSRERDPDKQTQNKEKRKRRSSLSPPSSAYERGTKRPDDRYDTPTSKKKVRIKDRNKLSTEERRKLFEQEVAQREAQKQQQQMQNLGMTSPLPYDSLGYNAPHHPFAGYPPGYPMQAYVDPSNPNAGKVLLPTPSMDPVCSPAPYDHAQPLVGHSTEPLSAPPPVPVVPHVAAPVEVSSSQYVAQSDGVVHQDSSVAVLPVPAPGPVQGQNYSVWDSNQQSVSVQQQYSPAQSQATIYYQGQTCPTVYGVTSPYSQTTPPIVQSYAQPSLQYIQGQQIFTAHPQGVVVQPAAAVTTIVAPGQPQPLQPSEMVVTNNLLDLPPPSPPKPKTIVLPPNWKTARDPEGKIYYYHVITRQTQWDPPTWESPGDDASLEHEAEMDLGTPTYDENPMKASKKPKTAEADTSSELAKKSKEVFRKEMSQFIVQCLNPYRKHPGATDFHSSSTRSGGTASRSSD

SEQ ID NO: 843437 - protein, 2279 aa, Homo sapiens [sequence omitted]

SEQ ID NO: 843438 - protein, 2279 aa, Homo sapiens [sequence omitted]

SEQ ID NO: 843439 - protein, 1325 aa, Homo sapiens
MFWTDWGDLKPGIYRSNMDGSAAYHLVSEDVKWPNGISVDDQWIYWTDAYLECIERITFSGQQRSVILDNLPHPYAIAVFKNEIYWDDWSQLSIFRASKYSGSQMEILANQLTGLMDMKIFYKGKNTGSNACVPRPCSLLCLPKANNSRSCRCPEDVSSSVLPSGDLMCDCPQGYQLKNNTCVKEENTCLRNQYRCSNGNCINSIWWCDFDNDCGDMSDERNCPTTICDLDTQFRCQESGTCIPLSYKCDLEDDCGDNSDESHCEMHQCRSDEYNCSSGMCIRSSWVCDGDNDCRDWSDEANCTAIYHTCEASNFQCRNGHCIPQRWACDGDTDCQDGSDEDPVNCEKKCNGFRCPNGTCIPSSKHCDGLRDCSDGSDEQHCEPLCTHFMDFVCKNRQQCLFHSMVCDGIIQCRDGSDEDAAFAGCSQDPEFHKVCDEFGFQCQNGVCISLIWKCDGMDDCGDYSDEANCENPTEAPNCSRYFQFRCENGHCIPNRWKCDRENDCGDWSDEKDCGDSHILPFSTPGPSTCLPNYYRCSSGTCVMDTWVCDGYRDCADGSDEEACPLLANVTAASTPTQLGRCDRFEFECHQPKTCIPNWKRCDGHQDCQDGRDEANCPTHSTLTCMSREFQCEDGEACIVLSERCDGFLDCSDESDEKACSDELTVYKVQNLQWTADFSGDVTLTWMRPKKMPSASCVYNVYYRVVGESIWKTLETHSNKTNTVLKVLKPDTTYQVKVQVQCLSKAHNTNDFVTLRTPEGLPDAPRNLQLSLPREAEGVIVGHWAPPIHTHGLIREYIVEYSRSGSKMWASQRAASNFTEIKNLLVNTLYTVRVAAVTSRGIGNWSDSKSITTIKGKVIPPPDIHIDSYGENYLSFTLTMESDIKVNGYVVNLFWAFDTHKQERRTLNFRGSILSHKVGNLTAHTSYEISAWAKTDLGDSPLAFEHVMTRGVRPPAPSLKAKAINQTAVECTWTGPRNVVYGIFYATSFLDLYRNPKSLTTSLHNKTVIVSKDEQYLFLVRVVVPYQGPSSDYVVVKMIPDSRLPPRHLHVVHTGKTSVVIKWESPYDSPDQDLLYAIAVKDLIRKTDRSYKVKSRNSTVEYTLNKLEPGGKYHIIVQLGNMSKDSSIKITTVSLSAPDALKIITENDHVLLFWKSLALKEKHFNESRGYEIHMFDSAMNITAYLGNTTDNFFKISNLKMGHNYTFTVQARCLFGNQICGEPAILLYDELGSGADASATQAARSTDVAAVVVPILFLILLSLGVGFAILYTKHRRLQSSFTAFANSHYSSRLGSAIFSSGDDLGEDDEDAPMITGFSDDVPMVIA

SEQ ID NO: 843440 - protein, 574 aa, Homo sapiens
  misc_feature (18)..(18): Xaa can be any naturally occurring amino acid
  misc_feature (23)..(23): Xaa can be any naturally occurring amino acid
  misc_feature (32)..(32): Xaa can be any naturally occurring amino acid
NLGPGKKSQKDCIELSRXPTLCXQYASLGSSXVPPPIHTHGLIREYIVEYSRSGSKMWASQRAASNFTEIKNLLVNTLYTVRVAAVTSRGIGNWSDSKSITTIKGKVIPPPDIHIDSYGENYLSFTLTMESDIKVNGYVVNLFWAFDTHKQERRTLNFRGSILSHKVGNLTAHTSYEISAWAKTDLGDSPLAFEHVMTRGVRPPAPSLKAKAINQTAVECTWTGPRNVVYGIFYATSFLDLYRNPKSLTTSLHNKTVIVSKDEQYLFLVRVVVPYQGPSSDYVVVKMIPDSRLPPRHLHVVHTGKTSVVIKWESPYDSPDQDLLYAIAVKDLIRKTDRSYKVKSRNSTVEYTLNKLEPGGKYHIIVQLGNMSKDSSIKITTVSLSAPDALKIITENDHVLLFWKSLALKEKHFNESRGYEIHMFDSAMNITAYLGNTTDNFFKISNLKMGHNYTFTVQARCLFGNQICGEPAILLYDELGSGADASATQAARSTDVAAVVVPILFLILLSLGVGFAILYTKHRRLQSSFTAFANSHYSSRLGSAIFSSGDDLGEDDEDAPMITGFSDDVPMVIA

SEQ ID NO: 843441 - protein, 446 aa, Homo sapiens [sequence omitted]

SEQ ID NO: 843442 - protein, 1213 aa, Homo sapiens
AASTVFPLAWLSLILWGFSLGAGPRISQRWYFGDTCLHLTEPALLASRCTFSPGGGATCSSVRPNMATRSSRRESRLPFLFTLVALLPPGALCEVWTQRLHGGSAPLPQDRGFLVVQGDPRELRLWARGDARGASRADEKPLRRKRSAALQPEPIKVYGQVSLNDSHNQMVVHWAGEKSNVIVALARDSLALARPKSSDVYVSYDYGKSFKKISDKLNFGLGNRSEAVIAQFYHSPADNKRYIFADAYAQYLWITFDFCNTLQGFSIPFRAADLLLHSKASNLLLGFDRSHPNKQLWKSDDFGQTWIMIQEHVKSFSWGIDPYDKPNTIYIERHEPSGYSTVFRSTDFFQSRENQEVILEEVRDFQLRDKYMFATKVVHLLGSEQQSSVQLWVSFGRKPMRAAQFVTRHPINEYYIADASEDQVFVCVSHSNNRTNLYISEAEGLKFSLSLENVLYYSPGGAGSDTLVRYFANEPFADFHRVEGLQGVYIATLINGSMNEENMRSVITFDKGGTWEFLQAPAFTGYGEKINCELSQGCSLHLAQRLSQLLNLQLRRMPILSKESAPGLIIATGSVGKNLASKTNVYISSSAGARWREALPGPHYYTWGDHGGIITAIAQGMETNELKYSTNEGETWKTFIFSEKPVFVYGLLTEPGEKSTVFTIFGSNKENVHSWLILQVNATDALGVPCTENDYKLWSPSDERGNECLLGHKTVFKRRTPHATCFNGEDFDRPVVVSNCSCTREDYECDFGFKMSEDLSLEVCVPDPEFSGKSYSPPVPCPVGSTYRRTRGYRKISGDTCSGGDVEARLEGELVPCPLAEENEFILYAVRKSIYRYDLASGATEQLPLTGLRAAVALDFDYEHNCLYWSDLALDVIQRLCLNGSTGQEVIINSGLETVEALAFEPLSQLLYWVDAGFKKIEVANPDGDFRLTIVNSSVLDRPRALVLVPQEGVMFWTDWGDLKPGIYRSNMDGSAAYHLVSEDVKWPNGISVDDQWIYWTDAYLECIERITFSGQQRSVILDNLPHPYAIAVFKNEIYWDDWSQLSIFRASKYSGSQMEILANQLTGLMDMKIFYKGKNTGSNACVPRPCSLLCLPKANNSRSCRCPEDVSSSVLPSGDLMCDCPQGYQLKNNTCVKEENTCLRNQYRCSNGNCINSIWWCDFDNDCGDMSDERNCRESSGLDVKHLPLLRSLVGSSQAEGLRSRARATHDW

SEQ ID NO: 843443 - protein, 753 aa, Homo sapiens
AASTVFPLAWLSLILWGFSLGAGPRISQRWYFGDTCLHLTEPALLASRCTFSPGGGATCSSVRPNMATRSSRRESRLPFLFTLVALLPPGALCEVWTQRLHGGSAPLPQDRGFLVVQGDPRELRLWARGDARGASRADEKPLRRKRSAALQPEPIKVYGQVSLNDSHNQMVVHWAGEKSNVIVALARDSLALARPKSSDVYVSYDYGKSFKKISDKLNFGLGNRSEAVIAQFYHSPADNKRYIFADAYAQYLWITFDFCNTLQGFSIPFRAADLLLHSKASNLLLGFDRSHPNKQLWKSDDFGQTWIMIQEHVKSFSWGIDPYDKPNTIYIERHEPSGYSTVFRSTDFFQSRENQEVILEEVRDFQLRDKYMFATKVVHLLGSEQQSSVQLWVSFGRKPMRAAQFVTRHPINEYYIADASEDQVFVCVSHSNNRTNLYISEAEGLKFSLSLENVLYYSPGGAGSDTLVRYFANEPFADFHRVEGLQGVYIATLINGSMNEENMRSVITFDKGGTWEFLQAPAFTGYGEKINCELSQGCSLHLAQRLSQLLNLQLRRMPILSKESAPGLIIATGSVGKNLASKTNVYISSSAGARWREALPGPHYYTWGDHGGIITAIAQGMETNELKYSTNEGETWKTFIFSEKPVFVYGLLTEPGEKSTVFTIFGSNKENVHSWLILQVNATDALGVPCTENDYKLWSPSDERGNECLLGHKTVFKRRTPHATCFNGEDFDRPVVVSNCSCTREDYEWSVLL

SEQ ID NO: 843444 - protein, 229 aa, Homo sapiens
  misc_feature (218)..(218): Xaa can be any naturally occurring amino acid
  misc_feature (223)..(223): Xaa can be any naturally occurring amino acid
  misc_feature (226)..(226): Xaa can be any naturally occurring amino acid
ARAAWSPGSGARGPGPAALLASRCTFSPGGGATCSSVRPNMATRSSRRESRLPFLFTLVALLPPGALCEVWTQRLHGGSAPLPQDRGFLVVQGDPRELRLWARGDARGASRADEKPLRRKRSAALQPEPIKVYGQVSLNDSHNQMVVHWAGEKSNVIVALARDSLALARPKSSDVYVSYDYGKSFKKISDKLNFGLGNRSEAVIAQFYHSPADNKRYXFADAXPYXGSR

SEQ ID NO: 843445 - protein, 2279 aa, Homo sapiens [sequence omitted]

SEQ ID NO: 843446 - protein, 1875 aa, Homo sapiens
AASTVFPLAWLSLILWGFSLGAGPRISQRWYFGDTCLHLTEPALLASRCTFSPGGGATCSSVRPNMATRSSRRESRLPFLFTLVALLPPGALCEVWTQRLHGGSAPLPQDRGFLVVQGDPRELRLWARGDARGASRADEKPLRRKRSAALQPEPIKVYGQVSLNDSHNQMVVHWAGEKSNVIVALARDSLALARPKSSDVYVSYDYGKSFKKISDKLNFGLGNRSEAVIAQFYHSPADNKRYIFADAYAQYLWITFDFCNTLQGFSIPFRAADLLLHSKASNLLLGFDRSHPNKQLWKSDDFGQTWIMIQEHVKSFSWGIDPYDKPNTIYIERHEPSGYSTVFRSTDFFQSRENQEVILEEVRDFQLRDKYMFATKVVHLLGSEQQSSVQLWVSFGRKPMRAAQFVTRHPINEYYIADASEDQVFVCVSHSNNRTNLYISEAEGLKFSLSLENVLYYSPGGAGSDTLVRYFANEPFADFHRVEGLQGVYIATLINGSMNEENMRSVITFDKGGTWEFLQAPAFTGYGEKINCELSQGCSLHLAQRLSQLLNLQLRRMPILSKESAPGLIIATGSVGKNLASKTNVYISSSAGARWREALPGPHYYTWGDHGGIITAIAQGMETNELKYSTNEGETWKTFIFSEKPVFVYGLLTEPGEKSTVFTIFGSNKENVHSWLILQVNATDALGVPCTENDYKLWSPSDERGNECLLGHKTVFKRRTPHATCFNGEDFDRPVVVSNCSCTREDYECDFGFKMSEDLSLEVCVPDPEFSGKSYSPPVPCPVGSTYRRTRGYRKISGDTCSGGDVEARLEGELVPCPLAEENEFILYAVRKSIYRYDLASGATEQLPLTGLRAAVALDFDYEHNCLYWSDLALDVIQRLCLNGSTGQEVIINSGLETVEALAFEPLSQLLYWVDAGFKKIEVANPDGDFRLTIVNSSVLDRPRALVLVPQEGVMFWTDWGDLKPGIYRSNMDGSAAYHLVSEDVKWPNGISVDDQWIYWTDAYLECIERITFSGQQRSVILDNLPHPYAIAVFKNEIYWDDWSQLSIFRASKYSGSQMEILANQLTGLMDMKIFYKGKNTGSNACVPRPCSLLCLPKANNSRSCRCPEDVSSSVLPSGDLMCDCPQGYQLKNNTCVKEENTCLRNQYRCSNGNCINSIWWCDFDNDCGDMSDERNCPTTICDLDTQFRCQESGTCIPLSYKCDLEDDCGDNSDESHCEMHQCRSDEYNCSSGMCIRSSWVCDGDNDCRDWSDEANCTAIYHTCEASNFQCRNGHCIPQRWACDGDTDCQDGSDEDPVNCEKKCNGFRCPNGTCIPSSKHCDGLRDCSDGSDEQHCEPLCTHFMDFVCKNRQQCLFHSMVCDGIIQCRDGSDEDAAFAGCSQDPEFHKVCDEFGFQCQNGVCISLIWKCDGMDDCGDYSDEANCENPTEAPNCSRYFQFRCENGHCIPNRWKCDRENDCGDWSDEKDCGDSHILPFSTPGPSTCLPNYYRCSSGTCVMDTWVCDGYRDCADGSDEEACPLLANVTAASTPTQLGRCDRFEFECHQPKTCIPNWKRCDGHQDCQDGRDEANCPTHSTLTCMSREFQCEDGEACIVLSERCDGFLDCSDESDEKACSDELTVYKVQNLQWTADFSGDVTLTWMRPKKMPSASCVYNVYYRVVGESIWKTLETHSNKTNTVLKVLKPDTTYQVKVQVQCLSKAHNTNDFVTLRTPEGLPDAPRNLQLSLPREAEGVIVGHWAPPIHTHGLIREYIVEYSRSGSKMWASQRAASNFTEIKNLLVNTLYTVRVAAVTSRGIGNWSDSKSITTIKGKVIPPPDIHIDSYGENYLSFTLTMESDIKVMWEFQASSWMGLYFVWELKGHSTVRLEKNKKQLPP

SEQ ID NO: 843447 - protein, 1278 aa, Homo sapiens
AASTVFPLAWLSLILWGFSLGAGPRISQRWYFGDTCLHLTEPALLASRCTFSPGGGATCSSVRPNMATRSSRRESRLPFLFTLVALLPPGALCEVWTQRLHGGSAPLPQDRGFLVVQGDPRELRLWARGDARGASRADEKPLRRKRSAALQPEPIKVYGQVSLNDSHNQMVVHWAGEKSNVIVALARDSLALARPKSSDVYVSYDYGKSFKKISDKLNFGLGNRSEAVIAQFYHSPADNKRYIFADAYAQYLWITFDFCNTLQGFSIPFRAADLLLHSKASNLLLGFDRSHPNKQLWKSDDFGQTWIMIQEHVKSFSWGIDPYDKPNTIYIERHEPSGYSTVFRSTDFFQSRENQEVILEEVRDFQLRDKYMFATKVVHLLGSEQQSSVQLWVSFGRKPMRAAQFVTRHPINEYYIADASEDQVFVCVSHSNNRTNLYISEAEGLKFSLSLENVLYYSPGGAGSDTLVRYFANEPFADFHRVEGLQGVYIATLINGSMNEENMRSVITFDKGGTWEFLQAPAFTGYGEKINCELSQGCSLHLAQRLSQLLNLQLRRMPILSKESAPGLIIATGSVGKNLASKTNVYISSSAGARWREALPGPHYYTWGDHGGIITAIAQGMETNELKYSTNEGETWKTFIFSEKPVFVYGLLTEPGEKSTVFTIFGSNKENVHSWLILQVNATDALGVPCTENDYKLWSPSDERGNECLLGHKTVFKRRTPHATCFNGEDFDRPVVVSNCSCTREDYECDFGFKMSEDLSLEVCVPDPEFSGKSYSPPVPCPVGSTYRRTRGYRKISGDTCSGGDVEARLEGELVPCPLAEENEFILYAVRKSIYRYDLASGATEQLPLTGLRAAVALDFDYEHNCLYWSDLALDVIQRLCLNGSTGQEVIINSGLETVEALAFEPLSQLLYWVDAGFKKIEVANPDGDFRLTIVNSSVLDRPRALVLVPQEGVMFWTDWGDLKPGIYRSNMDGSAAYHLVSEDVKWPNGISVDDQWIYWTDAYLECIERITFSGQQRSVILDNLPHPYAIAVFKNEIYWDDWSQLSIFRASKYSGSQMEILANQLTGLMDMKIFYKGKNTGSNACVPRPCSLLCLPKANNSRSCRCPEDVSSSVLPSGDLMCDCPQGYQLKNNTCVKEENTCLRNQYRCSNGNCINSIWWCDFDNDCGDMSDERNCPTTICDLDTQFRCQESGTCIPLSYKCDLEDDCGDNSDESHCEMHQCRSDEYNCSSGMCIRSSWVCDGDNDCRDWSDEANCTGQYFLDSVDSTHPFMQWLTL

SEQ ID NO: 843448 - protein, 128 aa, Homo sapiens
RDPPSLASQSAGITGMSHRSSSVTEAGAQWHNQLTASSASTSASLQPLLGSSDTPASASQVAGTTDTDHHAQLIFVYFVEMGFCHVAQAFKLLSSSDPPTLASQSDGIIGMSHCAWSVYKFYSFRYYV

SEQ ID NO: 843449 - protein, 114 aa, Homo sapiens
MLLTSVSTNSASKGKEDPAEFRDLLSNFLQLLYVSKSEPPKSESMGLLALWLPGEFSQWNHGRRSEGGNTMRSRNVFPWFLPCSITAVGMYLSQTSYLLLHYSLHRALFYLGLQ

SEQ ID NO: 843450 - protein, 326 aa, Homo sapiens
AEYGKREGQIANVWSLVSRLPFLGALGVAVAVAEIGCTMSAFEKPQIIAHIQKGFNYTVFDCKWVPCSAKFVTMGNFARGTGVIQLYEIQHGDLKLLREIEKAKPIKCGTFGATSLQQRYLATGDFGGNLHIWNLEAPEMPVYSVKGHKEIINAIDGIGGLGIGEGAPEIVTGSRDGTVKVWDPRQKDDPVANMEPVQGENKRDCWTVAFGNAYNQEERVVCAGYDNGDIKLFDLRNMALRWETNIKNGVCSLEFDRKDISMNKLVATSLEGKFHVFDMRTQHPTKGFASVSEKAHKSTVWQVRHLPQNRELFLTAGGAGGLHLWK

SEQ ID NO: 843451 - protein, 395 aa, Homo sapiens
AEYGKREGQIANVWSLVSRLPFLGALGVAVAVAEIGCTMSAFEKPQIIAHIQKGFNYTVFDCKWVPCSAKFVTMGNFARGTGVIQLYEIQHGDLKLLREIEKAKPIKCGTFGATSLQQRYLATGDFGGNLHIWNLEAPEMPVYSVKGHKEIINAIDGIGGLGIGEGAPEIVTGSRDGTVKVWDPRQKDDPVANMEPVQGENKRDCWTVAFGNAYNQEERVVCAGYDNGDIKLFDLRNMALRWETNIKNGVCSLEFDRKDISMNKLVATSLEGKFHVFDMRTQHPTKGFASVSEKAHKSTVWQVRHLPQNRELFLTAGGAGGLHLWKYEYPIQRSKKDSEGIEMGVAGSVSLLQNVTLSTQPISSLDWSPDKRGLCVCSSFDQTVRVLIVTKLNKI

SEQ ID NO: 843452 - protein, 395 aa, Homo sapiens; identical to SEQ ID NO: 843451

SEQ ID NO: 843453 - protein, 326 aa, Homo sapiens; identical to SEQ ID NO: 843450

SEQ ID NO: 843454 - protein, 326 aa, Homo sapiens; identical to SEQ ID NO: 843450

SEQ ID NO: 843455 - protein, 306 aa, Homo sapiens
AEYGKREGQIANVWSLVSRLPFLGALGVAVAVAEIGCTMSAFEKPQIIAHIQKGFNYTVFDCKWVPCSAKFVTMGNFARGTGVIQLYEIQHGDLKLLREIEKAKPIKCGTFGATSLQQRYLATGDFGGNLHIWNLEAPEMPVYSVKGHKEIINAIDGIGGLGIGEGAPEIVTGSRDGTVKVWDPRQKDDPVANMEPVQGENKRDCWTVAFGNAYNQEERVVCAGYDNGDIKLFDLRNMALRWETNIKNGVCSLEFDRKDISMNKLVATSLEGKFHVFDMRTQHPTKGFASVSEKVNMREMSFYEEE

SEQ ID NO: 843456 - protein, 117 aa, Homo sapiens
NKYKSIWGFPPGLCSKIQGDLGSTKALVRTSVVVYHQSTLAATGTSSFLLSLWWLVCVSNPSLFLMCPPLLGSFHAICWHQRRFCCSHTTLGHEGPWIFASGLSWPHSTLASPLVPP

SEQ ID NO: 843457 - protein, 201 aa, Homo sapiens
AGVCWGTVQLEAPEAHSRESQGSDAMRKHLSWWWLATVCMLLFSHLSAVQTRGIKHRIKWNRKALPSTAQITEAQVAENRPGAFIKQGRKLDIDFGAEGNRYYEANYWQFPDGIHYNGCSEANVTKEAFVTGCINATQAANQGEFQKPDNKLHQQVLWRLVQELCSLKHCEFWLERGAGLRVTMHQPVLLCLLALIWLMVK

SEQ ID NO: 843458 - protein, 201 aa, Homo sapiens; identical to SEQ ID NO: 843457

SEQ ID NO: 843459 - protein, 91 aa, Homo sapiens
SPGGRSGVGRERHLKDTEKAVCRFAVCLLVTTSATADGASGGRETDGNAWVARAPCRPHSSCRHEHAHTHARKTHTLPFATRSQVKYTKSN

SEQ ID NO: 843460 - protein, 630 aa, Homo sapiens
RLPSWKQDFRGCVTACRRRAGTWTPPRPRGSGSRAMAGNCGARGALSAHTLLFDLPPALLGELCAVLDSCDGALGWRGLERLSSSWLDVRHIEKYVDQGKSGTRELLWSWAQKNKTIGDLLQVLQEMGHRRAIHLITNYGAVLSPSEKSYQEGGFPNILFKETANVTVDNVLIPEHNEKGVLLKSSISFQNIIEGTRNFHKDFLIGEGEIFEVYRVEIQNLTYAVKLFKQEKKMQCKKHWKRFLSELEVLLLFHHPNILELAAYFTETEKFCLIYPYMRNGTLFDRLQCVGDTAPLPWHIRIGILIGISKAIHYLHNVQPCSVICGSISSANILLDDQFQPKLTDFAMAHFRSHLEHQSCTINMTSSSSKHLWYMPEEYIRQGKLSIKTDVYSFGIVIMEVLTGCRVVLDDPKHIQLRDLLRELMEKRGLDSCLSFLDKKVPPCPRNFSAKLFCLAGRCAATRAKLRPSMDEVLNTLESTQASLYFAEDPPTSLKSFRCPSPLFLENVPSIPVEDDESQNNNLLPSDEGLRIDRMTQKTPFECSQSEVMFLSLDKKPESKRNEEACNMPSSSCEESWFPKYIVPSQDLRPYKVNIDPSSEAPGHSCRSRPVESSCSSKFSWDEYEQYKKE

SEQ ID NO: 843461 - protein, 128 aa, Homo sapiens
RLPSWKQDFRGCVTACRRRAGTWTPPRPRGSGSRAMAGNCGARGALSAHTLLFDLPPALLGELCAVLDSCDGALGWRGLVSKNKLCENGVLILQGFWHVVVCKYKDSKYGCVALFEKTPSETYLHMET

SEQ ID NO: 843462 - protein, 235 aa, Homo sapiens
RLPSWKQDFRGCVTACRRRAGTWTPPRPRGSGSRAMAGNCGARGALSAHTLLFDLPPALLGELCAVLDSCDGALGWRGLERLSSSWLDVRHIEKYVDQGKSGTRELLWSWAQKNKTIGDLLQVLQEMGHRRAIHLITNYGAVLSPSEKSYQEGGFPNILFKETANVTVDNVLIPEHNEKGVLLKSSISFQNIIEGTRNFHKDFLIGEGEIFEVYRVEIQNLTYAVKLFKQVWKEL

SEQ ID NO: 843463 - protein, 135 aa, Homo sapiens
YFRIVTMDSNFVPVNDKFSIGQDPNSNRIAQWLEVVPEQGIVDLSFQLAPEAMLGTYTVAVAEGKTFGTFSVEEYVLPKFKVEVVEPKELSTVQESFLVKICCRYTYGKPMLGAVQVSVCQKANTYWYREVEREQ

SEQ ID NO: 843464 - protein, 250 aa, Homo sapiens
MSISGTLSSYYVDSIISHESEDAPPAKFPSGQYASSRQPGHAEHLEFPSCSFQPKAPVFGASWAPLSPHASGSLPSVYHPYIQPQGVPPAESRYLRTWLEPAPRGEAAPGQGQAAVKAEPLLGAPGELLKQGTPEYSLETSAGREAVLSNQRPGYGDNKICEGSEDKERPDQTNPSANWLHARSSRKKRCPYTKYQTLELEKEFLFNMYLTRDRRHEVARLLNLSERQVKIWFQNRRMKMKKMNKEQGKE

SEQ ID NO: 843465 - protein, 250 aa, Homo sapiens; identical to SEQ ID NO: 843464

SEQ ID NO: 843466 - protein, 250 aa, Homo sapiens; identical to SEQ ID NO: 843464

SEQ ID NO: 843467 - protein, 250 aa, Homo sapiens; identical to SEQ ID NO: 843464

SEQ ID NO: 843468 - protein, 250 aa, Homo sapiens; identical to SEQ ID NO: 843464

SEQ ID NO: 843469 - protein, 250 aa, Homo sapiens; identical to SEQ ID NO: 843464

SEQ ID NO: 843470 - protein, 264 aa, Homo sapiens [sequence omitted]

SEQ ID NO: 843471 - protein, 372 aa, Homo sapiens
  misc_feature (58)..(58): Xaa can be any naturally occurring amino acid
  misc_feature (166)..(166): Xaa can be any naturally occurring amino acid
  misc_feature (181)..(181): Xaa can be any naturally occurring amino acid
  misc_feature (227)..(227): Xaa can be any naturally occurring amino acid
  misc_feature (252)..(252): Xaa can be any naturally occurring amino acid
  misc_feature (276)..(276): Xaa can be any naturally occurring amino acid
MAVGKNKRLTKGGKKGAKKKVVDPFSKKDWYDVKAPAMFNIRKIVWNRTASVNLAHPXRKTKHVAILDESSKELVVLFIGGDHCHDYSSKDIGTGIGFWPLSGTDSYYTPLQYDLGYGFVSYGAETHIVGSCKLKRVRDRAYLRSSFNSRWEQNRVDGILEWSLLXEKYSRPGNENSPFVXNTTFDPVLGNRIQQGTCNTVTGDDEPLDLFRYLMSKMAVGGFQLNXQRTPKSNPVINRDEATLRIIALQVXPEAGGHGAYTCAVHVTIRLGHTSXGAQRMRCKKPNDLKEVVNKLIPDSIGKDIEKACQSIYPLHDVFVRKVKMLKKPKFELGKLMELHGEGSSSGKATGDETGAKVERADGYEPPVQESV

SEQ ID NO: 843472 - protein, 101 aa, Homo sapiens
SWVFPASVSHIFLFCASSYLPCSVTSTASRNCRRDWAGFPNLSQRFGGAESRPRTTNSFLLACQLSTVVKEARSAKLKGFLGSTNKSAGIDYQCLLLSRDW

SEQ ID NO: 843473 - protein, 744 aa, Homo sapiens
GNWSNQSTAAREMLARRQRDPLQALRRRNQELKQQVDSLLSESQLKEALEPNKRQHIYQRCIQLKQAIDENKNALQKLSKADESAPVANYNQRKEEEHTLLDKLTQQLQGLAVTISRENITEVGAPTEEEEESESEDSEDSGGEEEDAEEEEEEKEENESHKWSTGEEYIAVGDFTAQQVGDLTFKKGEILLVIEKKPDGWWIAKDAKGNEGLVPRTYLEPYSEEEEGQESSEEGSEEDVEAVDETADGAEVKQRTDPHWSAVQKAISEAGIFCLVNHVSFCYLIVLMRNRMETVEDTNGSETGFRAWNVQSRGRIFLVSKPVLQINTVDVLTTMGAIPAGFRPSTLSQLLEEGNQFRANYFLQPELMPSQLAFRDLMWDATEGTIRSRPSRISLILTLWSCKMIPLPGMSIQVLSRHVRLCLFDGNKVLSNIHTVRATWQPKKPKTWTFSPQVTRILPCLLDGDCFIRSNSASPDLGILFELGISYIRNSTGERGELSCGWVFLKLFDASGVPIPAKTYELFLNGGTPYEKGIEVDPSISRRAHGSVFYQIMTMRRQPQLLVKLRSLNRRSRNVLSLLPETLIGNMCSIHLLIFYRQILGDVLLKDRMSLQSTDLISHPMLATFPMLLEQPDVMDALRSSWAGKESTLKRSEKRDKEFLKSTFLLVYHDCVLPLLHSTRLPPFRWAEEETETARWKVITDFLKQNQENQGALQALLSPDGVHEPFDLSEQTYDFLGEMRKNAV

SEQ ID NO: 843474 - protein, 626 aa, Homo sapiens
GNWSNQSTAAREMLARRQRDPLQALRRRNQELKQQVDSLLSESQLKEALEPNKRQHIYQRVGAPTEEEEESESEDSEDSGGEEEDAEEEEEEKEENESHKWSTGEEYIAVGDFTAQQVGDLTFKKGEILLVIEKKPDGWWIAKDAKGNEGLVPRTYLEPYSEEEEGQESSEEGSEEDVEAVDETADGAEVKQRTDPHWSAVQKAISEINTVDVLTTMGAIPAGFRPSTLSQLLEEGNQFRANYFLQPELMPSQLAFRDLMWDATEGTIRSRPSRISLILTLWSCKMIPLPGMSIQVLSRHVRLCLFDGNKVLSNIHTVRATWQPKKPKTWTFSPQVTRILPCLLDGDCFIRSNSASPDLGILFELGISYIRNSTGERGELSCGWVFLKLFDASGVPIPAKTYELFLNGGTPYEKGIEVDPSISRRAHGSVFYQIMTMRRQPQLLVKLRSLNRRSRNVLSLLPETLIGNMCSIHLLIFYRQILGDVLLKDRMSLQSTDLISHPMLATFPMLLEQPDVMDALRSSWAGKESTLKRSEKRDKEFLKSTFLLVYHDCVLPLLHSTRLPPFRWAEEETETARWKVITDFLKQNQENQGALQALLSPDGVHEPFDLSEQTYDFLGEMRKNAV

SEQ ID NO: 843475 - protein, 476 aa, Homo sapiens
EILFSNSTRLSFETKRISVFIQTDKALYKPKQEVKFRIVTLFSDFKPYKTSLNISLRINTVDVLTTMGAIPAGFRPSTLSQLLEEGNQFRANYFLQPELMPSQLAFRDLMWDATEGTIRSRPSRISLILTLWSCKMIPLPGMSIQVLSRHVRLCLFDGNKVLSNIHTVRATWQPKKPKTWTFSPQVTRILPCLLDGDCFIRSNSASPDLGILFELGISYIRNSTGERGELSCGWVFLKLFDASGVPIPAKTYELFLNGGTPYEKGIEVDPSISRRAHGSVFYQIMTMRRQPQLLVKLRSLNRRSRNVLSLLPETLIGNMCSIHLLIFYRQILGDVLLKDRMSLQSTDLISHPMLATFPMLLEQPDVMDALRSSWAGKESTLKRSEKRDKEFLKSTFLLVYHDCVLPLLHSTRLPPFRWAEEETETARWKVITDFLKQNQENQGALQALLSPDGVHEPFDLSEQTYDFLGEMRKNAV

SEQ ID NO: 843476 - protein, 744 aa, Homo sapiens; identical to SEQ ID NO: 843473

SEQ ID NO: 843477 - protein, 661 aa, Homo sapiens
GNWSNQSTAAREMLARRQRDPLQALRRRNQELKQQVDSLLSESQLKEALEPNKRQHIYQRCIQLKQAIDENKNALQKLSKADESAPVANYNQRKEEEHTLLDKLTQQLQGLAVTISRENITEVGAPTEEEEESESEDSEDSGGEEEDAEEEEEEKEENESHKWSTGEEYIAVGDFTAQQVGDLTFKKGEILLVIEKKPDGWWIAKDAKGNEGLVPRTYLEPYSEEEEGQESSEEGSEEDVEAVDETADGAEVKQRTDPHWSAVQKAISEAGIFCLVNHVSFCYLIVLMRNRMETVEDTNGSETGFRAWNVQSRGRIFLVSKPVLQINTVDVLTTMGAIPAGFRPSTLSQLLEEGNQFRANYFLQPELMPSQLAFRDLMWDATEGTIRSRPSRISLILTLWSCKMIPLPGMSIQVLSRHVRLCLFDGNKVLSNIHTVRATWQPKKPKTWTFSPQVTRILPCLLDGDCFIRSNSASPDLGILFELGISYIRNSTGERGELSCGWVFLKLFDASGVPIPAKTYELFLNGGTPYEKGIEVDPSISRRAHGSVFYQIMTMRRQPQLLVKLRSLNRRSRNVLSLLPETLIGNMCSIHLLIFYRQILGDVLLKDRMSLQSTDLISHPMLATFPMLLEQPDVMDALRSSWAGKESTLKRSEKVKYESPH

SEQ ID NO: 843478 - protein, 481 aa, Homo sapiens
GNWSNQSTAAREMLARRQRDPLQALRRRNQELKQQVDSLLSESQLKEALEPNKRQHIYQRCIQLKQAIDENKNALQKLSKADESAPVANYNQRKEEEHTLLDKLTQQLQGLAVTISRENITEVGAPTEEEEESESEDSEDSGGEEEDAEEEEEEKEENESHKWSTGEEYIAVGDFTAQQVGDLTFKKGEILLVIEKKPDGWWIAKDAKGNEGLVPRTYLEPYSEEEEGQESSEEGSEEDVEAVDETADGAEVKQRTDPHWSAVQKAISEAGIFCLVNHVSFCYLIVLMRNRMETVEDTNGSETGFRAWNVQSRGRIFLVSKPVLQINTVDVLTTMGAIPAGFRPSTLSQLLEEGNQFRANYFLQPELMPSQLAFRDLMWDATEGTIRSRPSRISLILTLWSCKMIPLPGMSIQVLSRHVRLCLFDGNKVRLLRSKSIHTRIMEKHSLRFFSIQLLPNSQESIFYLVPKKNLNDSLKNSFFK

SEQ ID NO: 843479 - protein, 133 aa, Homo sapiens
GNWSNQSTAAREMLARRQRDPLQALRRRNQELKQQVDSLLSESQLKEALEPNKRQHIYQRCIQLKQAIDENKNALQKLSKADESAPVANYNQRKEEEHTLLDKLTQQLQGLAVTISRENITEYASFLPFFFLF

SEQ ID NO: 843480 - protein, 779 aa, Homo sapiens
GNWSNQSTAAREMLARRQRDPLQALRRRNQELKQQVDSLLSESQLKEALEPNKRQHIYQRCIQLKQAIDENKNALQKLSKADESAPVANYNQRKEEEHTLLDKLTQQLQGLAVTISRENITEVGAPTEEEEESESEDSEDSGGEEEDAEEEEEEKEENESHKWSTGEEYIAVGDFTAQQVGDLTFKKGEILLVIEKKPDGWWIAKDAKGNEGLVPRTYLEPYSEEEEGQESSEEGSEEDVEAVDETADGAEVKQRTDPHWSAVQKAISEAGIFCLVNHVSFCYLIVLMRNRMETVEDTNGSETGFRAWNVQSRGRIFLVSKPVLQINTVDVLTTMGAIPAGFRPSTLSQLLEEGNQFRANYFLQPELMPSQLAFRDLMWDATEGTIRSRPSRISLILTLWSCKMIPLPGMSIQVLSRHVRLCLFDGNKVLSNIHTVRATWQPKKPKTWTFSPQVTRILPCLLDGDCFIRSNSASPDLGILFELGISYIRNSTGERGELSCGWVFLKLFDASGVPIPAKTYELFLNGGTPYEKGIEVDPSISRRAHGSVFYQIMTMRRQPQLLVKLRSLNRRSRNVLSLLPETLIGNMCSIHLLIFYRQILGDVLLKDRMSLQSTDLISHPMLATFPMLLEQPDVMDALRSSWAGKESTLKRSEKLSKPVSPREGKKKWPELYHILKTMHCSCLPCYKIMRDKEFLKSTFLLVYHDCVLPLLHSTRLPPFRWAEEETETARWKVITDFLKQNQENQGALQALLSPDGVHEPFDLSEQTYDFLGEMRKNAV

SEQ ID NO: 843481 - protein, 697 aa, Homo sapiens
GNWSNQSTAAREMLARRQRDPLQALRRRNQELKQQVDSLLSESQLKEALEPNKRQHIYQRCIQLKQAIDENKNALQKLSKADESAPVANYNQRKEEEHTLLDKLTQQLQGLAVTISRENITEVGAPTEEEEESESEDSEDSGGEEEDAEEEEEEKEENESHKWSTGEEYIAVGDFTAQQVGDLTFKKGEILLVIEKKPDGWWIAKDAKGNEGLVPRTYLEPYSEEEEGQESSEEGSEEDVEAVDETADGAEVKQRTDPHWSAVQKAISEAGIFCLVNHVSFCYLIVLMRNRMETVEDTNGSETGFRAWNVQSRGRIFLVSKPVLQINTVDVLTTMGAIPAGFRPSTLSQLLEEGNQFRANYFLQPELMPSQLAFRDLMWDATEGTIRSRPSRISLILTLWSCKMIPLPGMSIQVLSRHVRLCLFDGNKVLSNIHTVRATWQPKKPKTWTFSPQVTRILPCLLDGDCFIRSNSASPDLGILFELGISYIRNSTGERGELSCGWVFLKLFDASGVPIPAKTYELFLNGGTPYEKGIEVDPSISRRAHGSVFYQIMTMRRQPQLLVKLRSLNRRSRNVLSLLPETLIGNMCSIHLLIFYRQILGDVLLKDRMSLQSTDLISHPMLATFPMLLEQPDVMDALRSSWAGKESTLKRSEKLSKPVSPREGKKKWPELYHILKTMHCSCLPCYKIMVITNPNLL

SEQ ID NO: 843482 - protein, 341 aa, Homo sapiens
GNWSNQSTAAREMLARRQRDPLQALRRRNQELKQQVDSLLSESQLKEALEPNKRQHIYQRCIQLKQAIDENKNALQKLSKADESAPVANYNQRKEEEHTLLDKLTQQLQGLAVTISRENITEVGAPTEEEEESESEDSEDSGGEEEDAEEEEEEKEENESHKWSTGEEYIAVGDFTAQQVGDLTFKKGEILLVIEKKPDGWWIAKDAKGNEGLVPRTYLEPYSEEEEGQESSEEGSEEDVEAVDETADGAEVKQRTDPHWSAVQKAISEAGIFCLVNHVSFCYLIVLMRNRMETVEDTNGSETGFRAWNVQSRGRIFLVSKPVLQVTFLISFFFFLYKKNR

SEQ ID NO: 843483 - protein, 156 aa, Homo sapiens
GASDKGELVVLKLLFSPTAQVCPLPPMVSHGDFVCHPRPCERYNHGTVVEFYCDPGYSLTSDYKYITCQYGEWFPSYQVYCIKSEQTWPSTHETLLTTWKIVAFTATSVLLVLLLVILARMFQTKFKAHFPPRGPPRSSSSDPDFVVVDGVPVMLP

SEQ ID NO: 843484 - protein, 349 aa, Homo sapiens
MAGGRCGPQLTALLAAWIAAVAATAGPEEAALPPEQSRVQPMTASNWTLVMEGEWMLKFYAPWCPSCQQTDSEWEAFAKNGEILQISVGKVDVIQEPGLSGRFFVTTLPAFFHAKDGIFRRYRGPGIFEDLQNYILEKKWQSVEPLTGWKSPASLTMSGMAGLFSISGKIWHLHNYFTVTLGIPAWCSYVFFVIATLVFGLFMGLVLVVISECFYVPLPRHLSERSEQNRRSEEAHRAEQLQDAEEEKDDSNEEENKDSLVDDEEEKEDLGDEDEAEEEEEEDNLAAGVDEERSEANDQGPPGEDGVTREEVEPEEAEEGISEQPCPADTEVVEDSLRQRKSQHADKGL

SEQ ID NO: 843485 - protein, 349 aa, Homo sapiens; identical to SEQ ID NO: 843484

SEQ ID NO: 843486 - protein, 349 aa, Homo sapiens; identical to SEQ ID NO: 843484

SEQ ID NO: 843487 - protein, 349 aa, Homo sapiens; identical to SEQ ID NO: 843484

SEQ ID NO: 843488 - protein, 349 aa, Homo sapiens; identical to SEQ ID NO: 843484

SEQ ID NO: 843489 - protein, 349 aa, Homo sapiens; identical to SEQ ID NO: 843484

SEQ ID NO: 843490 - protein, 349 aa, Homo sapiens; identical to SEQ ID NO: 843484

SEQ ID NO: 843491 - protein, 321 aa, Homo sapiens
MAGGRCGPQLTALLAAWIAAVAATAGPEEAALPPEQSRVQPMTASNWTLVMEGEWMLKFYAPWCPSCQQTDSEWEAFAKNGEILQISVGKVDVIQEPGIFEDLQNYILEKKWQSVEPLTGWKSPASLTMSGMAGLFSISGKIWHLHNYFTVTLGIPAWCSYVFFVIATLVFGLFMGLVLVVISECFYVPLPRHLSERSEQNRRSEEAHRAEQLQDAEEEKDDSNEEENKDSLVDDEEEKEDLGDEDEAEEEEEEDNLAAGVDEERSEANDQGPPGEDGVTREEVEPEEAEEGISEQPCPADTEVVEDSLRQRKSQHADKGL

SEQ ID NO: 843492 - protein, 349 aa, Homo sapiens; identical to SEQ ID NO: 843484

SEQ ID NO: 843493 - protein, 155 aa, Homo sapiens
WPAGRASGDKRWRPPRHCEHRQSAPLGVGGVALASPASLKNPAGERGCGPAAALPHTPRREASLGAQHGGWALRPAANGAPGRLDRGCGGDGRPRGGRAAAGAEPGPAHDRLQLDAGDGGRVDAEIIQICIGRERTFSDIHVQYEYVAQAKQVTC

SEQ ID NO: 843494 - protein, 101 aa, Homo sapiens
TRHTAHAHIIALHSRLAHEHTHKDTAHTCTHSGTHAHTYTHTHIHTCSCVYTCPYTPHRCTYTHVFMHIRACPRAHPYRYIHTLIHVHVSTCVSTYMTMSP

SEQ ID NO: 843495 - protein, 134 aa, Homo sapiens
VLQLLPEATYKQPCHVATQHWSCHTHAQSYMSTHTCTRVPKHACTYMAVLIHVCTHTHASMHIHAHTHAHTYTHTHIHTCSCVYTCPYTPHRCTYTHVFMHIRACPRAHPYRYIHTLIHVHVSTCVSTYMTMSP

SEQ ID NO: 843496 - protein, 115 aa, Homo sapiens
VWPSEQGARELGDEDGSHFLFLNKNHMVGVCVYKRGSSVGASSPSTLWFQFPVLSRTRAQEAKAGRERVPTGPLGMSWLWTFLPCSPIRAPLQETGRMPLPTPQSLRQAEWIRLR

SEQ ID NO: 843497 - protein, 71 aa, Homo sapiens
GSEDYAEITLKDSQTIPGGGSSLNLFFPRSKPLSSDVLGMGSDWQKLISSQWEPTELSRVPRKKTGAISQS

SEQ ID NO: 843498 - protein, 115 aa, Homo sapiens; identical to SEQ ID NO: 843496

SEQ ID NO: 843499 - protein, 393 aa, Homo sapiens
MEALGPGGDRASPASSTSSLDLWHLSMRADSAYSSFSAASGGPEPRTQSPGTDLLPYLDWDYVRVVWGGPGPAPPDAALCTSPRPRPAVAARSGPQPTEVPGTPGPLNRQATPLLYALAAEAEAAAQAAEPPSPPASRAAYRQRLQGAQRRVLRETSFQRKELRMSLPARLRPTVPARPPATHPRSASLSHPGGEGEPARSRAPAPGTAGRGPLANQQRKWCFSEPGKLDRVGRGGGPARECLGEACSSSGLPGPEPLEFQHPALAKFEDHEVGWLPETQPQGSMNLDSGSLKLGDAFRPASRSRSASGEVLGSWGGSGGTIPIVQAVPQGAETPRPLFQTKLSRFLPQKEAAVMYPAELPQSSPADSEQRVSEKTEEHLRCKAAYFFFNKNC

SEQ ID NO: 843500 - protein, 627 aa, Homo sapiens
MEALGPGGDRASPASSTSSLDLWHLSMRADSAYSSFSAASGGPEPRTQSPGTDLLPYLDWDYVRVVWGGPGPAPPDAALCTSPRPRPAVAARSGPQPTEVPGTPGPLNRQATPLLYALAAEAEAAAQAAEPPSPPASRAAYRQRLQGAQRRVLRETSFQRKELRMSLPARLRPTVPARPPATHPRSASLSHPGGEGEPARSRAPAPGTAGRGPLANQQRKWCFSEPGKLDRVGRGGGPARECLGEACSSSGLPGPEPLEFQHPALAKFEDHEVGWLPETQPQGSMNLDSGSLKLGDAFRPASRSRSASGEVLGSWGGSGGTIPIVQAVPQGAETPRPLFQTKLSRFLPQKEAAVMYPAELPQSSPADSEQRVSETCIVPAWLPSLPDEVFLEEAPLVRMRSPPDPHASQGPPASVHASDQPYGTGLGQRTGQVTVPTEYPLHECPGTAGADDCWQGVNGSVGISRPTSHTPTGTANDNIPTIDPTGLTTNPPTAAESDLLKPVPADALGLSGNDTPGPSHNTALARGTGQPGSRPTWPSQCLEELVQELARLDPSLCDPLASQPSPEPPLGLLDGLIPLAEVRAAMRPACGEAGEEAASTFEPGSYQFTSPVWRSSERQGETCPPPC

SEQ ID NO: 843501 - protein, 107 aa, Homo sapiens
MPSGPPVGVGALQAKSWVPGEDQEGPYPLSRYGSQEMQAGEGSIWETKLEPHFSRLFTLPGCSPRSRNPQTIVSDQTFQVRDTDHSGPSWGEAACIAFAQKMKGLPT

SEQ ID NO: 843502 - protein, 490 aa, Homo sapiens
MEALGPGGDRASPASSTSSLDLWHLSMRADSAYSSFSAASGGPEPRTQSPGTDLLPYLDWDYVRVVWGGPGPAPPDAALCTSPRPRPAVAARSGPQPTEVPGTPGPLNRQATPLLYALAAEAEAAAQAAEPPSPPASRAAYRQRLQGAQRRVLRETSFQRKELRMSLPARLRPTVPARPPATHPRSASLSHPGGEGEPARSRAPAPGTAGRGPLANQQRKWCFSEPGKLDRVGRGGGPARECLGEACSSSGLPGPEPLEFQHPALAKFEDHEVGWLPETQPQGSMNLDSGSLKLGDAFRPASRSRSASGEVLGSWGGSGGTIPIVQAVPQGAETPRPLFQTKLSRFLPQKEAAVMYPAELPQSSPADSEQRVSETCIVPAWLPSLPDEVFLEEAPLVRMRSPPDPHASQGPPASVHASDQPYGTGLGQRTGQVTVPTEYPLHECPGTAGADDCWQGVNGSLQRVTSSNLSQLMPWDFQAMILQVPLTILP

SEQ ID NO: 843503 - protein, 644 aa, Homo sapiens
MEIPAPEPEKTALSSQDPALSLKENLEDISGWGLPEARSKESVSFKDVAVDFTQEEWGQLDSPQRALYRDVMLENYQNLLALGPPLHKPDVISHLERGEEPWSMQREVPRGPCPEWELKAVPSQQQGICKEEPAQEPIMERPLGGAQAWGRQAGALQRSQAAPWAPAPAMVWDVPVEEFPLRCPLFAQQRVPEGGPLLDTRKNVQATEGRTKAPARLCAGENASTPSEPEKFPQVRRQRGAGAGEGEFVCGECGKAFRQSSSLTLHRRWHSREKAYKCDECGKAFTWSTNLLEHRRIHTGEKPFFCGECGKAFSCHSSLNVHQRIHTGERPYKCSACEKAFSCSSLLSMHLRVHTGEKPYRCGECGKAFNQRTHLTRHHRIHTGEKPYQCGSCGKAFTCHSSLTVHEKIHSGDKPFKCSDCEKAFNSRSRLTLHQRTHTGEKPFKCADCGKGFSCHAYLLVHRRIHSGEKPFKCNECGKAFSSHAYLIVHRRIHTGEKPFDCSQCWKAFSCHSSLIVHQRIHTGEKPYKCSECGRAFSQNHCLIKHQKIHSGEKSFKCEKCGEMFNWSSHLTEHQRLHSEGKPLAIQFNKHLLSTYYVPGSLLGAGDAGLRDVDPIDALDVAKLLCVVPPRAGRNFSLGSKPRN

SEQ ID NO: 843504 - protein, 121 aa, Homo sapiens
MEIPAPEPEKTGIGEFQGCGCGLHPGGVGSTRLPSEGLVPGCDVGELPEPSCPRTSTAQARCDLSSGTRRGAMEHAEGSPQRALSRDRISLCHPGWSVVPQSQLTAASNLWAQVILPQPPE

SEQ ID NO: 843505 - protein, 573 aa, Homo sapiens
MLENYQNLLALGPPLHKPDVISHLERGEEPWSMQREVPRGPCPEWELKAVPSQQQGICKEEPAQEPIMERPLGGAQAWGRQAGALQRSQAAPWAPAPAMVWDVPVEEFPLRCPLFAQQRVPEGGPLLDTRKNVQATEGRTKAPARLCAGENASTPSEPEKFPQVRRQRGAGAGEGEFVCGECGKAFRQSSSLTLHRRWHSREKAYKCDECGKAFTWSTNLLEHRRIHTGEKPFFCGECGKAFSCHSSLNVHQRIHTGERPYKCSACEKAFSCSSLLSMHLRVHTGEKPYRCGECGKAFNQRTHLTRHHRIHTGEKPYQCGSCGKAFTCHSSLTVHEKIHSGDKPFKCSDCEKAFNSRSRLTLHQRTHTGEKPFKCADCGKGFSCHAYLLVHRRIHSGEKPFKCNECGKAFSSHAYLIVHRRIHTGEKPFDCSQCWKAFSCHSSLIVHQRIHTGEKPYKCSECGRAFSQNHCLIKHQKIHSGEKSFKCEKCGEMFNWSSHLTEHQRLHSEGKPLAIQFNKHLLSTYYVPGSLLGAGDAGLRDVDPIDALDVAKLLCVVPPRAGRNFSLGSKPRN

SEQ ID NO: 843506 - protein, 573 aa, Homo sapiens; identical to SEQ ID NO: 843505

SEQ ID NO: 843507 - protein, 91 aa, Homo sapiens
LDGRCLFGAVGYTCRKPVTSLPIHEGWLHTLQNICAKELDSLQRTMMPGNHRQATLLTNKATGPARNNSVISTGLEMTQQFHSCTSTRELP

SEQ ID NO: 843508 - protein, 470 aa, Homo sapiens
KSDEKIVIHHKPLRSTWSQLSAVKRKGLSQTVSQEERKRQEAIFEVISSEHSYLLSLEILIRMFKNSKELSDTMTKTERHHLFSNITDVCEASKKFFIELEARHQNNIFIDDISDIVEKHTASTFDPYVKYCTNEVYQQRTLQKLLATNPSFKEVLSRIESHEDCRNLPMISFLILPMQRVTRLPLLMDTICQKTPKDSPKYEVCKRALKEVSKLVRLCNEGARKMERTEMMYTINSQLEFKIKPFPLVSSSRWLVKRGELTAYVEDTVLFSRRTSKQQVYFFLFNDVLIITKKKSEESYNVNDYSLRDQLLVESCDNEELNSSPGKNSSTMLYSRQSSASHLFTLTVLSNHANEKVEMLLGAETQSERARWITALGHSSGKPPADRTSLTQVEIVRSFTAKQPDELSLQVADVVLIYQRVSDGWYEGERLRDGERGWFPMECAKEITCQATIDKNVERMGRLLGLETNV

SEQ ID NO: 843509 - protein, 470 aa, Homo sapiens; identical to SEQ ID NO: 843508

SEQ ID NO: 843510 - protein, 390 aa, Homo sapiens
KSDEKIVIHHKPLRSTWSQLSAVKRKGLSQTVSQEERKRQEAIFEVISSEHSYLLSLEILIRMFKNSKELSDTMTKTERHHLFSNITDVCEASKKFFIELEARHQNNIFIDDISDIVEKHTASTFDPYVKYCTNEVYQQRTLQKLLATNPSFKEVLSRIESHEDCRNLPMISFLILPMQRVTRLPLLMDTICQKTPKDSPKYEVCKRALKEVSKLVRLCNEGARKMERTEMMYTINSQLEFKIKPFPLVSSSRWLVKRGELTAYVEDTVLFSRRTSKQQVYFFLFNDVLIITKKKSEESYNVNDYSLRDQLLVESCDNEELNSSPGKNSSTMLYSRQSSASHLFTLTVLSNHANEKVEMLLGAETQSERARWITALGHSSGKPPADRTCG

SEQ ID NO: 843511 - protein, 390 aa, Homo sapiens; identical to SEQ ID NO: 843510

SEQ ID NO: 843512 - protein, 470 aa, Homo sapiens; identical to SEQ ID NO: 843508

SEQ ID NO: 843513 - protein, 470 aa, Homo sapiens; identical to SEQ ID NO: 843508

SEQ ID NO: 843514 - protein, 119 aa, Homo sapiens
MQLSGHKPRRHPDSSVHSSHSSPGSKFFPLALANTHILNLTASPTITSLLGSLRSLLTPLCSCTVTLRQSLCNENGLIADHSHSLAPTPHGFPFQRTNSPLLTRSYRLPFMWPLPNSAT

SEQ ID NO: 843515 - protein, 229 aa, Homo sapiens
MAIHYSRQTALESTSYIQLPEAELRMERMLPLLALGLLAAGFCPAVLCHPNSPLDEENLTQENQDRGTHVDLGLASANVDFAFSLYKQLVLKAPDKNVIFSPLSISTALAFLSLGAHNTTLTEILKGLKFNLTETSEAEIHQSFQHLLRTLNQSSDELQLSMGNAMFVKEQLSLLDRFTEDAKRLYGSEAFATDFQDSAAAKKLINDYVKNGTRGENHRSDQGTLTRRQ

SEQ ID NO: 843516 - protein, 215 aa, Homo sapiens
MYFRLCGPHEGRFFFLTSSSASSSSSLSSSFFLQLRDEELSCTVVELKYTGNASALFILPDQDKMEEVEAMLLPETLKRWRDSLEFREIGELYLPKFSISRDYNLNDILLQLGIEEAFTSKADLSGITGARNLAVSQVVHKAVLDVFEEGTEASAATAVKITLLSALVETRTIVRFNRPFLMIIVPTDTQNIFFMSKVTNPKASLELAIKQWGSQ

SEQ ID NO: 843517 - protein, 117 aa, Homo sapiens
MAIHYSRQTALESTSYIQLPEAELRMERMLPLLALGLLAAGFCPAVLCHPNSPLDEENLTQENQDRGTHVDLGLASANVDFAFSLYKQWSIRLCLMYLRRAQKHLLPQQSKSPSFLH

SEQ ID NO: 843518 - protein, 131 aa, Homo sapiens
RRSRGSRRSPIRDEELSCTVVELKYTGNASALFILPDQDKMEEVEAMLLPETLKRWRDSLEFREIGELYLPKFSISRDYNLNDILLQLGIEEAFTSKADLSGITGARNLAVSQSIRLCLIYFEETRQFGRL

SEQ ID NO: 843519 - protein, 229 aa, Homo sapiens; identical to SEQ ID NO: 843515

SEQ ID NO: 843520 - protein, 229 aa, Homo sapiens; identical to SEQ ID NO: 843515

SEQ ID NO: 843521 - protein, 229 aa, Homo sapiens; identical to SEQ ID NO: 843515

SEQ ID NO: 843522 - protein, 228 aa, Homo sapiens
GRVGRPTRPWNPPGYIQLPEAELRMERMLPLLALGLLAAGFCPAVLCHPNSPLDEENLTQENQDRGTHVDLGLASANVDFAFSLYKQLVLKAPDKNVIFSPLSISTALAFLSLGAHNTTLTEILKGLKFNLTETSEAEIHQSFQHLLRTLNQSSDELQLSMGNAMFVKEQLSLLDRFTEDAKRLYGSEAFATDFQDSAAAKKLINDYVKNGTRGENHRSDQGTLTRRQ

SEQ ID NO: 843523 - protein, 229 aa, Homo sapiens; identical to SEQ ID NO: 843515

SEQ ID NO: 843524 - protein, 229 aa, Homo sapiens; identical to SEQ ID NO: 843515

SEQ ID NO: 843525 - protein, 229 aa, Homo sapiens; identical to SEQ ID NO: 843515

SEQ ID NO: 843526 - protein, 229 aa, Homo sapiens; identical to SEQ ID NO: 843515

SEQ ID NO: 843527 - protein, 229 aa, Homo sapiens; identical to SEQ ID NO: 843515

SEQ ID NO: 843528 - protein, 229 aa, Homo sapiens; identical to SEQ ID NO: 843515

SEQ ID NO: 843529 - protein, 183 aa, Homo sapiens
MAIHYSRQTALESTSYIQLPEAELRMERMLPLLALGLLAAGFCPAVLCHPNSPLDEENLTQENQDRGTHVDLGLASANVDFAFSLYKQLVLKAPDKNVIFSPLSISTALAFLSLGAHNTTLTEILKGLKFNLTETSEAEIHQSFQHLLRTLNQSTKKLINDYVKNGTRGENHRSDQGTLTRRQ

SEQ ID NO: 843530 - protein, 241 aa, Homo sapiens
MAIHYSRQTALESTSYIQLPEAELRMERMLPLLALGLLAAGFCPAVLCHPNSPLDEENLTQENQDRGTHVDLGLASANVDFAFSLYKQLVLKAPDKNVIFSPLSISTALAFLSLGAHNTTLTEILKGLKFNLTETSEAEIHQSFQHLLRTLNQSSDELQLSMGNAMFVKEQLSLLDRFTEDAKRLYGSEAFATDFQDSAAAKKLINDYVKNGTRGEAKWEMPFEPPRYSSVKVLLEARKSG

SEQ ID NO: 843531 - protein, 229 aa, Homo sapiens; identical to SEQ ID NO: 843515

SEQ ID NO: 843532 - protein, 190 aa, Homo sapiens
RAAGIGTRQVRDEELSCTVVELKYTGNASALFILPDQDKMEEVEAMLLPETLKRWRDSLEFREIGELYLPKFSISRDYNLNDILLQLGIEEAFTSKADLSGITGARNLAVSQVVHKAVLDVFEEGTEASAATAVKITLLSALVETRTIVRFNRPFLMIIVPTDTQNIFFMSKVTNPKASLELAIKQWGSQ

SEQ ID NO: 843533 - protein, 191 aa, Homo sapiens
RRSRGSRRSPIRDEELSCTVVELKYTGNASALFILPDQDKMEEVEAMLLPETLKRWRDSLEFREIGELYLPKFSISRDYNLNDILLQLGIEEAFTSKADLSGITGARNLAVSQVVHKAVLDVFEEGTEASAATAVKITLLSALVETRTIVRFNRPFLMIIVPTDTQNIFFMSKVTNPKASLELAIKQWGSQ

SEQ ID NO: 843534 - protein, 229 aa, Homo sapiens; identical to SEQ ID NO: 843515

SEQ ID NO: 843535 - protein, 287 aa, Homo sapiens
MAIHYSRQTALESTSYIQLPEAELRMERMLPLLALGLLAAGFCPAVLCHPNSPLDEENLTQENQDRGTHVDLGLASANVDFAFSLYKQLVLKAPDKNVIFSPLSISTALAFLSLGAHNTTLTEILKGLKFNLTETSEAEIHQSFQHLLRTLNQSSDELQLSMGNAMFVKEQLSLLDRFTEDAKRLYGSEAFATDFQDSAAAKKLINDYVKNGTRGEPEAVERLSGVQVILPGPQRPHISPRQGLTNVQGQGHGGGRTHTGTGGIYTYFALCCLHGFGLDFSFSSLRQ

SEQ ID NO: 843536 - protein, 193 aa, Homo sapiens
PGCRNWHEARVGNGAHDEFASPDYTLLPGRVRDEELSCTVVELKYTGNASALFILPDQDKMEEVEAMLLPETLKRWRDSLEFREIGELYLPKFSISRDYNLNDILLQLGIEEAFTSKADLSGITGARNLAVSQVVHKAVLDVFEEGTEASAATAVRPFLMIIVPTDTQNIFFMSKVTNPKASLELAIKQWGSQ

SEQ ID NO: 843537 - protein, 151 aa, Homo sapiens
PTKLFIAVRRPRTLQTEESMGPCACESYTGNRCHLPRISRQGHTCHGHSVHRGQAVPRHPEHLLHEQSHQSQSKPRACHQAVGLSVRNLECKLDAWVSGHSLAPVHRVAMACVALSAYPWKVTAIPCVALTCTGAHGLFSLEGPGPPDSNK

SEQ ID NO: 843538 - protein, 103 aa, Homo sapiens
MAIHYSRQTALESTSYIQLPEAELRMERMLPLLALGLLAAGFCPAVLCHPNSPLDEENLTQENQDRGTHVDLGLASANVDFAFSLYKQLVLKAPDKNVIFSLS

SEQ ID NO: 843539 - protein, 152 aa, Homo sapiens
MEEVEAMLLPETLKRWRDSLEFREIGELYLPKFSISRDYNLNDILLQLGIEEAFTSKADLSGITGARNLAVSQVVHKAVLDVFEEGTEASAATAVKITLLSALVETRTIVRFNRPFLMIIVPTDTQNIFFMSKVTNPAAIAASAWASEDLMS

SEQ ID NO: 843540 - protein, 204 aa, Homo sapiens
MERMLPLLALGLLAAGFCPAVLCHPNSPLDEENLTQENQDRGTHVDLGLASANVDFAFSLYKQLVLKAPDKNVIFSPLSISTALAFLSLGAHNTTLTEILKGLKFNLTETSEAEIHQSFQHLLRTLNQSSDELQLSMGNAMFVKEQLSLLDRFTEDAKRLYGSEAFATDFQDSAAAKKLINDYVKNGTRGENHRSDQGTLTRRQ

SEQ ID NO: 843541 - protein, 74 aa, Homo sapiens
VGWWGRQSHNCVSGERAWWHPNSPLDEENLTQENQDRGTHVDLGLASANVDFAFSLYKQLVLKAPDKNVIFSLS

SEQ ID NO: 843542 - protein, 229 aa, Homo sapiens; identical to SEQ ID NO: 843515

SEQ ID NO: 843543 - protein, 229 aa, Homo sapiens; identical to SEQ ID NO: 843515

SEQ ID NO: 843544 - protein, 204 aa, Homo sapiens; identical to SEQ ID NO: 843540

SEQ ID NO: 843545 - protein, 229 aa, Homo sapiens; identical to SEQ ID NO: 843515

SEQ ID NO: 843546 - protein, 197 aa, Homo sapiens
IHGNPLLQTDGFGIHQHPNSPLDEENLTQENQDRGTHVDLGLASANVDFAFSLYKQLVLKAPDKNVIFSPLSISTALAFLSLGAHNTTLTEILKGLKFNLTETSEAEIHQSFQHLLRTLNQSSDELQLSMGNAMFVKEQLSLLDRFTEDAKRLYGSEAFATDFQDSAAAKKLINDYVKNGTRGENHRSDQGTLTRRQ

SEQ ID NO: 843547 - protein, 229 aa, Homo sapiens; identical to SEQ ID NO: 843515

SEQ ID NO: 843548 - protein, 151 aa, Homo sapiens
MEEVEAMLLPETLKRWRDSLEFREIGELYLPKFSISRDYNLNDILLQLGIEEAFTSKADLSGITGARNLAVSQVVHKAVLDVFEEGTEASAATAVKITLLSALVETRTIVRFNRPFLMIIVPTDTQNIFFMSKVTNPKASLELAIKQWGSQ

SEQ ID NO: 843549 - protein, 151 aa, Homo sapiens; identical to SEQ ID NO: 843548

SEQ ID NO: 843550 - protein, 229 aa, Homo sapiens; identical to SEQ ID NO: 843515

SEQ ID NO: 843551 - protein, 232 aa, Homo sapiens
SNCLLHLQPNGRCPLNPQDTHQSRFYLRQEKVGNGAHDEFASPDYTLLPGRVRDEELSCTVVELKYTGNASALFILPDQDKMEEVEAMLLPETLKRWRDSLEFREIGELYLPKFSISRDYNLNDILLQLGIEEAFTSKADLSGITGARNLAVSQVVHKAVLDVFEEGTEASAATAVKITLLSALVETRTIVRFNRPFLMIIVPTDTQNIFFMSKVTNPKASLELAIKQWGSQ

SEQ ID NO: 843552 - protein, 223 aa, Homo sapiens
PTKLFIAVRRPRTLQTEESMGPCACESYTGNRCHLPRISRQGLRDEELSCTVVELKYTGNASALFILPDQDKMEEVEAMLLPETLKRWRDSLEFREIGELYLPKFSISRDYNLNDILLQLGIEEAFTSKADLSGITGARNLAVSQVVHKAVLDVFEEGTEASAATAVKITLLSALVETRTIVRFNRPFLMIIVPTDTQNIFFMSKVTNPKASLELAIKQWGSQ

SEQ ID NO: 843553 - protein, 223 aa, Homo sapiens
MAIHYSRQTALESTSYIQLPEAELRMERMLPLLALGLLAAGFCPAVLCHPNSPLDEENLTQENQDRGTHVDLGLASANVDFAFSLYKQLVLKAPDKNVIFSPLSISTALAFLSLGAHNTTLTEILKGLKFNLTETSEAEIHQSFQVVHKAVLDVFEEGTEASAATAVKITLLSALVETRTIVRFNRPFLMIIVPTDTQNIFFMSKVTNPKASLELAIKQWGSQ

SEQ ID NO: 843554 - protein, 111 aa, Homo sapiens
KLELAISSGALSKELGMQAGCLGLWARIPEQSPVVHKAVLDVFEEGTEASAATAVKITLLSALVETRTIVRFNRPFLMIIVPTDTQNIFFMSKVTNPKASLELAIKQWGSQ

SEQ ID NO: 843555 - protein, 168 aa, Homo sapiens
MAIHYSRQTALESTSYIQLPEAELRMERMLPLLALGLLAAGFCPAVLCHPNSPLDEENLTQENQDRGTHVDLGLASANVDFAFSLYKQLVLKAPDKNVIFSPLSISTALAFLSLGAHNTTLTEILKGLKFNLTETSEAEIHQSFQGTWPSFAARWSSTTWTEPTQHNL

SEQ ID NO: 843556 - protein, 121 aa, Homo sapiens
MAIHYSRQTALESTSYIQLPEAELRMERMLPLLALGLLAAGFCPAVLCHPNSPLDEENLTQENQDRGSRRQKAERRKQQLAEEEARRPRGEDGKPVRKGPGKQEEVCVIDALLADIQVSGD

SEQ ID NO: 843557 - protein, 31 aa, Homo sapiens
MPDAGDAGTSCGTACYCLELVSMDLELHRPL

SEQ ID NO: 843558 - protein, 105 aa, Homo sapiens
SGNEGLGGTVRPGLGRRTPGRKNRWEWRSSWEWWGGWGPSCAQIPMRNWSQPPVSPCPSLCRQLWVLPPNMSKPPPSSPVPRPGSCLLPTSGPDTFHPSLLGRPA

SEQ ID NO: 843559 - protein, 136 aa, Homo sapiens
NKTKRIHTASPLHFTQKRNVLGHFLFSTHPQGTKIGSQSPPSSSFPSPLTHRGISGPTDPALPSRGTGPTHPVSLLVTHSTQGTMEGFCALDGNKPHLTFPHLRSHQGPLCPVLTLNVCPGSPLSSLLEIGMAPDR

SEQ ID NO: 843560 - protein, 43 aa, Homo sapiens
MNKLYIGNLSENAAPSDLESIFKDAKIPVSGPFLVKTGYAFVD

SEQ ID NO: 843561 - protein, 40 aa, Homo sapiens
MESFMESLNRLKEIHEKEVLGLQNKLLELNSERCRESGQA

SEQ ID NO: 843562 - protein, 1338 aa, Homo sapiens
KLPTPPPQGPGFAPGDRWCWCSQGGGLAFFGSGCHGGAQARLAGLVFSGLSPAWQRRQAPLGLPVPLCHGDAQPLLPATACHGGTRSSPCRGQPVLLPWLFLVQAAMAALRAYRKKNFGSEAFLCPEVSAALGKMAAAAAVGNAVPCGARPCGVRPDGQPKPGPQPRALLAAGPALIANGDELVAAVWPYRRLALLRRLTVLPFAGLLYPAWLGAAAAGCWGWGSSWVQIPEAALLVLATICLAHALTVLSGHWSVHAHCALTCTPEYDPSKATFVKVVPTPNNGSTELVALHRNEGEDGLEVLSFEFQKIKYSYDALEKKQFLPVAFPVGNAFSYYQSNRGFQEDSEIRAAEKKFGSNKAEMVVPDFSELFKERATAPFFVFQVFCVGLWCLDEYWYYSVFTLSMLVAFEASLVQQQMRNMSEIRKMGNKPHMIQVYRSRKWRPIASDEIVPGDIVSIGRSPQENLVPCDVLLLRGRCIVDEAMLTGESVPQMKEPIEDLSPDRVLDLQADSRLHVIFGGTKVVQHIPPQKATTGLKPVDSGCVAYVLRTGFNTSQGKLLRTILFGVKRVTANNLETFIFILFLLVFAIAAAAYVWIEGTKDPSRNRYKLFLECTLILTSVVPPELPIELSLAVNTSLIALAKLYMYCTEPFRIPFAGKVEVCCFDKTGTLTSDSLVVRGVAGLRDGKEVTPVSSIPVETHRALASCHSLMQLDDGTLVGDPLEKAMLTAVDWTLTKDEKVFPRSIKTQGLKIHQRFHFASALKRMSVLASYEKLGSTDLCYIAAVKGAPETLHSMFSQCPPDYHHIHTEISREGARVLALGYKELGHLTHQQAREVKREALECSLKFVGFIVVSCPLKADSKAVIREIQNASHRVVMITGDNPLTACHVAQELHFIEKAHTLILQPPSEKGRQCEWRSIDGSIVLPLARGSPKALALEYALCLTGDGLAHLQATDPQQLLRLIPHVQVFARVAPKQKEFVITSLKELGYVTLMCGDGTNDVGALKHADVGVALLANAPERVVERRRRPRDSPTLSNSGIRATSRTAKQRSGLPPSEEQPTSQRDRLSQVLRDLEDESTPIVKLGDASIAAPFTSKLSSIQCICHVIKQGRCTLVTTLQMFKILALNALILAYSQSVLYLEGVKFSDFQATLQGLLLAGCFLFISRSKPLKTLSRERPLPNIFNLYTILTVMLQFFVHFLSLVYLYREAQARSPEKQEQFVDLYKEFEPSLVNSTVYIMAMAMQMATFAINYKGPPFMESLPENKPLVWSLAVSLLAIIGLLLGSSPDFNSQFGLVDIPVEFKLVIAQVLLLDFCLALLADRVLQFFLGTPKLKVPS

SEQ ID NO: 843563 - protein, 596 aa, Homo sapiens
KLPTPPPQGPGFAPGDRWCWCSQGGGLAFFGSGCHGGAQARLAGLVFSGLSPAWQRRQAPLGLPVPLCHGDAQPLLPATACHGGTRSSPCRGQPVLLPWLFLVQAAMAALRAYRKENFGSEAFLCPEVSAALGKMAAAAAVGNAVPCGARPCGVRPDGQPKPGPQPRALLAAGPALIANGDELVVPLARGSPKALALEYALCLTGDGLAHLQATDPQQLLRLIPHVQVFARVAPKQKEFVITSLKELGYVTLMCGDGTNDVGALKHADVGVALLANAPERVVERRRRPRDSPTLSNSGIRATSRTAKQRSGLPPSEEQPTSQRDRLSQVLRDLEDESTPIVKLGDASIAAPFTSKLSSIQCICHVIKQGRCTLVTTLQMFKILALNALILAYSQSVLYLEGVKFSDFQATLQGLLLAGCFLFISRSKPLKTLSRERPLPNIFNLYTILTVMLQFFVHFLSLVYLYREAQARSPEKQEQFVDLYKEFEPSLVNSTVYIMAMAMQMATFAINYKGPPFMESLPENKPLVWSLAVSLLAIIGLLLGSSPDFNSQFGLVDIPVEFKLVIAQVLLLDFCLALLADRVLQFFLGTPKLKVPS

SEQ ID NO: 843564 - protein, 110 aa, Homo sapiens
RTSVGACFPVLRRASGEPCHMVLPSLRARQALLRPHVLLGSLFEAACHAQVGGVRVETPYPRGLALGTGWGLVSCRAEMVVPDFSELFKERATAPFFVFQVKQQLWPISP

SEQ ID NO: 843565 - protein, 1361 aa, Homo sapiens
KLPTPPPQGPGFAPGDRWCWCSQGGGLAFFGSGCHGGAQARLAGLVFSGLSPAWQRRQAPLGLPVPLCHGDAQPLLPATACHGGTRSSPCRGQPVLLPWLFLVQAAMAALRAYRKKNFGSEAFLCPEVSAALGKMAAAAAVGNAVPCGARPCGVRPDGQPKPGPQPRALLAAGPALIANGDELVAAVWPYRRLALLRRLTVLPFAGLLYPAWLGAAAAGCWGWGSSWVQIPEAALLVLATICLAHALTVLSGHWSVHAHCALTCTPEYDPSKATFVKVVPTPNNGSTELVALHRNEGEDGLEVLSFEFQKIKYSYDALEKKQFLPVAFPVGNAFSYYQSNRGFQEDSEIRAAEKKFGSNKAEMVVPDFSELFKERATAPFFVFQVFCVGLWCLDEYWYYSVFTLSMLVAFEASLVQQQMRNMSEIRKMGNKPHMIQVYRSRKWRPIASDEIVPGDIVSIGRSPQENLVPCDVLLLRGRCIVDEAMLTGESVPQMKEPIEDLSPDRVLDLQADSRLHVIFGGTKVVQHIPPQKATTGLKPVDSGCVAYVLRTGFNTSQGKLLRTILFGVKRVTANNLETFIFILFLLVFAIAAAAYVWIEGTKDPSRNRYKLFLECTLILTSVVPPELPIELSLAVNTSLIALAKLYMYCTEPFRIPFAGKVEVCCFDKTGTLTSDSLVVRGVAGLRDGKEVTPVSSIPVETHRALASCHSLMQLDDGTLVGDPLEKAMLTAVDWTLTKDEKVFPRSIKTQGLKIHQRFHFASALKRMSVLASYEKLGSTDLCYIAAVKGAPETLHSMFSQCPPDYHHIHTEISREGARVLALGYKELGHLTHQQAREVKREALECSLKFVGFIVVSCPLKADSKAVIREIQNASHRVVMITGDNPLTACHVAQELHFIEKAHTLILQPPSEKGRQCEWRSIDGSIVLPLARGSPKALALEYALCLTGDGLAHLQATDPQQLLRLIPHVQVFARVAPKQKEFVITSLKELGYVTLMCGDGTNDVGALKHADVGVALLANAPERVVERRRRPRDSPTLSNSGIRATSRTAKQRSGLPPSEEQPTSQRVSPKGEVLHPILARADSLLSTLQDRLSQVLRDLEDESTPIVKLGDASIAAPFTSKLSSIQCICHVIKQGRCTLVTTLQMFKILALNALILAYSQSVLYLEGVKFSDFQATLQGLLLAGCFLFISRSKPLKTLSRERPLPNIFNLYTILTVMLQFFVHFLSLVYLYREAQARSPEKQEQFVDLYKEFEPSLVNSTVYIMAMAMQMATFAINYKGPPFMESLPENKPLVWSLAVSLLAIIGLLLGSSPDFNSQFGLVDIPVEFKLVIAQVLLLDFCLALLADRVLQFFLGTPKLKVPS

SEQ ID NO: 843566 - protein, 1338 aa, Homo sapiens; identical to SEQ ID NO: 843562

SEQ ID NO: 843567 - protein, 297 aa, Homo sapiens
MPMQLCLGLSSTPDVMHATPSHDVDRLSQVLRDLEDESTPIVKLGDASIAAPFTSKLSSIQCICHVIKQGRCTLVTTLQMFKILALNALILAYSQSVLYLEGVKFSDFQATLQGLLLAGCFLFISRSKPLKTLSRERPLPNIFNLYTILTVMLQFFVHFLSLVYLYREAQARSPEKQEQFVDLYKEFEPSLVNSTVYIMAMAMQMATFAINYKGPPFMESLPENKPLVWSLAVSLLAIIGLLLGSSPDFNSQFGLVDIPVEFKLVIAQVLLLDFCLALLADRVLQFFLGTPKLKVPS

SEQ ID NO: 843568 - protein, 1338 aa, Homo sapiens; identical to SEQ ID NO: 843562

SEQ ID NO: 843569 - protein, 1278 aa, Homo sapiens
KLPTPPPQGPGFAPGDRWCWCSQGGGLAFFGSGCHGGAQARLAGLVFSGLSPAWQRRQAPLGLPVPLCHGDAQPLLPATACHGGTRSSPCRGQPVLLPWLFLVQAAMAALRAYRKKNFGSEAFLCPEVSAALGKMAAAAAVGNAVPCGARPCGVRPDGQPKPGPQPRALLAAGPALIANGDELVAAVWPYRRLALLRRLTVLPFAGLLYPAWLGAAAAGCWGWGSSWVQIPEAALLVLATICLAHALTVLSGHWSVHAHCALTCTPEYDPSKATFVKVVPTPNNGSTELVALHRNEGEDGLEVLSFEFQKIKYSYDALEKKQFLPVAFPVGNAFSYYQSNRGFQEDSEIRAAEKKFGSNKAEMVVPDFSELFKERATAPFFVFQVFCVGLWCLDEYWYYSVFTLSMLVAFEASLVQQQMRNMSEIRKMGNKPHMIQVYRSRKWRPIASDEIVPGDIVSIGRSPQENLVPCDVLLLRGRCIVDEAMLTGESVPQMKEPIEDLSPDRVLDLQADSRLHVIFGGTKVVQHIPPQKATTGLKPVDSGCVAYVLRTGFNTSQGKLLRTILFGVKRVTANNLETFIFILFLLVFAIAAAAYVWIEGTKDPSRNRYKLFLECTLILTSVVPPELPIELSLAVNTSLIALAKLYMYCTEPFRIPFAGKVEVCCFDKTGTLTSDSLVVRGVAGLRDGKEVTPVSSIPVETHRALASCHSLMQLDDGTLVGDPLEKAMLTAVDWTLTKDEKVFPRSIKTQGLKIHQRFHFASALKRMSVLASYEKLGSTDLCYIAAVKGAPETLHSMFSQCPPDYHHIHTEISREGARVLALGYKELGHLTHQQAREVKREALECSLKFVGFIVVSCPLKADSKAVIREIQNASHRVVMITGDNPLTACHVAQELHFIEKAHTLILQPPSEKGRQCEWRSIDGSIVLPLARGSPKALALEYALCLTGDGLAHLQATDPQQLLRLIPHVQVFARVAPKQKEFVITSLKELGYVTLMCGDGTNDVGALKHADVGVALLANAPERVVERRRRPRDSPTLSNSGIRATSRTAKQRSGLPPSEEQPTSQRDRLSQVLRDLEDESTPIVKLGDASIAAPFTSKLSSIQCICHVIKQGRCTLVTTLQMFKILALNALILAYSQSVLYLEGVKFSDFQATLQGLLLAGCFLFISRSKPLKTLSRERPLPNIFNLYTILTVMLQFFVHFLSLVYLYREAQARSPEKQEQFVDLYKEFEPSLVNSTVYIMAMAMQMATFAINYKVRPGPAQTFTVCPPSPTPKLKVPS

SEQ ID NO: 843570 - protein, 968 aa, Homo sapiens
KLPTPPPQGPGFAPGDRWCWCSQGGGLAFFGSGCHGGAQARLAGLVFSGLSPAWQRRQAPLGLPVPLCHGDAQPLLPATACHGGTRSSPCRGQPVLLPWLFLVQAAMAALRAYRKKNFGSEAFLCPEVSAALGKMAAAAAVGNAVPCGARPCGVRPDGQPKPGPQPRALLAAGPALIANGDELVAAVWPYRRLALLRRLTVLPFAGLLYPAWLGAAAAGCWGWGSSWVQIPEAALLVLATICLAHALTVLSGHWSVHAHCALTCTPEYDPSKATFVKVVPTPNNGSTELVALHRNEGEDGLEVLSFEFQKIKYSYDALEKKQFLPVAFPVGNAFSYYQSNRGFQEDSEIRAAEKKFGSNKAEMVVPDFSELFKERATAPFFVFQVFCVGLWCLDEYWYYSVFTLSMLVAFEASLVQQQMRNMSEIRKMGNKPHMIQVYRSRKWRPIASDEIVPGDIVSIGRSPQENLVPCDVLLLRGRCIVDEAMLTGESVPQMKEPIEDLSPDRVLDLQADSRLHVIFGGTKVVQHIPPQKATTGLKPVDSGCVAYVLRTGFNTSQGKLLRTILFGVKRVTANNLETFIFILFLLVFAIAAAAYVWIEGTKDPSRNRYKLFLECTLILTSVVPPELPIELSLAVNTSLIALAKLYMYCTEPFRIPFAGKVEVCCFDKTGTLTSDSLVVRGVAGLRDGKEVTPVSSIPVETHRALASCHSLMQLDDGTLVGDPLEKAMLTAVDWTLTKDEKVFPRSIKTQGLKIHQRFHFASALKRMSVLASYEKLGSTDLCYIAAVKGAPETLHSMFSQCPPDYHHIHTEISREGARVLALGYKELGHLTHQQVRAQAPPAFTMCLARQLLPESPPVSHSARLNGCDFVLLAPPPASTFGDSKWHSVCPLLWGPTQSWLTQSTRRAYLPQSWCVPSSTLLPWSWAGLGGILSPLTHPSSTKPTLRLHHRHICRLASSWALVLSACTL

SEQ ID NO: 843571 - protein, 1086 aa, Homo sapiens
MEKWEELNSHQPGEEYDPSKATFVKVVPTPNNGSTELVALHRNEGEDGLEVLSFEFQKIKYSYDALEKKQFLPVAFPVGNAFSYYQSNRGFQEDSEIRAAEKKFGSNKAEMVVPDFSELFKERATAPFFVFQVFCVGLWCLDEYWYYSVFTLSMLVAFEASLVQQQMRNMSEIRKMGNKPHMIQVYRSRKWRPIASDEIVPGDIVSIGRSPQENLVPCDVLLLRGRCIVDEAMLTGESVPQMKEPIEDLSPDRVLDLQADSRLHVIFGGTKVVQHIPPQKATTGLKPVDSGCVAYVLRTGFNTSQGKLLRTILFGVKRVTANNLETFIFILFLLVFAIAAAAYVWIEGTKDPSRNRYKLFLECTLILTSVVPPELPIELSLAVNTSLIALAKLYMYCTEPFRIPFAGKVEVCCFDKTGTLTSDSLVVRGVAGLRDGKEVTPVSSIPVETHRALASCHSLMQLDDGTLVGDPLEKAMLTAVDWTLTKDEKVFPRSIKTQGLKIHQRFHFASALKRMSVLASYEKLGSTDLCYIAAVKGAPETLHSMFSQCPPDYHHIHTEISREGARVLALGYKELGHLTHQQAREVKREALECSLKFVGFIVVSCPLKADSKAVIREIQNASHRVVMITGDNPLTACHVAQELHFIEKAHTLILQPPSEKGRQCEWRSIDGSIVLPLARGSPKALALEYALCLTGDGLAHLQATDPQQLLRLIPHVQVFARVAPKQKEFVITSLKELGYVTLMCGDGTNDVGALKHADVGVALLANAPERVVERRRRPRDSPTLSNSGIRATSRTAKQRSGLPPSEEQPTSQRDRLSQVLRDLEDESTPIVKLGDASIAAPFTSKLSSIQCICHVIKQGRCTLVTTLQMFKILALNALILAYSQSVLYLEGVKFSDFQATLQGLLLAGCFLFISRSKPLKTLSRERPLPNIFNLYTILTVMLQFFVHFLSLVYLYREAQARSPEKQEQFVDLYKEFEPSLVNSTVYIMAMAMQMATFAINYKGPPFMESLPENKPLVWSLAVSLLAIIGLLLGSSPDFNSQFGLVDIPVEFKLVIAQVLLLDFCLALLADRVLQFFLGTPKLKVPS

SEQ ID NO: 843572 - protein, 117 aa, Homo sapiens
LPGGSWNCRLRRAKPQCFLCLCQEYDPSKATFVKVVPTPNNGSTELVALHRNEGEDGLEVLSFEFQKIKYSYDALEKKQFLPVAFPVGNAFSYYQSNRGFQEDSEIRAAEKKFGSNK

SEQ ID NO: 843573 - protein, 572 aa, Homo sapiens
MSVLASYEKLGSTDLCYIAAVKGAPETLHSMFSQCPPDYHHIHTEISREGARVLALGYKELGHLTHQQAREVKREALECSLKFVGFIVVSCPLKADSKAVIREIQNASHRVVMITGDNPLTACHVAQELHFIEKAHTLILQPPSEKGRQCEWRSIDGSIVLPLARGSPKALALEYALCLTGDGLAHLQATDPQQLLRLIPHVQVFARVAPKQKEFVITSLKELGYVTLMCGDGTNDVGALKHADVGVALLANAPERVVERRRRPRDSPTLSNSGIRATSRTAKQRSGLPPSEEQPTSQRDRLSQVLRDLEDESTPIVKLGDASIAAPFTSKLSSIQCICHVIKQGRCTLVTTLQMFKILALNALILAYSQSVLYLEGVKFSDFQATLQGLLLAGCFLFISRSKPLKTLSRERPLPNIFNLYTILTVMLQFFVHFLSLVYLYREAQARSPEKQEQFVDLYKEFEPSLVNSTVYIMAMAMQMATFAINYKGPPFMESLPENKPLVWSLAVSLLAIIGLLLGSSPDFNSQFGLVDIPVEFKLVIAQVLLLDFCLALLADRVLQFFLGTPKLKVPS

SEQ ID NO: 843574 - protein, 1366 aa, Homo sapiens
KLPTPPPQGPGFAPGDRWCWCSQGGGLAFFGSGCHGGAQARLAGLVFSGLSPAWQRRQAPLGLPVPLCHGDAQPLLPATACHGGTRSSPCRGQPVLLPWLFLVQAAMAALRAYRKKNFGSEAFLCPEVSAALGKMAAAAAVGNAVPCGARPCGVRPDGQPKPGPQPRALLAAGPALIANGDELVAAVWPYRRLALLRRLTVLPFAGLLYPAWLGAAAAGCWGWGSSWVQIPEAALLVLATICLAHALTVLSGHWSVHAHCALTCTPEYDPSKATFVKVVPTPNNGSTELVALHRNEGEDGLEVLSFEFQKIKYSYDALEKKQFLPVAFPVGNAFSYYQSNRGFQEDSEIRAAEKKFGSNKAEMVVPDFSELFKERATAPFFVFQVFCVGLWCLDEYWYYSVFTLSMLVAFEASLVQQQMRNMSEIRKMGNKPHMIQVYRSRKWRPIASDEIVPGDIVSIGRSPQENLVPCDVLLLRGRCIVDEAMLTGESVPQMKEPIEDLSPDRVLDLQADSRLHVIFGGTKVVQHIPPQKATTGLKPVDSGCVAYVLRTGFNTSQGKLLRTILFGVKRVTANNLETFIFILFLLVFAIAAAAYVWIEGTKDPSRNRYKLFLECTLILTSVVPPELPIELSLAVNTSLIALAKLYMYCTEPFRIPFAGKVEVCCFDKTGTLTSDSLVVRGVAGLRDGKEVTPVSSIPVETHRALASCHSLMQLDDGTLVGDPLEKAMLTAVDWTLTKDEKVFPRSIKTQGLKIHQRFHFASALKRMSVLASYEKLGSTDLCYIAAVKGAPETLHSMFSQCPPDYHHIHTEISREGARVLALGYKELGHLTHQQAREVKREALECSLKFVGFIVVSCPLKADSKAVIREIQNASHRVVMITGDNPLTACHVAQELHFIEKAHTLILQPPSEKGRQCEWRSIDGSIVLPLARGSPKALALEYALCLTGDGLAHLQATDPQQLLRLIPHVQVFARVAPKQKEFVITSLKELGYVTLMCGDGTNDVGALKHADVGVALLANAPERVVERRRRPRDSPTLSNSGIRATSRTAKQRSGLPPSEEQPTSQRDRLSQVLRDLEDESTPIVKLGDASIAAPFTSKLSSIQCICHVIKQGRCTLVTTLQMFKILALNALILAYSQSVLYLEGVKFSDFQATLQGLLLAGCFLFISRSKPLKTLSRERPLPNIFNLYTILTVMLQFFVHFLSLVYLYREAQARSPEKQEQFVDLYKEFEPSLVNSTVYIMAMAMQMATFAINYKVRPGPCPNIHCLPTQPHPMKPSVPHPQQGPPFMESLPENKPLVWSLAVSLLAIIGLLLGSSPDFNSQFGLVDIPVEFKLVIAQVLLLDFCLALLADRVLQFFLGTPKLKVPS

SEQ ID NO: 843575 - protein, 1331 aa, Homo sapiens
KLPTPPPQGPGFAPGDRWCWCSQGGGLAFFGSGCHGGAQARLAGLVFSGLSPAWQRRQAPLGLPVPLCHGDAQPLLPATACHGGTRSSPCRGQPVLLPWLFLVQAAMAALRAYRKKNFGSEAFLCPEVSAALGKMAAAAAVGNAVPCGARPCGVRPDGQPKPGPQPRALLAAGPALIANGDELVAAVWPYRRLALLRRLTVLPFAGLLYPAWLGAAAAGCWGWGSSWVQIPEAALLVLATICLAHALTVLSGHWSVHAHCALTCTPEYDPSKATFVKVVPTPNNGSTELVALHRNEGEDGLEVLSFEFQKIKYSYDALEKKQFLPVAFPVGNAFSYYQSNRGFQEDSEIRAAEKKFGSNKAEMVVPDFSELFKERATAPFFVFQVFCVGLWCLDEYWYYSVFTLSMLVAFEASLVQQQMRNMSEIRKMGNKPHMIQVYRSRKWRPIASDEIVPGDIVSIGRSPQENLVPCDVLLLRGRCIVDEAMLTGESVPQMKEPIEDLSPDRVLDLQADSRLHVIFGGTKVVQHIPPQKATTGLKPVDSGCVAYVLRTGFNTSQGKLLRTILFGVKRVTANNLETFIFILFLLVFAIAAAAYVWIEGTKDPSRNRYKLFLECTLILTSVVPPELPIELSLAVNTSLIALAKLYMYCTEPFRIPFAGKVEVCCFDKTGTLTSDSLVVRGVAGLRDGKEVTPVSSIPVETHRALASCHSLMQLDDGTLVGDPLEKAMLTAVDWTLTKDEKVFPRSIKTQGLKIHQRFHFASALKRMSVLASYEKLGSTDLCYIAAVKGAPETLHSMFSQCPPDYHHIHTEISREGARVLALGYKELGHLTHQQAREVKREALECSLKFVGFIVVSCPLKADSKAVIREIQNASHRVVMITGDNPLTACHVAQELHFIEKAHTLILQPPSEKGRQCEWRSIDGSIVLPLARGSPKALALEYALCLTGDGLAHLQATDPQQLLRLIPHVQVFARVAPKQKEFVITSLKELGYVTLMCGDGTNDVGALKHADVGVALLANAPERVVERRRRPRDSPTLSNSGIRATSRTAKQRSGLPPSEEQPTSQRDRLSQVLRDLEDESTPIVKLGDASIAAPFTSKLSSIQCICHVIKQGRCTLVTTLQMFKILALNALILAYSQSVLYLEGVKFSDFQATLQGLLLAGCFLFISRSKPLKTLSRERPLPNIFNLYTILTVMLQFFVHFLSLVYLYREAQARSPEKQEQFVDLYKEFEPSLVNSTVYIMAMAMQMATFAINYKGPPFMESLPENKPLVWSLAVSLLAIIGLLLGSSPDFNSQFGLVDIPVEVLLLDFCLALLADRVLQFFLGTPKLKVPS

SEQ ID NO: 843576 - protein, 187 aa, Homo sapiens
GWPQVSQILTPPPALLLQPLKTLSRERPLPNIFNLYTILTVMLQFFVHFLSLVYLYREAQARSPEKQEQFVDLYKEFEPSLVNSTVYIMAMAMQMATFAINYKGPPFMESLPENKPLVWSLAVSLLAIIGLLLGSSPDFNSQFGLVDIPVEFKLVIAQVLLLDFCLALLADRVLQFFLGTPKLKVPS

SEQ ID NO: 843577 - protein, 909 aa, Homo sapiens
KLPTPPPQGPGFAPGDRWCWCSQGGGLAFFGSGCHGGAQARLAGLVFSGLSPAWQRRQAPLGLPVPLCHGDAQPLLPATACHGGTRSSPCRGQPVLLPWLFLVQAAMAALRAYRKKNFGSEAFLCPEVSAALGKMAAAAAVGNAVPCGARPCGVRPDGQPKPGPQPRALLAAGPALIANGDELVAAVWPYRRLALLRRLTVLPFAGLLYPAWLGAAAAGCWGWGSSWVQIPEAALLVLATICLAHALTVLSGHWSVHAHCALTCTPEYDPSKATFVKVVPTPNNGSTELVALHRNEGEDGLEVLSFEFQKIKYSYDALEKKQFLPVAFPVGNAFSYYQSNRGFQEDSEIRAAEKKFGSNKAEMVVPDFSELFKERATAPFFVFQVFCVGLWCLDEYWYYSVFTLSMLVAFEASLVQQQMRNMSEIRKMGNKPHMIQVYRSRKWRPIASDEIVPGDIVSIGRSPQENLVPCDVLLLRGRCIVDEAMLTGESVPQMKEPIEDLSPDRVLDLQADSRLHVIFGGTKVVQHIPPQKATTGLKPVDSGCVAYVLRTGFNTSQGKLLRTILFGVKRVTANNLETFIFILFLLVFAIAAAAYVWIEGTKDPSRNRYKLFLECTLILTSVVPPELPIELSLAVNTSLIALAKLYMYCTEPFRIPFAGKVEVCCFDKTGTLTSDSLVVRGVAGLRDGKEVTPVSSIPVETHRALASCHSLMQLDDGTLVGDPLEKAMLTAVDWTLTKDEKVFPRSIKTQGLKIHQRFHFASALKRMSVLASYEKLGSTDLCYIAAVKGAPETLHSMFSQCPPDYHHIHTEISREGARVLALGYKELGHLTHQQAREVKREALECSLKFVGFIVVSCPLKADSKAVIREIQNASHRVVMITGDNPLTACHVADRVLQFFLGTPKLKVPS

SEQ ID NO: 843578 - protein, 537 aa, Homo sapiens
AEVTTEAGRRRKMAAVVLAATRLLRGSGSWGCSRLRFGPPAYRRFSSGGAYPNIPLSSPLPGVPKPVFATVDGQEKFETKVTTLDNGLRVASQNKFGQFCTVGILINSGSRYEAKYLSGIAHFLEKLAFSSTARFDSKDEILLTLEKHGGICDCQTSRDTTMYAVSADSKGLDTVVALLADVVLQPRLTDEEVEMTRMAVQFELEDLNLRPDPEPLLTEMIHEAAYRENTVGLHRFCPTENVAKINREVLHSYLRNYYTPDRMVLAGVGVEHEHLVDCARKYLLGVQPAWGSAEAVDIDRSVAQYTGGIAKLERDMSNVSLGPTPIPELTHIMVGLESCSFLEEDFIPFAVLNMMMGGGGSFSAGGPGKGMFSRLYLNVLNRHHWMYNATSYHHSYEDTGLLCIHASADPRQVREMVEIITKEFILMGGTVDTVELERAKTQLTSMLMMNLESRPVIFEDVGRQVLATRSRKLPHELCTLIRNVKPEDVKRVASKMLRGKPAVAALGDLTDLPTYEHIQTALSSKDGRLPRTYRLFR

SEQ ID NO: 843579 - protein, 205 aa, Homo sapiens [sequence omitted]

SEQ ID NO: 843580 - protein, 712 aa, Homo sapiens
MAAVVLAATRLLRGSGSWGCSRLRFGPPAYRRFSSGGAYPNIPLSSPLPGVPKPVFATVDGQEKFETKVTTLDNGLRVASQNKFGQFCTVGILINSGSRYEAKYLSGIAHFLEKLAFSSTARFDSKDEILLTLEKHGGICDCQTSRDTTMYAVSADSKGLDTVVALLADVVLQPRLTDEEVEMTRMAVQFELEDLNLRPDPEPLLTEMIHEVKCQTRECPRISNSGPRDTRGGGEGASVMLSLQVYGYIQNIFLFFEMRFLHIAYAGLALLGSAQVILLPLPPKYAGITGVSHRTQLRTFLISESAVYTMFVFSSFYSNWSLLLNTINLRLFVNLYSGEADFTLYKYARSCYCQSASKISACVGFSQGWLQMGAGAACWRKPGHAVFSHLCLWLFPIEAAYRENTVGLHRFCPTENVAKINREVLHSYLRNYYTPDRMVLAGVGVEHEHLVDCARKYLLGVQPAWGSAEAVDIDRSVAQYTGGIAKLERDMSNVSLGPTPIPELTHIMVGLESCSFLEEDFIPFAVLNMMMGGGGSFSAGGPGKGMFSRLYLNVLNRHHWMYNATSYHHSYEDTGLLCIHASADPRQVREMVEIITKEFILMGGTVDTVELERAKTQLTSMLMMNLESRPVIFEDVGRQVLATRSRKLPHELCTLIRNVKPEDVKRVASKMLRGKPAVAALGDLTDLPTYEHIQTALSSKDGRLPRTYRLFR

SEQ ID NO: 843581 - protein, 376 aa, Homo sapiens
MYAVSADSKGLDTVVALLADVVLQPRLTDEEVEMTRMAVQFELEDLNLRPDPEPLLTEMIHEAAYRENTVGLHRFCPTENVAKINREVLHSYLRNYYTPDRMVLAGVGVEHEHLVDCARKYLLGVQPAWGSAEAVDIDRSVAQYTGGIAKLERDMSNVSLGPTPIPELTHIMVGLESCSFLEEDFIPFAVLNMMMGGGGSFSAGGPGKGMFSRLYLNVLNRHHWMYNATSYHHSYEDTGLLCIHASADPRQVREMVEIITKEFILMGGTVDTVELERAKTQLTSMLMMNLESRPVIFEDVGRQVLATRSRKLPHELCTLIRNVKPEDVKRVASKMLRGKPAVAALGDLTDLPTYEHIQTALSSKDGRLPRTYRLFR

SEQ ID NO: 843582 - protein, 394 aa, Homo sapiens
MKRNTLVELLTFWKNWHFRLLLDLTAKMKFCLRWKSMGVSVTARHQDEEVEMTRMAVQFELEDLNLRPDPEPLLTEMIHEAAYRENTVGLHRFCPTENVAKINREVLHSYLRNYYTPDRMVLAGVGVEHEHLVDCARKYLLGVQPAWGSAEAVDIDRSVAQYTGGIAKLERDMSNVSLGPTPIPELTHIMVGLESCSFLEEDFIPFAVLNMMMGGGGSFSAGGPGKGMFSRLYLNVLNRHHWMYNATSYHHSYEDTGLLCIHASADPRQVREMVEIITKEFILMGGTVDTVELERAKTQLTSMLMMNLESRPVIFEDVGRQVLATRSRKLPHELCTLIRNVKPEDVKRVASKMLRGKPAVAALGDLTDLPTYEHIQTALSSKDGRLPRTYRLFR

SEQ ID NO: 843583 - protein, 275 aa, Homo sapiens
MVLAGVGVEHEHLVDCARKYLLGVQPAWGSAEAVDIDRSVAQYTGGIAKLERDMSNVSLGPTPIPELTHIMVGLESCSFLEEDFIPFAVLNMMMGGGGSFSAGGPGKGMFSRLYLNVLNRHHWMYNATSYHHSYEDTGLLCIHASADPRQVREMVEIITKEFILMGGTVDTVELERAKTQLTSMLMMNLESRPVIFEDVGRQVLATRSRKLPHELCTLIRNVKPEDVKRVASKMLRGKPAVAALGDLTDLPTYEHIQTALSSKDGRLPRTYRLFR

SEQ ID NO: 843584 - protein, 497 aa, Homo sapiens
MAAVVLAATRLLRGSGSWGCSRLRFGPPAYRRFSSGGAYPNIPLSSPLPGVPKPVFATVDGQEKFETKVTTLDNGLRVASQNKFGQFCTVGILINSGSRYEAKYLSGIAHFLEKLAFSSTARFDSKDEILLTLEKHGGICDCQTSRDTTMYAVSADSKGLDTVVALLADVVLQPRLTDEEVEMTRMAVQFELEDLNLRPDPEPLLTEMIHEAAYRENTVGLHRFCPTENVAKINREVLHSYLRNYYTPDRMVLAGVGVEHEHLVDCARKYLLGVQPAWGSAEAVDIDRSVAQYTGGIAKLERDMSNVSLGPTPIPELTHIMVGLESCSFLEEDFIPFAVLNMMMGGGGSFSAGGPGKGMFSRLYLNVLNRHHWMYNATSYHHSYEDTGLLCIHASADPRQVREMVEIITKEFILMGGTVDTVELERAKTQLTSMLMMNLESRPVIFEDVGRQVLATRSRKLPHELCTLILRSVLYACVCAVLVCVLCSCVCCVSSRV

SEQ ID NO: 843585 - protein, 269 aa, Homo sapiens
AEVTTEAGRRRKMAAVVLAATRLLRGSGSWGCSRLRFGPPAYRRFSSGGAYPNIPLSSPLPGVPKPVFATVDGQEKFETKVTTLDNGLRVASQNKFGQFCTVGILINSGSRYEAKYLSGIAHFLEKLAFSSTARFDSKDEILLTLEKHGGICDCQTSRDTTMYAVSADSKGLDTVVALLADVVLQPRLTDEEVEMTRMAVQFELEDLNLRPDPEPLLTEMIHEVKCQTRECPRISNSGPRDTRGGGEGASVMLSLQVMDIYRTFFCFLR

SEQ ID NO: 843586 - protein, 161 aa, Homo sapiens
MAAVVLAATRLLRGSGSWGCSRLRFGPPAYRRFSSGGAYPNIPLSSPLPGVPKPVFATVDGQEKFETKVTTLDNGLRVASQNKFGQFCTVGILINSGSRYEAKYLSGIAHFLEKLAFSSTARFDSKDEILLTLEKHGGICDCQTSRYTSFCVQTDFGSLGT

SEQ ID NO: 843587 - protein, 171 aa, Homo sapiens
AEVTTEAGRRRKMAAVVLAATRLLRGSGSWGCSRLRFGPPAYRRFSSGGAYPNIPLSSPLPGVPKPVFATVDGQEKFETKVTTLDNGLRVASQNKFGQFCTVGILINSGSRYEAKYLSGIAHFLEKLAFSVSTQFCNFLDYTFEGCLRFFLSIMVILINYQVAKLMLIKDF

SEQ ID NO: 843588 - protein, 537 aa, Homo sapiens; identical to SEQ ID NO: 843578

SEQ ID NO: 843589 - protein, 537 aa, Homo sapiens; identical to SEQ ID NO: 843578

SEQ ID NO: 843590 - protein, 275 aa, Homo sapiens; identical to SEQ ID NO: 843583

SEQ ID NO: 843591 - protein, 563 aa, Homo sapiens
MAAVVLAATRLLRGSGSWGCSRLRFGPPAYRRFSSGGAYPNIPLSSPLPGVPKPVFATVDGQEKFETKVTTLDNGLRVASQNKFGQFCTVGILINSGSRYEAKYLSGIAHFLEKLAFSSTARFDSKDEILLTLEKHGGICDCQTSRDTTMYAVSADSKGLDTVVALLADVVLQPRLTDEEVEMTRMAVQFELEDLNLRPDPEPLLTEMIHEAAYRENTVGLHRFCPTENVAKINREVLHSYLRNYYTPDRMVLAGVGVEHEHLVDCARKYLLGVQPAWGSAEAVDIDRSVAQYTGGIAKLERDMSNVSLGPTPIPELTHIMVGLESCSFLEEDFIPFAVLNMMMGGGGSFSAGGPGKGMFSRLYLNVLNRHHWMYNATSYHHSYEDTGLLCIHASADPRQVREMVEIITKEFILMGGTVDTVELERAKTQLTSMLMMNLESRPVIFEDVGRQVLATRSRKLPHELCTLIREYRRGSEGLPQASARLRGGRLALPQAVVGLWYVHHTQNLGPSPVVLSRGGQGQGRGVADLVSLPGPTMHLLPPWQVTPPSAPLGGAVTTAQSC

SEQ ID NO: 843592 - protein, 139 aa, Homo sapiens
MFSFGHRDGVLPLLEWGVEGGTGRVCAHLTGPWPQVELERAKTQLTSMLMMNLESRPVIFEDVGRQVLATRSRKLPHELCTLIRNVKPEDVKRVASKMLRGKPAVAALGDLTDLPTYEHIQTALSSKDGRLPRTYRLFR

SEQ ID NO: 843593 - protein, 269 aa, Homo sapiens; identical to SEQ ID NO: 843585

SEQ ID NO: 843594 - protein, 123 aa, Homo sapiens
AEVTTEAGRRRKMAAVVLAATRLLRGSGSWGCSRLRFGPPAYRRFSSGGAYPNIPLSSPLPGVPKPVFATVDGQEKFETKVTTLDNGLRVASQNKFGQFCTVGSKYCCVVVGGPAVLTCTCFS

SEQ ID NO: 843595 - protein, 96 aa, Homo sapiens
PLITTYYTPIGSVKLIRKEIEFHDYISSYPPSTLPVPFKRFTKTLLAVLYNLQMLNHLVPHHSCKAPFYSQIKCPGFRQQLYAIIYLMSISSCAWN

SEQ ID NO: 843596 - protein, 832 aa, Homo sapiens
NKRILGRVNLSLNDSHYGQQDKGTSLRETQEMTEGSRLEPNSEFGKESTFGISSKESMSCHDESSVSLRSLKSIEIMPSQENSETNVNSEETDLKNLCKPKDGEMLCENVKDCTVLPEMKEIVSRDWSNSSDRDSVCTCVEKNACKACHPHENSSDRHLPLTVKTDIKVKGEETEEHQRGRLGYLTVGEQSEELVTRETGDGDPVSNISQTHFKCRGILNHAEKQQSPEVLDYMLQKEEKYIRQQKAHTISQQCISSSLLLDDAQNQNQPKADKDESTMINEITLAKLAKDSIVAQTQKLEDQKEERLHHPLRKDTESCTSPCLLGAPRKAQDPSSAGCDQIHGAFAKKGVLPLKKQPHRTCKKVSYQEQIIVGRKIGKIRSSAFLKSSSNPIPTKAHRLLSLCTLSAPTRLEPETAPTKSLVSHIPKQMSTPCHPLRSLNFRKTTKESALLNKLSILASKLAPAMKTQKLRYRRCSSELLPMAKSYKRLRYKRLLDGFSSSTEQLNPYLAASGWDKRPNSKPMALYSLESIKMTFIDLSNKMPSLLFGSEIFPVSFHVKSSSSDCTTESSRTFPEHCAPARLALGEALQCPSQPPKWTFSFFLSHGCPGMATFREDTGVHSQTHTQAPPQPPAPLQDYGGTAIVQTRADCSVLGLHTLLALCSPGCYRIWTKKRSFSSHMPTMQRLFMTQFTQGLKGLRSPASIADKVFCSLPYSVGRVLSIWSQHGPSVCSFEISSLHSPHCKRQPSLGTTSSHTMLPYVPLPGMEATYNTSGSQTRLEPPFPALVPKSCLVAESAVSKLLLSASEFQVRGLDELDGVKAACPCPQSSPP

SEQ ID NO: 843597 - protein, 1146 aa, Homo sapiens
AAAAGLGSSESSSDFLFCTYIILYILYMMTSVSSDHCRGAREKPQISAAQSTQPQKQVVQATAEQMRLAQVIFDKNDSDFEAKVKQLMEVTGKNQDECIVALHDCNGDVNKAINILLEGNSDTTSWETVGCKKKNFAKENSENKENREKKSEKESSRGRGNNNRKGRGGNRGREFRGEENGIDCNQVDKPSDRGKRARGRGFGRGRGRGAGRFSTQGMGTFNPADYSDSTSTDVCGTKLVVWEAAQNGADEGTELASNTHNIAQDLSNKSSYGLKGAWKNSVEEWTTEDWTEDLSETKVFTASSAPAENHILPGQSIDLVALLQKPVPHSQASEANSFETSQQQGFGQALVFTNSQHNNQMAPGTGSSTAVNSCSPQSLSSVLGSGFGELAPPKMANITSSQILDQLKAPSLGQFTTTPSTQQNSTSHPTTTTSWDLKPPTSQSSVLSHLDFKSQPEPSPVLSQLSQRQQHQSQAVTVPPPGLESFPSQAKLRESTPGDSPSTVNKLLQLPSTTIENISVSVHQPQPKHIKLAKRRIPPASKIPASAVEMPGSADVTGLNVQFGALEFGSEPSLSEFGSAPSSENSNQIPISLYSKSLSEPLNTSLSMTSAVQNSTYTTSVITSCSLTSSSLNSASPVAMSSSYDQSSVHNRIPYQSPVSSSESAPGTIMNGHGGGRSQQTLDTPKTTGPPSALPSVSSLPSTTSCTALLPSTSQHTGDLTSSPLSQLSSSLSSHQSSLSAHAALSSSTSHTHASVESASSHQSSATFSTAATSVSSSASSGVSLSSSMNTANSLCLGGTPASASSSSSRAAPLVTSGKAPPNLPQGVPPLLHNQYLVGPGGLLPAYPIYGYDELQMLQSRLPVDYYGIPFAAPTALASRDGSLANNPYPGDVTKFGRGDSASPAPATTPAQPQQSQSQTHHTAQQPFVNPALPPGYSYTGLPYYTGMPSAFQYGPTMFVPPASAKQHGVNLSTPTPPFQQASGYGQHGYSTGYDDLTQGTAAGDYSKGGYAGSSQAPNKSAGSGPGKGVSVSSSTTGLPDMTGSVYNKTQTFDKQGFHAGTPPPFSLPSVLGSTGPLASGAAPGYAPPPFLHILPAHQQPHSQLLHHHLPQDAQSGSGQRSQPSSLQPKSQASKPAYGNSPYWTN

SEQ ID NO: 843598 - protein, 786 aa, Homo sapiens
MAPGTGSSTAVNSCSPQSLSSVLGSGFGELAPPKMANITSSQILDQLKAPSLGQFTTTPSTQQNSTSHPTTTTSWDLKPPTSQSSVLSHLDFKSQPEPSPVLSQLSQRQQHQSQAVTVPPPGLESFPSQAKLRESTPGDSPSTVNKLLQLPSTTIENISVSVHQPQPKHIKLAKRRIPPASKIPASAVEMPGSADVTGLNVQFGALEFGSEPSLSEFGSAPSSENSNQIPISLYSKSLSEPLNTSLSMTSAVQNSTYTTSVITSCSLTSSSLNSASPVAMSSSYDQSSVHNRIPYQSPVSSSESAPGTIMNGHGGGRSQQTLDTPKTTGPPSALPSVSSLPSTTSCTALLPSTSQHTGDLTSSPLSQLSSSLSSHQSSLSAHAALSSSTSHTHASVESASSHQSSATFSTAATSVSSSASSGVSLSSSMNTANSLCLGGTPASASSSSSRAAPLVTSGKAPPNLPQGVPPLLHNQYLVGPGGLLPAYPIYGYDELQMLQSRLPVDYYGIPFAAPTALASRDGSLANNPYPGDVTKFGRGDSASPAPATTPAQPQQSQSQTHHTAQQPFVNPALPPGYSYTGLPYYTGMPSAFQYGPTMFVPPASAKQHGVNLSTPTPPFQQASGYGQHGYSTGYDDLTQGTAAGDYSKGGYAGSSQAPNKSAGSGPGKGVSVSSSTTGLPDMTGSVYNKTQTFDKQGFHAGTPPPFSLPSVLGSTGPLASGAAPGYAPPPFLHILPAHQQPHSQLLHHHLPQDAQSGSGQRSQPSSLQPKSQASKPAYGNSPYWTN

SEQ ID NO: 843599 - protein, 552 aa, Homo sapiens
MMTSVSSDHCRGAREKPQISAAQSTQPQKQVVQATAEQMRLAQVIFDKNDSDFEAKVKQLMEVTGKNQDECIVALHDCNGDVNKAINILLEGNSDTTSWETVGCKKKNFAKENSENKENREKRTAAAELSSSPLSQLSSSLSGHQNSMTSAHATRSTSTPHTHASVESTASSAAFSAAATSAPSAPSSGVVLPGSMSTVSSLCLGGTTVSVPSSSTRATALVTSQSTPKLTSGGASPAAQPVPRGPGGLLPAYPIYGYDELQMLQSRLPVDYYGIPFAAPTALASRDGSLANNPYPGDVTKFGRGDSASPAPATTPAQPQQSQSQTHHTAQQPFVNPALPPGYSYTGLPYYTGMPSAFQYGPTMFVPPASAKQHGVNLSTPTPPFQQASGYGQHGYSTGYDDLTQGTAAGDYSKGGYAGSSQAPNKSAGSGPGKGVSVSSSTTGLPDMTGSVYNKTQTFDKQGFHAGTPPPFSLPSVLGSTGPLASGAAPGYAPPPFLHILPAHQQPHSQLLHHHLPQDAQSGSGQRSQPSSLQPKSQASKPAYGNSPYWTN

SEQ ID NO: 843600 - protein, 1174 aa, Homo sapiens
AAAAGLGSSESSSDFLFCTYIILYILYMMTSVSSDHCRGAREKPQISAAQSTQPQKQVVQATAEQMRLAQVIFDKNDSDFEAKVKQLMEVTGKNQDECIVALHDCNGDVNKAINILLEGNSDTTSWETVGCKKKNFAKENSENKENREKKSEKESSRGRGNNNRKGRGGNRGREFRGEENGIDCNQVDKPSDRGKRARGRGFGRGRGRGAGRFSTQGMGTFNPADYSDSTSTDVCGTKLVVWEAAQNGADEGTELASNTHNIAQDLSNKSSYGLKGAWKNSVEEWTTEDWTEDLSETKVFTASSAPAENHILPGQSIDLVALLQKPVPHSQASEANSFETSQQQGFGQALVFTNSQHNNQMAPGTGSSTAVNSCSPQSLSSVLGSGFGELAPPKMANITSSQILDQLKAPSLGQFTTTPSTQQNSTSHPTTTTSWDLKPPTSQSSVLSHLDFKSQPEPSPVLSQLSQRQQHQSQAVTVPPPGLESFPSQAKLRESTPGDSPSTVNKLLQLPSTTIENISVSVHQPQPKHIKLAKRRIPPASKIPASAVEMPGSADVTGLNVQFGALEFGSEPSLSEFGSAPSSENSNQIPISLYSKSLSEPLNTSLSMTSAVQNSTYTTSVITSCSLTSSSLNSASPVAMSSSYDQSSVHNRIPYQSPVSSSESAPGTIMNGHGGGRSQQTLDTPKTTGPPSALPSVSSLPSTTSCTALLPSTSQHTGDLTSSPLSQLSSSLSSHQSSLSAHAALSSSTSHTHASVESASSHQSSATFSTAATSVSSSASSGVSLSSSMNTANSLCLGGTPASASSSSSRAAPLVTSGKAPPNLPQGVPPLLHNQYLVGPGGLLPAYPIYGYDELQMLQSRLPVDYYGIPFAAPTALASRDGSLANNPYPGDVTKFGRGDSASPAPATTPAQPQQSQSQTHHTAQQPFVNPALPPGYSYTGLPYYTGMPSAFQYGPTMFVPPASAKQHGVNLSTPTPPFQQASGYGQHGYSTGEGYFPDRDNGVRQACLAHTCLLYPATLGYDDLTQGTAAGDYSKGGYAGSSQAPNKSAGSGPGKGVSVSSSTTGLPDMTGSVYNKTQTFDKQGFHAGTPPPFSLPSVLGSTGPLASGAAPGYAPPPFLHILPAHQQPHSQLLHHHLPQDAQSGSGQRSQPSSLQPKSQASKPAYGNSPYWTN

SEQ ID NO: 843601 - protein, 1146 aa, Homo sapiens; identical to SEQ ID NO: 843597

SEQ ID NO: 843602 - protein, 1139 aa, Homo sapiens
AAAAGLGSSESSSDFLFCTYIILYILYMMTSVSSDHCRGAREKPQISAAQSTQPQKQVVQATAEQMRLAQVIFDKNDSDFEAKVKQLMEVTGKNQDECIVALHDCNGDVNKAINILLEGNSDTTSWETVGCKKKNFAKENSENKENREKKSEKESSRGRGNNNRKGRGGNRGREFRGEENGIDCNQVDKPSDRGKRARGRGFGRGRGRGAGRFSTQGMGTFNPADYSDSTSTDVCGTKLVVWEAAQNGADEGTELASNTHNIAQDLSNKSSYGLKGAWKNSVEEWTTEDWTEDLSETKVFTASSAPAENHILPGQSIDLVALLQKPVPHSQASEANSFETSQQQGFGQALVFTNSQHNNQMAPGTGSSTAVNSCSPQSLSSVLGSGFGELAPPKMANITSSQILDQLKAPSLGQFTTTPSTQQNSTSHPTTTTSWDLKPPTSQSSVLSHLDFKSQPEPSPVLSQLSQRQQHQSQAVTVPPPGLESFPSQAKLRESTPGDSPSTVNKLLQLPSTTIENISVSVHQPQPKHIKLAKRRIPPASKIPASAVEMPGSADVTGLNVQFGALEFGSEPSLSEFGSAPSSENSNQIPISLYSKSLSEPLNTSLSMTSAVQNSTYTTSVITSCSLTSSSLNSASPVAMSSSYDQSSVHNRIPYQSPVSSSESAPGTIMNGHGGGRSQQTLDTPKTTGPPSALPSVSSLPSTTSCTALLPSTSQHTGDLTSSPLSQLSSSLSSHQSSLSAHAALSSSTSHTHASVESASSHQSSATFSTAATSVSSSASSGVSLSSSMNTANSLCLGGTPASASSSSSRAAPLVTSGKAPPNLPQGVPPLLHNQYLVGPGGLLPAYPIYGYDELQMLQSRLPVDYYGIPFAAPTALASRDGSLANNPYPGDVTKFGRGDSASPAPATTPAQPQQSQSQTHHTAQQPFVNPALPPGYSYTGLPYYTGMPSAFQYGPTMFVPPASAKQHGVNLSTPTPPFQQASGYGQHGYSTGYDDLTQGTAAGDYSKGGYAGSSQAPNKSAGSGPGKGVSVSSSTTGLPDMTGSVYNKTQTFDKQGFHAGTPPPFSLPSVLGSTGPLASGAAPGYAPPPFLHILPAHQQPHSQLLHHHLPQDAQSGRVSAAAVLSQSQLQLLALSSGN

SEQ ID NO: 843603 - protein, 1061 aa, Homo sapiens
AAAAGLGSSESSSDFLFCTYIILYILYMMTSVSSDHCRGAREKPQISAAQSTQPQKQVVQATAEQMRLAQVIFDKNDSDFEAKVKQLMEVTGKNQDECIVALHDCNGDVNKAINILLEGNSDTTSWETVGCKKKNFAKENSENKENREKKSEKESSRGRGNNNRKGRGGNRGREFRGEENGIDCNQVDKPSDRGKRARGRGFGRGRGRGAGRFSTQGMGTFNPADYSDSTSTDVCGTKLVVWEAAQNGADEGTELASNTHNIAQDLSNKSSYGLKGAWKNSVEEWTTEDWTEDLSETKVFTASSAPAENHILPGQSIDLVALLQKPVPHSQASEANSFETSQQQGFGQALVFTNSQHNNQMAPGTGSSTAVNSCSPQSLSSVLGSGFGELAPPKMANITSSQILDQLKAPSLGQFTTTPSTQQNSTSHPTTTTSWDLKPPTSQSSVLSHLDFKSQPEPSPVLSQLSQRQQHQSQAVTVPPPGLESFPSQAKLRESTPGDSPSTVNKLLQLPSTTIENISVSVHQPQPKHIKLAKRRIPPASKIPASAVEMPGSADVTGLNVQFGALEFGSEPSLSEFGSAPSSENSNQIPISLYSKSLSEPLNTSLSMTSAVQNSTYTTSVITSCSLTSSSLNSASPVAMSSSYDQSSVHNRIPYQSPVSSSESAPGTIMNGHGGGRSQQTLDTPKTTGPPSALPSVSSLPSTTSCTALLPSTSQHTGDLTSSPLSQLSSSLSSHQSSLSAHAALSSSTSHTHASVESASSHQSSATFSTAATSVSSSASSGVSLSSSMNTANSLCLGGTPASASSSSSRAAPLVTSGKAPPNLPQGVPPLLHNQYLVGPGGLLPAYPIYGYDELQMLQSRLPVDYYGIPFAAPTALASRDGSLANNPYPGDVTKFGRGDSASPAPATTPAQPQQSQSQTHHTAQQPFVNPALPPGYSYTGLPYYTGMPSAFQYGPTMFVSISEGVTVSPGLGLLAGGNLGPIFQQGGRVVIPLRLTWSSETVQAGDKVTFPLLCLDPACVALMKTQVPCGCGYVTCCLRLWQGYLTSLSLPLPTLIPHLL

SEQ ID NO: 843604 - protein, 828 aa, Homo sapiens
AAAAGLGSSESSSDFLFCTYIILYILYMMTSVSSDHCRGAREKPQISAAQSTQPQKQVVQATAEQMRLAQVIFDKNDSDFEAKVKQLMEVTGKNQDECIVALHDCNGDVNKAINILLEGNSDTTSWETVGCKKKNFAKENSENKENREKKSEKESSRGRGNNNRKGRGGNRGREFRGEENGIDCNQVDKPSDRGKRARGRGFGRGRGRGAGRFSTQGMGTFNPADYSDSTSTDVCGTKLVVWEAAQNGADEGTELASNTHNIAQDLSNKSSYGLKGAWKNSVEEWTTEDWTEDLSETKVFTASSAPAENHILPGQSIDLVALLQKPVPHSQASEANSFETSQQQGFGQALVFTNSQHNNQMAPGTGSSTAVNSCSPQSLSSVLGSGFGELAPPKMANITSSQILDQLKAPSLGQFTTTPSTQQNSTSHPTTTTSWDLKPPTSQSSVLSHLDFKSQPEPSPVLSQLSQRQQHQSQAVTVPPPGLESFPSQAKLRESTPGDSPSTVNKLLQLPSTTIENISVSVHQPQPKHIKLAKRRIPPASKIPASAVEMPGSADVTGLNVQFGALEFGSEPSLSEFGSAPSSENSNQIPISLYSKSLSEPLNTSLSMTSAVQNSTYTTSVITSCSLTSSSLNSASPVAMSSSYDQSSVHNRIPYQSPVSSSESAPGTIMNGHGGGRSQQTLDTPKTTGPPSALPSVSSLPSTTSCTALLPSTSQHTGDLTSSPLSQLSSSLSSHQSSLSAHAALSSSTSHTHASVESASSHQSSATFSTAATSVSSSASSGVSLSSSMNTANSLCLGGTPASASSSSSRAAPLVTSGICSRGLSCPP

SEQ ID NO: 843605 - protein, 496 aa, Homo sapiens
AAAAGLGSSESSSDFLFCTYIILYILYMMTSVSSDHCRGAREKPQISAAQSTQPQKQVVQATAEQMRLAQVIFDKNDSDFEAKVKQLMEVTGKNQDECIVALHDCNGDVNKAINILLEGNSDTTSMGSTVGCQQHKQFCNTATHSRHTRTAAPSAAARKSCSKAHPQSVAREKTTTWQQAQQAGQSVVQQQFYTVHRQMAHCIAHPSWTKPFSIRGQSAAPGVAGICDVAKGSRGTDTVLNRKAMGVPFKSQQTYSRLPSTLHDCVLGPNTLRKILENADIRTWQHECTSDTETWAHQHNNHNDKLTDTCPEHTRAFHIIGTISQTRAPFSRKATFPVAPTTPAHHNQTQQLGNIDQNPHPYEKIDKRAEYPTLPPPHYLDVRHAHTQLTTLNCNNNVNSTNKATTESSQYDYAPLGPTPTPQRHMRHHTSRHDTQRDNTKSTSAQQDPIQSNTACHRKYNKRTRHSQTPQAPTTRTVTTHNTSTNKQPIPQTLRQ

SEQ ID NO: 843606 - protein, 141 aa, Homo sapiens
CLQKPVWPFSGWRKGSGWSQCSFLGDVTKFGRGDSASPAPATTPAQPQQSQSQTHHTAQQPFVNPALPPGYSYTGLPYYTGMPSAFQYGPTMFVSISEGVTVSPGLGLLAGGNLGPIFQQGGRVVIPLRLTWSSETVQAGD

SEQ ID NO: 843607 - protein, 1146 aa, Homo sapiens; identical to SEQ ID NO: 843597

SEQ ID NO: 843608 - protein, 1105 aa, Homo sapiens
ARDARSRDGLGSLCRRRRFVRGTLADFLFCTYIILYILYMMTSVSSDHCRGAREKPQISAAQSTQPQKQVVQATAEQMRLAQVIFDKNDSDFEAKVKQLMEVTGKNQDECIVALHDCNGDVNKAINILLEGNSDTTSWETVGCKKKNFAKENSENKENREKKSEKESSRGRGNNNRKGRGGNRGREFRGEENGIDCNQVDKPSDRGKRARGRELASNTHNIAQDLSNKSSYGLKGAWKNSVEEWTTEDWTEDLSETKVFTASSAPAENHILPGQSIDLVALLQKPVPHSQASEANSFETSQQQGFGQALVFTNSQHNNQMAPGTGSSTAVNSCSPQSLSSVLGSGFGELAPPKMANITSSQILDQLKAPSLGQFTTTPSTQQNSTSHPTTTTSWDLKPPTSQSSVLSHLDFKSQPEPSPVLSQLSQRQQHQSQAVTVPPPGLESFPSQAKLRESTPGDSPSTVNKLLQLPSTTIENISVSVHQPQPKHIKLAKRRIPPASKIPASAVEMPGSADVTGLNVQFGALEFGSEPSLSEFGSAPSSENSNQIPISLYSKSLSEPLNTSLSMTSAVQNSTYTTSVITSCSLTSSSLNSASPVAMSSSYDQSSVHNRIPYQSPVSSSESAPGTIMNGHGGGRSQQTLDTPKTTGPPSALPSVSSLPSTTSCTALLPSTSQHTGDLTSSPLSQLSSSLSSHQSSLSAHAALSSSTSHTHASVESASSHQSSATFSTAATSVSSSASSGVSLSSSMNTANSLCLGGTPASASSSSSRAAPLVTSGKAPPNLPQGVPPLLHNQYLVGPGGLLPAYPIYGYDELQMLQSRLPVDYYGIPFAAPTALASRDGSLANNPYPGDVTKFGRGDSASPAPATTPAQPQQSQSQTHHTAQQPFVNPALPPGYSYTGLPYYTGMPSAFQYGPTMFVPPASAKQHGVNLSTPTPPFQQASGYGQHGYSTGYDDLTQGTAAGDYSKGGYAGSSQAPNKSAGSGPGKGVSVSSSTTGLPDMTGSVYNKTQTFDKQGFHAGTPPPFSLPSVLGSTGPLASGAAPGYAPPPFLHILPAHQQPHSQLLHHHLPQDAQSGSGQRSQPSSLQPKSQASKPAYGNSPYWTN

SEQ ID NO: 843609 - protein, 852 aa, Homo sapiens
MDSKGLGRILWKSGQQKTGLKIIDLVALLQKPVPHSQASEANSFETSQQQGFGQALVFTNSQHNNQMAPGTGSSTAVNSCSPQSLSSVLGSGFGELAPPKMANITSSQILDQLKAPSLGQFTTTPSTQQNSTSHPTTTTSWDLKPPTSQSSVLSHLDFKSQPEPSPVLSQLSQRQQHQSQAVTVPPPGLESFPSQAKLRESTPGDSPSTVNKLLQLPSTTIENISVSVHQPQPKHIKLAKRRIPPASKIPASAVEMPGSADVTGLNVQFGALEFGSEPSLSEFGSAPSSENSNQIPISLYSKSLSEPLNTSLSMTSAVQNSTYTTSVITSCSLTSSSLNSASPVAMSSSYDQSSVHNRIPYQSPVSSSESAPGTIMNGHGGGRSQQTLDTPKTTGPPSALPSVSSLPSTTSCTALLPSTSQHTGDLTSSPLSQLSSSLSSHQSSLSAHAALSSSTSHTHASVESASSHQSSATFSTAATSVSSSASSGVSLSSSMNTANSLCLGGTPASASSSSSRAAPLVTSGKAPPNLPQGVPPLLHNQYLVGPGGLLPAYPIYGYDELQMLQSRLPVDYYGIPFAAPTALASRDGSLANNPYPGDVTKFGRGDSASPAPATTPAQPQQSQSQTHHTAQQPFVNPALPPGYSYTGLPYYTGMPSAFQYGPTMFVPPASAKQHGVNLSTPTPPFQQASGYGQHGYSTGYDDLTQGTAAGDYSKGGYAGSSQAPNKSAGSGPGKGVSVSSSTTGLPDMTGSVYNKTQTFDKQGFHAGTPPPFSLPSVLGSTGPLASGAAPGYAPPPFLHILPAHQQPHSQLLHHHLPQDAQSGSGQRSQPSSLQPKSQASKPAYGNSPYWTN

SEQ ID NO: 843610 - protein, 1124 aa, Homo sapiens
AAAAGLGSSESSSDFLFCTYIILYILYMMTSVSSDHCRGAREKPQISAAQSTQPQKQVVQATAEQMRLAQVIFDKNDSDFEAKVKQLMEVTGKNQDECIVALHDCNGDVNKAINILLEGNSDTTSWETVGCKKKNFAKENSENKENREKKSEKESSRGRGNNNRKGRGGNRGREFRGEENGIDCNQVDKPSDRGKRARGRGFGRGRGRGAGRFSTQGMGTFNPADYSDSTSTDVCGTKLVVWEAAQNGADEGTELASNTHNIAQDLSNKSSYGLKGAWKNSVEEWTTEDWTEDLSETKVFTASSAPAENHILPGQSIDLVALLQKPVPHSQASEANSFETSQQQGFGQALVFTNSQHNNQMAPGTGSSTAVNSCSPQSLSSVLGSGFGELAPPKMANITSSQILDQLKAPSLGQFTTTPSTQQNSTSHPTTTTSWDLKPPTSQSSVLSHLDFKSQPEPSPVLSQLSQRQQHQSQAVTVPPPGLESFPSQAKLRESTPGDSPSTVNKLLQLPSTTIENISVSVHQPQPKHIKLAKRRIPPASKIPASAVEMPGSADVTGLNVQFGALEFGSEPSLSEFGSAPSSENSNQIPISLYSKSLSEPLNTSLSMTSAVQNSTYTTSVITSCSLTSSSLNSASPVAMSSSYDQSSVHNRIPYQSPVSSSESAPGTIMNGHGGGRSQQTLDTPKTTGPPSALPSVSSLPSTTSCTALLPSTSQHTGDLTSSPLSQLSSMPVWRAPLPTSPQPPSPRQQTSVSSSASSGVSLSSSMNTANSLCLGGTPASASSSSSRAAPLVTSGKAPPNLPQGVPPLLHNQYLVGPGGLLPAYPIYGYDELQMLQSRLPVDYYGIPFAAPTALASRDGSLANNPYPGDVTKFGRGDSASPAPATTPAQPQQSQSQTHHTAQQPFVNPALPPGYSYTGLPYYTGMPSAFQYGPTMFVPPASAKQHGVNLSTPTPPFQQASGYGQHGYSTGYDDLTQGTAAGDYSKGGYAGSSQAPNKSAGSGPGKGVSVSSSTTGLPDMTGSVYNKTQTFDKQGFHAGTPPPFSLPSVLGSTGPLASGAAPGYAPPPFLHILPAHQQPHSQLLHHHLPQDAQSGSGQRSQPSSLQPKSQASKPAYGNSPYWTN

SEQ ID NO: 843611 - protein, 358 aa, Homo sapiens
MNTANSLCLGGTPASASSSSSRAAPLVTSGKAPPNLPQGVPPLLHNQYLVGPGGLLPAYPIYGYDELQMLQSRLPVDYYGIPFAAPTALASRDGSLANNPYPGDVTKFGRGDSASPAPATTPAQPQQSQSQTHHTAQQPFVNPALPPGYSYTGLPYYTGMPSAFQYGPTMFVPPASAKQHGVNLSTPTPPFQQASGYGQHGYSTGYDDLTQGTAAGDYSKGGYAGSSQAPNKSAGSGPGKGVSVSSSTTGLPDMTGSVYNKTQTFDKQGFHAGTPPPFSLPSVLGSTGPLASGAAPGYAPPPFLHILPAHQQPHSQLLHHHLPQDAQSGSGQRSQPSSLQPKSQASKPAYGNSPYWTN

SEQ ID NO: 843612 - protein, 405 aa, Homo sapiens
QIHVSWLFFCQHASVESASSHQSSATFSTAATSVSSSASSGVSLSSSMNTANSLCLGGTPASASSSSSRAAPLVTSGKAPPNLPQGVPPLLHNQYLVGPGGLLPAYPIYGYDELQMLQSRLPVDYYGIPFAAPTALASRDGSLANNPYPGDVTKFGRGDSASPAPATTPAQPQQSQSQTHHTAQQPFVNPALPPGYSYTGLPYYTGMPSAFQYGPTMFVPPASAKQHGVNLSTPTPPFQQASGYGQHGYSTGYDDLTQGTAAGDYSKGGYAGSSQAPNKSAGSGPGKGVSVSSSTTGLPDMTGSVYNKTQTFDKQGFHAGTPPPFSLPSVLGSTGPLASGAAPGYAPPPFLHILPAHQQPHSQLLHHHLPQDAQSGSGQRSQPSSLQPKSQASKPAYGNSPYWTN

SEQ ID NO: 843613 - protein, 1146 aa, Homo sapiens; identical to SEQ ID NO: 843597

SEQ ID NO: 843614 - protein, 1065 aa, Homo sapiens
AAAAGLGSSESSSDFLFCTYIILYILYMMTSVSSDHCRGAREKPQISAAQSTQPQKQVVQATAEQMRLAQVIFDKNDSDFEAKVKQLMEVTGKNQDECIVALHDCNGDVNKAINILLEGNSDTTSWETVGCKKKNFAKENSENKENREKKSEKESSRGRGNNNRKGRGGNRGREFRGEENGIDCNQVDKPSDRGKRARGRGFGRGRGRGAGRFSTQGMGTFNPADYSDSTSTDVCGTKLVVWEAAQNGADEGTELASNTHNIAQDLSNKSSYGLKGAWKNSVEEWTTEDWTEDLSETKVFTASSAPAENHILPGQSIDLVALLQKPVPHSQASEANSFETSQQQGFGQALVFTNSQHNNQMAPGTGSSTAVNSCSPQSLSSVLGSGFGELAPPKMANITSSQILDQLKAPSLGQFTTTPSTQQNSTSHPTTTTSWDLKPPTSQSSVLSHLDFKSQPEPSPVLSQLSQRQQHQSQAVTVPPPGLESFPSQAKLRESTPGDSPSTVNKLLQLPSTTIENISVSVHQPQPKHIKLAKRRIPPASKIPASAVEMPGSADVTGLNVQFGALEFGSEPSLSEFGSAPSSENSNQIPISLYSKSLSEPLNTSLSMTSAVQNSTYTTSVITSCSLTSSSLNSASPVAMSSSYDQSSVHNRIPYQSPVSSSESAPGTIMNGHGGGRSQQTLDTPKTTGPPSALPSVSSLPSTTSCTALLPSTSQHTGDLTSSPLSQLSSSLSSHQSSLSAHAALSSSTSHTHASVESASSHQSSATFSTAATSVSSSASSGVSLSSSMNTANSLCLGGTPASASSSSSRAAPLVTSGKAPPNLPQGVPPLLHNQYLVGPGGLLPAYPIYGYDELQMLQSRLPVDYYGIPFAAPTALASRDGSLANNPYPGDVTKFGRGDSASPAPATTPAQPQQSQSQTHHTAQQPFVNPALPPGYSYTGLPYYTGMPSAFQYGPTMFVPPASAKQHGVNLSTPTPPFQQASGYGQHGYSTGYDDLTQGTAAGDYSKGGYAGSSQAPNKSAGSGPGKGVSVSSSTTGLPDMTGSVYNKTQTFDKQGFHAGGYMF

SEQ ID NO: 843615 - protein, 270 aa, Homo sapiens
AAAAGLGSSESSSDFLFCTYIILYILYMMTSVSSDHCRGAREKPQISAAQSTQPQKQVVQATAEQMRLAQVIFDKNDSDFEAKVKQLMEVTGKNQDECIVALHDCNGDVNKAINILLEGNSDTTSWETVGCKKKNFAKENSENKENREKKSEKESSRGRGNNNRKGRGGNRGREFRGEENGIDCNQVDKPSDRGKRARGRGFGRGRGRGAGRFSTQGMGTFNPADYSDSTSTDVCGTKLVVWEAAQNGADEGTDLDCRGRRPEGSHPRIS

SEQ ID NO: 843616 - protein, 137 aa, Homo sapiens
GTHRGTVGLAAAHHPRGRPHGEWLLFWLPGVASLSLQASACPMGAFPFLGQRRMLPRCGQSSRVQRNPDQSLGLGPKPCSLFHSQYELGQSFSPPVCQFPHLYKRHLDWNRAAYTLNESPRGLVEEQAQIQWVWAGA

SEQ ID NO: 843617 - protein, 677 aa, Homo sapiens
VLGLAATAKSNTSMSLQRIVRVSLEHPTSAVCVAGVETLVDIYGSVPEGTEMFEVYGTPGVDIYISPNMERGRERADTRRWRFDATLEIIVVMNSPSNDLNDSHVQISYHSSHEPLPLAYAVLYLTCVDISLDCDLNCEGRQDRNFVDKRQWVWGPSGYGGILLVNCDRDDPSCDVQDNCDQHVHCLQDLEDMSVMVLRTQGPAALFDDHKLVLHTSSYDAKRAQVFHICGPEDVCEAYRHVLGQDKVSYEVPRLHGDEERFFVEGLSFPDAGFTGLISFHVTLLDDSNEDFSASPIFTDTVVFRVAPWIMTPSTLPPLEVYVCRVRNNTCFVDAVAELARKAGCKLTICPQAENRNDRWIQDEMELGYVQAPHKTLPVVFDSPRNGELQDFPYKRILGPDFGYVTREPRDRSVSGLDSFGNLEVSPPVVANGKEYPLGRILIGGNLPGSSGRRVTQVVRDFLHAQKVQPPVELFVDWLAVGHVDEFLSFVPAPDGKGFRMLLASPGACFKLFQEKQKCGHGRALLFQGVVDDEQVKTISINQVLSNKDLINYNKFVQSCIDWNREVLKRELGLAECDIIDIPQLFKTERKKATAFFPDLVNMLVLGKHLGIPKPFGPIINGCCCLEEKVRSLLEPLGLHCTFIDDFTPYHMLHGEVHCGTNVCRKPFSFKWWNMVP

SEQ ID NO: 843618 - protein, 104 aa, Homo sapiens
MPEAHMQPAKLQTSLPTTDHGSKKPVSCYLPPLSNAHPMCIEVQNAQNCSSAAATLEPSIISDTCFYKPITKDQLSSRSELNTVRLKCLNSLRGWKILNQLSLT

SEQ ID NO: 843619 - protein, 104 aa, Homo sapiens; identical to SEQ ID NO: 843618

SEQ ID NO: 843620 - protein, 107 aa, Homo sapiens
PGLSSAHPRSSQKLPRLVSTGIGMEGSHGWLSPSRSRKRKLLKRRWGLGEDINQHGQDEDGWPLGTHLFGMNDVGKREWKWGTVAGTQKSSGPDEAKSQGSASNYSS

SEQ ID NO: 843621 - protein, 148 aa, Homo sapiens
MRYTPSLPSLQTSEWTSSLSVRAKCTQFCSVTTSTTGQCEVFELVLTENCQLPKDLGALLPTPGVRSCAWPPCLGYMQWSSRSLPHPCGLWDPLFQPAQGTSGCLRTQPSVKIRQVPSVCSWSTKKNFNFENGICIPKCSLRCLSSTK

SEQ ID NO: 843622 - protein, 148 aa, Homo sapiens; identical to SEQ ID NO: 843621

SEQ ID NO: 843623 - protein, 148 aa, Homo sapiens; identical to SEQ ID NO: 843621

SEQ ID NO: 843624 - protein, 148 aa, Homo sapiens; identical to SEQ ID NO: 843621

SEQ ID NO: 843625 - protein, 148 aa, Homo sapiens; identical to SEQ ID NO: 843621

SEQ ID NO: 843626 - protein, 213 aa, Homo sapiens
AAYTLSDDSWWADLNYFLSSLPFLAAVDSGVMGISSDQVRLLPPPKNERKFCYDVSSCRSSFPETMNKWNTFYQYLQSPFSKFDDLLKYLWAAHTSTLADNIKSFEDRYDYYSKAEAHFERSWVLAVDHLAAVLFPTTLIRSYKFQKGMPPRILLNTDVAPFISDFTAFQNVVLVLLNMLDNVDKSIGYLCTEKSNVYRDHSESSSRSYGNNS

SEQ ID NO: 843627 - protein, 124 aa, Homo sapiens
LSREMIRNIGLARCVGRGRYDYYSKAEAHFERSWVLAVDHLAAVLFPTTLIRSYKFQKGMPPRILLNTDVAPFISDFTAFQNVVLVLLNMLDNVDKSIGYLCTEKSNVYRDHSESSSRSYGNNS

SEQ ID NO: 843628 - protein, 481 aa, Homo sapiens
MAYNDTDRNQTEKLLKRVRELEQEVQRLKKEQAKNKEDSNIRENSSGAGKTKRAFDFSAHGRRHVALRIAYMGWGYQGFASQENTNNTIEEKLFEALTKTRLVESRQTSNYHRCGRTDKGVSAFGQVISLDLRSQFPRGRDSEDFNVKEEANAAAEEIRYTHILNRVLPPDIRILAWAPVEPSFSARFSCLERTYRYFFPRADLDIVTMDYAAQKYVGTHDFRNLCKMDVANGVINFQRTILSAQVQLVGQSPGEGRWQEPFQLCQFEVTGQAFLYHQVRCMMAILFLIGQGMEKPEIIDELLNIEKNPQKPQYSMAVEFPLVLYDCKFENVKWIYDQEAQEFNITHLQQLWANHAVKTHMLYSMLQGLDTVPVPCGIGPKMDGMTEWGNVKPSVIKQTSAFVEGVKMRTYKPLMDRPKCQGLESRIQHFVRRGRIEHPHLFHEEETKAKRDCNDTLEEDNTNLETPTKRVCVDTEIKSII

SEQ ID NO: 843629 - protein, 315 aa, Homo sapiens
MAYNDTDRNQTEKLLKRVRELEQEVQRLKKEQAKNKEDSNIRENSSGAGKTKRAFDFSAHGRRHVALRIAYMGWGYQGFASQENTNNTIEEKLFEALTKTRLVESRQTSNYHRCGRTDKGVSAFGQVISLDLRSQFPRGRDSEDFNVKEEANAAAEEIRYTHILNRVLPPDIRILAWAPVEPSFSARFSCLERTYRYFFPRADLDIVTMDYAAQKYVGTHDFRNLCKMDVANGVINFQRTILSAQVQLVGQSPGEGRWQEPFQLCQFEVTGQAFLYHQVRCMMAILFLIGQGMEKPEIIDELLNIEKNPQKPQYR

SEQ ID NO: 843630 - protein, 166 aa, Homo sapiens [sequence omitted]

SEQ ID NO: 843631 - protein, 372 aa, Homo sapiens
HSDSFLSRKRGAAGCRKVISLDLRSQFPRGRDSEDFNVKEEANAAAEEIRYTHILNRVLPPDIRILAWAPVEPSFSARFSCLERTYRYFFPRADLDIVTMDYAAQKYVGTHDFRNLCKMDVANGVINFQRTILSAQVQLVGQSPGEGRWQEPFQLCQFEVTGQAFLYHQVRCMMAILFLIGQGMEKPEIIDELLNIEKNPQKPQYSMAVEFPLVLYDCKFENVKWIYDQEAQEFNITHLQQLWANHAVKTHMLYSMLQGLDTVPVPCGIGPKMDGMTEWGNVKPSVIKQTSAFVEGVKMRTYKPLMDRPKCQGLESRIQHFVRRGRIEHPHLFHEEETKAKRDCNDTLEEDNTNLETPTKRVCVDTEIKSII

SEQ ID NO: 843632 - protein, 106 aa, Homo sapiens
MHRVCALRPVRAEAELVIGLQQHGEEVWCGWTDGPLRHMKYSKPSINQTCFSVLSLIFVQCVGFFPLMMSLVFYFWFICRLSPSLAMALLLCPPKESFTSLGLRNY

SEQ ID NO: 843633 - protein, 106 aa, Homo sapiens; identical to SEQ ID NO: 843632

SEQ ID NO: 843634 - protein, 216 aa, Homo sapiens
MRSLGALLLLLSACLAVSAGPVPTPPDNIQVQATCPWLKKIMDRMTVSTLVLGEGATEAEISMTSTRWRKGVCEETSGAYEKTDTDGKFLYHKSKWNITMESYVVHTNYDEYAIFLTKKFSRHHGPTITAKLYGRAPQLRETLLQDFRVVAQGVGIPEDSIFTMADRGECGPGEQEQSPSYIPEGRRAGVPLCQLVIGRALMGPAGFYNGPMARSL

SEQ ID NO: 843635 - protein, 134 aa, Homo sapiens
  misc_feature (134)..(134): Xaa can be any naturally occurring amino acid
MESYVVHTNYDEYAIFLTKKFSRHHGPTITAKLYGRAPQLRETLLQDFRVVAQGVGIPEDSIFTMADRGECVLGSRDQKPSYFRESGGLVLPKKRKIRGGQLVLKYQEDSAIGYLPALVGGPQDSLLGIQAVGX

SEQ ID NO: 843636 - protein, 235 aa, Homo sapiens
MESYVVHTNYDEYAIFLTKKFSRHHGPTITAKLYGRAPQLRETLLQDFRVVAQGVGIPEDSIFTMADRGECVPGEQEPEPILIPRVRRAVLPQEEEGSGGGQLVTEVTKKEDSCQLGYSAGPCMGMTSRYFYNGTSMACETFQYGGCMGNGNNFVTEKECLQTCRTVAACNLPIVRGPCRAFIQLWAFDAVKGKCVLFPYGGCQGNGNKFYSEKECREYCGVPGDGDEELLRFSN

SEQ ID NO: 843637 - protein, 352 aa, Homo sapiens
MRSLGALLLLLSACLAVSAGPVPTPPDNIQVQENFNISRIYGKWYNLAIGSTCPWLKKIMDRMTVSTLVLGEGATEAEISMTSTRWRKGVCEETSGAYEKTDTDGKFLYHKSKWNITMESYVVHTNYDEYAIFLTKKFSRHHGPTITAKLYGRAPQLRETLLQDFRVVAQGVGIPEDSIFTMADRGECVPGEQEPEPILIPRVRRAVLPQEEEGSGGGQLVTEVTKKEDSCQLGYSAGPCMGMTSRYFYNGTSMACETFQYGGCMGNGNNFVTEKECLQTCRTVAACNLPIVRGPCRAFIQLWAFDAVKGKCVLFPYGGCQGNGNKFYSEKECREYCGVPGDGDEELLRFSN

SEQ ID NO: 843638 - protein, 235 aa, Homo sapiens; identical to SEQ ID NO: 843636

SEQ ID NO: 843639 - protein, 235 aa, Homo sapiens; identical to SEQ ID NO: 843636

SEQ ID NO: 843640 - protein, 334 aa, Homo sapiens
MRSLGALLLLLSACLAVSAGPVPTPPDNIQVQATCPWLKKIMDRMTVSTLVLGEGATEAEISMTSTRWRKGVCEETSGAYEKTDTDGKFLYHKSKWNITMESYVVHTNYDEYAIFLTKKFSRHHGPTITAKLYGRAPQLRETLLQDFRVVAQGVGIPEDSIFTMADRGECVPGEQEPEPILIPRVRRAVLPQEEEGSGGGQLVTEVTKKEDSCQLGYSAGPCMGMTSRYFYNGTSMACETFQYGGCMGNGNNFVTEKECLQTCRTVAACNLPIVRGPCRAFIQLWAFDAVKGKCVLFPYGGCQGNGNKFYSEKECREYCGVPGDGDEELLRFSN

SEQ ID NO: 843641 - protein, 334 aa, Homo sapiens; identical to SEQ ID NO: 843640

SEQ ID NO: 843642 - protein, 272 aa, Homo sapiens
MTSTRWRKGVCEETSGAYEKTDTDGKFLYHKSKWNITMESYVVHTNYDEYAIFLTKKFSRHHGPTITAKLYGRAPQLRETLLQDFRVVAQGVGIPEDSIFTMADRGECVPGEQEPEPILIPRVRRAVLPQEEEGSGGGQLVTEVTKKEDSCQLGYSAGPCMGMTSRYFYNGTSMACETFQYGGCMGNGNNFVTEKECLQTCRTVAACNLPIVRGPCRAFIQLWAFDAVKGKCVLFPYGGCQGNGNKFYSEKECREYCGVPGDGDEELLRFSN

SEQ ID NO: 843643 - protein, 334 aa, Homo sapiens
MRSLGALLLLLSACLAVSAGPVPTPPDNIQVQENFNISRIYGKWYNLAIGSTCPWLKKIMDRMTVSTLVLGEGATEAEISMTSTRWRKGVCEETSGAYEKTDTDGKFLYHKSKWNITMESYVVHTNYDEYAIFLTKKFSRHHGPTITAKLYGRAPQLRETLLQDFRVVAQGVGIPEDSIFTMADRGECVPGEQEPEPILIPRVRRAVLPQEEEGSGGGQLVTEVTKKEDSCQLGYSAGPCMGMTSRYFYNGTSMACETFQYGGCMGNGNNFVTVRGPCRAFIQLWAFDAVKGKCVLFPYGGCQGNGNKFYSEKECREYCGVPGDGDEELLRFSN

SEQ ID NO: 843644 - protein, 283 aa, Homo sapiens
AVGIRHEAEISMTSTRCRKGVCEETSGAYEKTDTDGKFLYHKSKWNITMESYVVHTNYDEYAIFLTKKFSRHHGPTITAKLYGRAPQLRETLLQDFRVVAQGVGIPEDSIFTMADRGECVPGEQEPEPILIPRVRRAVLPQEEEGSGGGQLVTEVTKKEDSCQLGYSAGPCMGMTSRYFYNGTSMACETFQYGGCMGNGNNFVTEKECLQTCRTVAACNLPIVRGPCRAFIQLWAFDAVKGKCVLFPYGGCQGNGNKFYSEKECREYCGVPGDGDEELLRFSN

SEQ ID NO: 843645 - protein, 117 aa, Homo sapiens
MESYVVHTNYDEYAIFLTKKFSRHHGPTITAKLYGRAPQLRETLLQDFRVVAQGVGIPEDSIFTMADRGECVPGEQEPEPILIPRVRRAVLPQEEEGSGGGQLVTEVTKKEGNEHLP

SEQ ID NO: 843646 - protein, 176 aa, Homo sapiens
MSLLQDFRVVAQGVGIPEDSIFTMADRGECVPGEQEPEPILIPRVRRAVLPQEEEGSGGGQLVTEVTKKEDSCQLGYSAGPCMGMTSRYFYNGTSMACETFQYGGCMGNGNNFVTVRGPCRAFIQLWAFDAVKGKCVLFPYGGCQGNGNKFYSEKECREYCGVPGDGDEELLRFSN

SEQ ID NO: 843647 - protein, 156 aa, Homo sapiens
  misc_feature (152)..(152): Xaa can be any naturally occurring amino acid
MRSLGALLLLLSACLAVSAGPVPTPPDNIQVQENFNISRIYGKWYNLAIGSTCPWLKKIMDRMTVSTLVLGEGATEAEISMTSTRWRKGVCEETSGAYEKTDTDGKFLYHKSKWNITMESYVVHTNYDEYAIFLTKKFSRHHGPTITAKLYXGRRS

SEQ ID NO: 843648 - protein, 161 aa, Homo sapiens
MRSLGALLLLLSACLAVSAGPVPTPPDNIQVQENFNISRIYGKWYNLAIGSTCPWLKKIMDRMTVSTLVLGEGATEAEISMTSTRWRKGVCEETSGAYEKTDTDGKFLYHKSKWNITMESYVVHTNYDEYAIFLTKKFSRHHGPTITAKLYGDEELLRFSN

SEQ ID NO: 843649 - protein, 110 aa, Homo sapiens
MRSLGALLLLLSACLAVSAGPVPTPPDNIQVQENFNISRIYGKWYNLAIGSTCPWLKKIMDRMTVSTLVLGEGATEAEISMTSTRWRKGVCEKEKTPFWGGGENPLFFFF

SEQ ID NO: 843650 - protein, 352 aa, Homo sapiens; identical to SEQ ID NO: 843637

SEQ ID NO: 843651 - protein, 133 aa, Homo sapiens
  misc_feature (133)..(133): Xaa can be any naturally occurring amino acid
MESYVVHTNYDEYAIFLTKKFSRHHGPTITAKLYGRAPQLRETLLQDFRVVAQGVGIPEDSIFTMADRGDGVPGSRNRAHLNPRGRRLGYPRKEDQGWATGTEVPGRILQLGTCRAWWEGPQDSLLGIQAVGX

SEQ ID NO: 843652 - protein, 215 aa, Homo sapiens
  misc_feature (215)..(215): Xaa can be any naturally occurring amino acid
MRSLGALLLLLSACLAVSAGPVPTPPDNIQVQATCPWLKKIMDRMTVSTLVLGEGATEAEISMTSTRWRKGVCEETSGAYEKTDTDGKFLYHKSKWNITMESYVVHTNYDEYAIFLTKKFSRHHGPTITAKLYGGRLELRDFIFTMADRGECVLGSRDQKPSYFRESGGLVLPKKRKIRGGQLVLKYQEEFCNWLLAGPGGRTTGFFMGIQAVGX

SEQ ID NO: 843653 - protein, 235 aa, Homo sapiens; identical to SEQ ID NO: 843636

SEQ ID NO: 843654 - protein, 235 aa, Homo sapiens; identical to SEQ ID NO: 843636

SEQ ID NO: 843655 - protein, 307 aa, Homo sapiens
  misc_feature (266)..(266): Xaa can be any naturally occurring amino acid
  misc_feature (279)..(280): Xaa can be any naturally occurring amino acid
  misc_feature (291)..(291): Xaa can be any naturally occurring amino acid
  misc_feature (295)..(295): Xaa can be any naturally occurring amino acid
  misc_feature (301)..(301): Xaa can be any naturally occurring amino acid
MESYVVHTNYDEYAIFLTKKFSRHHGPTITAKLYGRAPQLRETLLQDFRVVAQGVGIPEDSIFTMADRGECVPGEQEPEPILIPRVRRAVLPQEEEGSGGGQLVTEVTKKEDSCQLGYSAGPCMGMTSRYFYNGTSMACETFQYGGCMGNGNNFVTEKECLQTCRTVAACNLPIVRGPCRAFIQLWAFDAVKGKCVLFPYGGCQGNGNKFYSEKECREYCGVPGDGDKSCCAFQLQLGRFEVKGWPMFFPGSFESNRQHLGPKFYXTSSPLSSFIIFFXXSLSSLVVFFYXPLFXLFLIFXFFIIFI

SEQ ID NO: 843656 - protein, 217 aa, Homo sapiens
MESYVVHTNYDEYAIFLTKKFSRHHGPTITAKLYGRAPQLRETLLQDFRVVAQGVGIPEDSIFTMADRGECVPGEQEPEPILIPRVRRAVLPQEEEGSGGGQLVTEVTKKEDSCQLGYSAGPCMGMTSRYFYNGTSMACETFQYGGCMGNGNNFVTVRGPCRAFIQLWAFDAVKGKCVLFPYGGCQGNGNKFYSEKECREYCGVPGDGDEELLRFSN

SEQ ID NO: 843657 - protein, 257 aa, Homo sapiens
MESYVVHTNYDEYAIFLTKKFSRHHGPTITAKLYGRAPQLRETLLQDFRVVAQGVGIPEDSIFTMADRGECVPGEQEPEPILIPGYRKAIAGKESATASSLSLPRRRVRRAVLPQEEEGSGGGQLVTEVTKKEDSCQLGYSAGPCMGMTSRYFYNGTSMACETFQYGGCMGNGNNFVTEKECLQTCRTVAACNLPIVRGPCRAFIQLWAFDAVKGKCVLFPYGGCQGNGNKFYSEKECREYCGVPGDGDEELLRFSN

SEQ ID NO: 843658 - protein, 192 aa, Homo sapiens
MDPPLLPSSTGVGIPEDSIFTMADRGECVPGEQEPEPILIPRVRRAVLPQEEEGSGGGQLVTEVTKKEDSCQLGYSAGPCMGMTSRYFYNGTSMACETFQYGGCMGNGNNFVTEKECLQTCRTVAACNLPIVRGPCRAFIQLWAFDAVKGKCVLFPYGGCQGNGNKFYSEKECREYCGVPGDGDEELLRFSN

SEQ ID NO: 843659 - protein, 194 aa, Homo sapiens
MSLLQDFRVVAQGVGIPEDSIFTMADRGECVPGEQEPEPILIPRVRRAVLPQEEEGSGGGQLVTEVTKKEDSCQLGYSAGPCMGMTSRYFYNGTSMACETFQYGGCMGNGNNFVTEKECLQTCRTVAACNLPIVRGPCRAFIQLWAFDAVKGKCVLFPYGGCQGNGNKFYSEKECREYCGVPGDGDEELLRFSN

SEQ ID NO: 843660 - protein, 154 aa, Homo sapiens
MSDRVRRAVLPQEEEGSGGGQLVTEVTKKEDSCQLGYSAGPCMGMTSRYFYNGTSMACETFQYGGCMGNGNNFVTEKECLQTCRTVAACNLPIVRGPCRAFIQLWAFDAVKGKCVLFPYGGCQGNGNKFYSEKECREYCGVPGDGDEELLRFSN

SEQ ID NO: 843661 - protein, 176 aa, Homo sapiens; identical to SEQ ID NO: 843646

SEQ ID NO: 843662 - protein, 105 aa, Homo sapiens
DQQSQGFLKFHASLHSTAACNLPIVRGPCRAFIQLWAFDAVKGKCVLFPYGGCQGNGNKFYSEKECREYCGVPGDGRQPCRVPGWAEGLLESRWESPGRSRGLES

SEQ ID NO: 843663 - protein, 186 aa, Homo sapiens
GQKEFKPNLCLRTDWVCSVDFQASFARGFVKDWLSFKPQGSGRKQSATSSPHPAALRALDSAGRSLLRRNGAREGGLSLTLAVCQVDDILGEGSDDSDSEKRRPEEQEEEPQPRKPGTRRERTLGAPASSERSAAGGRGPRGHKRKLNEEDAASESSRESSNEDEGSSSEADEMAKALEAELNDLM

SEQ ID NO: 843664 - protein, 894 aa, Homo sapiens
GLCRRGRRCALSAAQAPYRPPARPLSAMEVPAAGRVPAEGAPTAAVAEVRCPGPAPLRLLEWRVAAGAAVRIGSVLAVFEAAASAQSSGASQSRVASGGCVRPARPERRLRSERAGVVRELCAQPGQVVAPGAVLVRLEGCSHPVVMKGLCAECGQDLTQLQSKNGKQQVPLSTATVSMVHSVPELMVSSEQAEQLGREDQQRLHRNRKLVLMVDLDQTLIHTTEQHCQQMSNKGIFHFQLGRGEPMLHTRLRPHCKDFLEKIAKLYELHVFTFGSRLYAHTIAGFLDPEKKLFSHRILSRDECIDPFSKTGNLRNLFPCGDSMVCIIDDREDVWKFAPNLITVKKYVYFQGTGDMNAPPGSRESQTRKKVNHSRGTEVSEPSPPVRDPEGVTQAPGVEPSNGLEKPARELNGSEAATPRDSPRPGKPDERDIWPPAQAPTSSQELAGAPEPQGSCAQGGRVAPGQRPAQGATGTDLDFDLSSDSESSSESEGTKSSSSASDGESEGKRGRQKPKAAPEGAGALAQGSSLEPGRPAAPSLPGEAEPGAHAPDKEPELGGQEEGERDGLCGLGNGCADRKEAETESQNSELSGVTAGESLDQSMEEEEEEDTDEDDHLIYLEEILVRVHTDYYAKYDRYLNKEIEEAPDIRKIVPELKSKVLADVAIIFSGLHPTNFPIEKTREHYHATALGAKILTRLVLSPDAPDRATHLIAARAGTEKVLQAQECGHLHVVNPDWLWSCLERWDKVEEQLFPLRDDHTKAQRENSPAAFPDREGVPPTALFHPMPVLPKAQPGPEVRIYDSNTGKLIRTGARGPPAPSSSLPIRQEPSSFRWTTSLEKAATTATARRGGLRSRRRSPSPGSQGPAGSGRSGHLRPARGARQGAGGPEATRGS

SEQ ID NO: 843665 - protein, 277 aa, Homo sapiens
PPSPLPPPYLVAGLIGRGLHVVNPDWLWSCLERWDKVEEQLFPLRDDHTKAQRENSPAAFPDREGVPPTALFHPMPVLPKAQPGPEVRIYDSNTGKLIRTGARGPPAPSSSLPIRQEPSSFRAVPPPQPQMFGEELPDAQDGEQPGPSRRKRQPSMSETMPLYTLCKEDLESMDKEVDDILGEGSDDSDSEKRRPEEQEEEPQPRKPGTRRERTLGAPASSERSAAGGRGPRGHKRKLNEEDAASESSRESSNEDEGSSSEADEMAKALEAELNDLM

SEQ ID NO: 843666 - protein, 138 aa, Homo sapiens
MSGRNVHLQQVNTCFVSGVLVCNRAGASSPALGLCCPHVCDVALGGGLCVSLTRELCRLVLKPRKPLPKCRPGGDPALCVCHKHLTPCLLLCRGHKRKLNEEDAASESSRESSNEDEGSSSEADEMAKALEAELNDLM

SEQ ID NO: 843667 - protein, 130 aa, Homo sapiens
EVQPSEGLGGVQPGEGPGGVQLGEGPEPCRGAVQVKALVGCSRVRALSPGGVQPGEGPGGCSRMWALSLQCWPEQPDAAGSPAGTEKVLQAQECGHLHVVNPDWLWSCLERWDKVEEQLFPLRDDHTKAQ

SEQ ID NO: 843668 - protein, 988 aa, Homo sapiens
GLCRRGRRCALSAAQAPYRPPARPLSAMEVPAAGRVPAEGAPTAAVAEVRCPGPAPLRLLEWRVAAGAAVRIGSVLAVFEAAASAQSSGASQSRVASGGCVRPARPERRLRSERAGVVRELCAQPGQVVAPGAVLVRLEGCSHPVVMKGLCAECGQDLTQLQSKNGKQQVPLSTATVSMVHSVPELMVSSEQAEQLGREDQQRLHRNRKLVLMVDLDQTLIHTTEQHCQQMSNKGIFHFQLGRGEPMLHTRLRPHCKDFLEKIAKLYELHVFTFGSRLYAHTIAGFLDPEKKLFSHRILSRDECIDPFSKTGNLRNLFPCGDSMVCIIDDREDVWKFAPNLITVKKYVYFQGTGDMNAPPGSRESQTRKKVNHSRGTEVSEPSPPVRDPEGVTQAPGVEPSNGLEKPARELNGSEAATPRDSPRPGKPDERDIWPPAQAPTSSQELAGAPEPQGSCAQGGRVAPGQRPAQGATGTDLDFDLSSDSESSSESEGTKSSSSASDGESEGKRGRQKPKAAPEGAGALAQGSSLEPGRPAAPSLPGEAEPGAHAPDKEPELGGQEEGERDGLCGLGNGCADRKEAETESQNSELSGVTAGESLDQSMEEEEEEDTDEDDHLIYLEEILVRVHTDYYAKYDRYLNKEIEEAPDIRKIVPELKSKVLADVAIIFSGLHPTNFPIEKTREHYHATALGAKILTRLVLSPDAPDRATHLIAARAGTEKVLQAQECGHLHVVNPDWLWSCLERWDKVEEQLFPLRDDHTKAQRENSPAAFPDREGVPPTALFHPMPVLPKAQPGPEVRIYDSNTGKLIRTGARGPPAPSSSLPIRQEPSSFRAVPPPQPQMFGEELPDAQDGEQPGPSRRKRQPSMSETMPLYTLCKEDLESMDKEVDDILGEGSDDSDSEKRRPEEQEEEPQPRKPGTRRERTLGAPASSERSAAGGRGPRGHKRKLNEEDAASESSRESSNEDEGSSSEADEMAKALEAELNDLM

SEQ ID NO: 843669 - protein, 964 aa, Homo sapiens
GLCRRGRRCALSAAQAPYRPPARPLSAMEVPAAGRVPAEGAPTAAVAEVRCPGPAPLRLLEWRVAAGAAVRIGSVLAVFEAAASAQSSGASQSRVASGGCVRPARPERRLRSERAGVVRELCAQPGQVVAPGAVLVRLEGCSHPVVMKGLCAECGQDLTQLQSKNGKQQVPLSTATVSMVHSVPELMVSSEQAEQLGREDQQRLHRNRKLVLMVDLDQTLIHTTEQHCQQMSNKGIFHFQLGRGEPMLHTRLRPHCKDFLEKIAKLYELHVFTFGSRLYAHTIAGFLDPEKKLFSHRILSRDECIDPFSKTGNLRNLFPCGDSMVCIIDDREDVWKFAPNLITVKKYVYFQGTGDMNAPPGSRESQTRKKVNHSRGTEVSEPSPPVRDPEGVTQAPGVEPSNGLEKPARELNGSEAPPRGTHPAPGSQTRGTSGPLPRPPPAAKSWQALLSPRDPVRRVAGWHRDSGLPRVPRALTWTLTYPATARAAVSPRARSPPPPPLMAKRGEKRPAEAEGCPRGSRGAGTGQFPGPELGGQEEGERDGLCGLGNGCADRKEAETESQNSELSGVTAGESLDQSMEEEEEEDTDEDDHLIYLEEILVRVHTDYYAKYDRYLNKEIEEAPDIRKIVPELKSKVLADVAIIFSGLHPTNFPIEKTREHYHATALGAKILTRLVLSPDAPDRATHLIAARAGTEKVLQAQECGHLHVVNPDWLWSCLERWDKVEEQLFPLRDDHTKAQRENSPAAFPDREGVPPTALFHPMPVLPKAQPGPEVRIYDSNTGKLIRTGARGPPAPSSSLPIRQEPSSFRAVPPPQPQMFGEELPDAQDGEQPGPSRRKRQPSMSETMPLYTLCKEDLESMDKEVDDILGEGSDDSDSEKRRPEEQEEEPQPRKPGTRRERTLGAPASSERSAAGGRGPRGHKRKLNEEDAASESSRESSNEDEGSSSEADEMAKALEAELNDLM

SEQ ID NO: 843670 - protein, 1008 aa, Homo sapiens
GLCRRGRRCALSAAQAPYRPPARPLSAMEVPAAGRVPAEGAPTAAVAEVRCPGPAPLRLLEWRVAAGAAVRIGSVLAVFEAAASAQSSGASQSRVASGGCVRPARPERRLRSERAGVVRELCAQPGQVVAPGAVLVRLEGCSHPVVMKGLCAECGQDLTQLQSKNGKQQVPLSTATVSMVHSVPELMVSSEQAEQLGREDQQRLHRNRKLVLMVDLDQTLIHTTEQHCQQMSNKGIFHFQLGRGEPMLHTRLRPHCKDFLEKIAKLYELHVFTFGSRLYAHTIAGFLDPEKKLFSHRILSRDECIDPFSKTGNLRNLFPCGDSMVCIIDDREDVWKFAPNLITVKKYVYFQGTGDMNAPPGSRESQTRKKVNHSRGTEVSEPSPPVRDPEGVTQAPGVEPSNGLEKPARELNGSEAATPRDSPRPGKPDERDIWPPAQAPTSSQELAGAPEPQGSCAQGGRVAPGQRPAQGATGTDLDFDLSSDSESSSESEGTKSSSSASDGESEGKRGRQKPKAAPEGAGALAQGSSLEPGRPAAPSLPGEAEPGAHAPDKEPELGGQEEGERDGLCGLGNGCADRKEAETESQNSELSGVTAGESLDQSMEEEEEEDTDEDDHLIYLEEILVRVHTDYYAKYDRYLNKEIEEAPDIRKIVPELKSKVLADVAIIFSGLHPTNFPIEKTREHYHATALGAKILTRLVLSPDAPDRATHLIAARAGTEKVLQAQECGHLHVVNPDWLWSCLERWDKVEEQLFPLRDDHTKAQRENSPAAFPDREGVPPTALFHPMPVLPKAQPGPEVRIYDSNTGKLIRTGARGPPAPSSSLPIRQEPSSFRAVPPPQPQMFGEELPDAQDGEQPGPSRRKRQPSMSETMPLYTLCKEDLESMDKEVDDILGEGSDDSDSEKRRPEEQEEEPQPRKPGTRRERTLGAPASSERSAAGGRGPSSQNGVRWRKPNGRMGAGFSRNSRQRVCGGKEMTDEFVNCQKLVAVATGGQTRGPDSVVSVSRDWK

SEQ ID NO: 843671 - protein, 168 aa, Homo sapiens
RLGPGLGPSPTVRRAGGLSLAVGPATARVLAAGRRWGGRAEDEEFEAFRGACRGVRLCGTLRRAPSAGAPGSRFVAEGSTRDAPPVAAVASFGVRDLLRGWKAARRRGALHSPGGKPARTRVRTHGAAGGRGGSGPRGRRASREAILLHLPVILKANRSQTRAQRLSK

SEQ ID NO: 843672 - protein, 168 aa, Homo sapiens; identical to SEQ ID NO: 843671

SEQ ID NO: 843673 - protein, 1351 aa, Homo sapiens
CADAVAAAAAAAAATAFAATVSAAAVLALPLGASIVPAAPGPETGHLGGSRNGRRPTELRPQGAGGTRSGRGQLRNPGEPGPKRGAAGGRGGEVYGLRSWGSPFPARLSPPTSPSGVGAPAGAPGDEARTRGGRCDSMGVDFDVKTFCHNLRATKPPYECPVETCRKVYKSYSGIEYHLYHYDHDNPPPPQQTPLRKHKKKGRQSRPANKQSPSPSEVSQSPGREVMSYAQAQRMVEVDLHGRVHRISIFDNLDVVSEDEEAPEEAPENGSNKENTETPAATPKSGKHKNKEKRKDSNHHHHHNVSASTTPKLPEVVYRELEQDTPDAPPRPTSYYRYIEKSAEELDEEVEYDMDEEDYIWLDIMNERRKTEGVSPIPQEIFEYLMDRLEKESYFESHNKGDPNALVDEDAVCCICNDGECQNSNVILFCDMCNLEVHQECYGVPYIPEGQWLCRRCLQSPSRAVDCALCPNKGGAFKQTDDGRWAHVVCALWIPEVCFANTVFLEPIDSIEHIPPARWKLTCYICKQRGSGACIQCHKANCYTAFHVTCAQQAGLYMKMEPVRETGANGTSFSVRKTAYCDIHTPPGSARRLPALSHSEGEEDEDEEEDEGKGWSSEKVKKAKAKSRIKMKKARKILAEKRAAAPVVSVPCIPPHRLSKITNRLTIQRKSQFMQRLHSYWTLKRQSRNGVPLLRRLQTHLQSQRNCDQVGRDSEDKNWALKEQLKSWQRLRHDLERARLLVELIRKREKLKRETIKVQQIAMEMQLTPFLILLRKTLEQLQEKDTGNIFSEPVPLSEVPDYLDHIKKPMDFFTMKQNLEAYRYLNFDDFEEDFNLIVSNCLKYNAKDTIFYRAAVRLREQGGAVLRQARRQAEKMGIDFETGMHIPHSLAGDEATHHTEDAAEEERLVLLENQKHLPVEEQLKLLLERLDEVNASKQSVGRSRRAKMIKKEMTALRRKLAHQRETGRDGPERHGPSSRGSLTPHPAACDKDGQTDSAAEESSSQETSKGLGPNMSSTPAHEVGRRTSVLFSKKNPKTAGPPKRPGRPPKNRESQMTPSHGGSPVGPPQLPIMSSLRQRKRGRSPRPSSSSDSDSDKSTEDPPMDLPANGFSGGNQPVKKSFLVYRNDCSLPRSSSDSESSSSSSSSAASDRTSTTPSKQGRGKPSFSRGTFPEDSSEDTSGTENEAYSVGTGRGVGHSMVRKSLGRGAGWLSEDEDSPLDALDLVWAKCRGYPSYPALIIDPKMPREGMFHHGVPIPVPPLEVLKLGEQMTQEAREHLYLVLFFDNKRTWQWLPRTKLVPLGVNQDLDKEKMLEGRKSNIRKSVQIAYHRALQHRSKVQGEQSSETSDSD

SEQ ID NO: 843674 - protein, 1385 aa, Homo sapiens
CADAVAAAAAAAAATAFAATVSAAAVLALPLGASIVPAAPGPETGHLGGSRNGRRPTELRPQGAGGTRSGRGQLRNPGEPGPKRGAAGGRGGEVYGLRSWGSPFPARLSPPTSPSGVGAPAGAPGDEARTRGGRCDSMGVDFDVKTFCHNLRATKPPYECPVETCRKVYKSYSGIEYHLYHYDHDNPPPPQQTPLRKHKKKGRQSRPANKQSPSPSEVSQSPGREVMSYAQAQRMVEVDLHGRVHRISIFDNLDVVSEDEEAPEEAPENGSNKENTETPAATPKSGKHKNKEKRKDSNHHHHHNVSASTTPKLPEVVYRELEQDTPDAPPRPTSYYRYIEKSAEELDEEVEYDMDEEDYIWLDIMNERRKTEGVSPIPQEIFEYLMDRLEKESYFESHNKGDPNALVDEDAVCCICNDGECQNSNVILFCDMCNLEVHQECYGVPYIPEGQWLCRRCLQSPSRAVDCALCPNKGGAFKQTDDGRWAHVVCALWIPEVCFANTVFLEPIDSIEHIPPARWKLTCYICKQRGSGACIQCHKANCYTAFHVTCAQQAGLYMKMEPVRETGANGTSFSVRKTAYCDIHTPPGSARRLPALSHSEGEEDEDEEEDEGKGWSSEKVKKAKAKSRIKMKKARKILAEKRAAAPVVSVPCIPPHRLSKITNRLTIQRKSQFMQRLHSYWTLKRQSRNGVPLLRRLQTHLQSQRNCDQVGRDSEDKNWALKEQLKSWQRLRHDLERARLLVELIRKREKLKRETIKVQQIAMEMQLTPFLILLRKTLEQLQEKDTGNIFSEPVPLSEVPDYLDHIKKPMDFFTMKQNLEAYRYLNFDDFEEDFNLIVSNCLKYNAKDTIFYRAAVRLREQGGAVLRQARRQAEKMGIDFETGMHIPHSLAGDEATHHTEDAAEEERLVLLENQKHLPVEEQLKLLLERLDEVNASKQSVGRSRRAKMIKKEMTALRRKLAHQRETGRDGPERHGPSSRGSLTPHPAACDKDGQTDSAAEESSSQETSKGLGPNMSSTPAHEVGRRTSVLFSKKNPKTAGPPKRPGRPPKNRESQMTPSHGGSPVGPPQLPIMSSLRQRKRGRSPRPSSSSDSDSDKSTEDPPMDLPANGFSGGNQPVKKSFLVYRNDCSLPRSSSDSESSSSSSSSAASDRTSTTPSKQGRGKPSFSRGTFPEDSSEDTSGTENEAYSVGTGRGVGHSSKFPCPRPGMLGTQCQGLASPPAADPPPLPHSCEVVRKSLGRGAGWLSEDEDSPLDALDLVWAKCRGYPSYPALIIDPKMPREGMFHHGVPIPVPPLEVLKLGEQMTQEAREHLYLVLFFDNKRTWQWLPRTKLVPLGVNQDLDKEKMLEGRKSNIRKSVQIAYHRALQHRSKVQGEQSSETSDSD

SEQ ID NO: 843675 - protein, 1423 aa, Homo sapiens
CADAVAAAAAAAAATAFAATVSAAAVLALPLGASIVPAAPGPETGHLGGSRNGRRPTELRPQGAGGTRSGRGQLRNPGEPGPKRGAAGGRGGEVYGLRSWGSPFPARLSPPTSPSGVGAPAGAPGDEARTRGGRCDSMGVDFDVKTFCHNLRATKPPYECPVETCRKVYKSYSGIEYHLYHYDHDNPPPPQQTPLRKHKKKGRQSRPANKQSPSPSEVSQSPGREVMSYAQAQRMVEVDLHGRVHRISIFDNLDVVSEDEEAPEEAPENGSNKENTETPAATPKSGKHKNKEKRKDSNHHHHHNVSASTTPKLPEVVYRELEQDTPDAPPRPTSYYRYIEKSAEELDEEVEYDMDEEDYIWLDIMNERRKTEGVSPIPQEIFEYLMDRLEKESYFESHNKGDPNALVDEDAVCCICNDGECQNSNVILFCDMCNLEVHQECYGVPYIPEGQWLCRRCLQSPSRAVDCALCPNKGGAFKQTDDGRWAHVVCALWIPEVCFANTVFLEPIDSIEHIPPARWKLTCYICKQRGSGACIQCHKANCYTAFHVTCAQQAGLYMKMEPVRETGANGTSFSVRKTAYCDIHTPPGSARRLPALSHSEGEEDEDEEEDEGKGWSSEKVKKAKAKSRIKMKKARKILAEKRAAAPVVSVPCIPPHRLSKITNRLTIQRKSQFMQRLHSYWTLKRQSRNGVPLLRRLQTHLQSQRNCDQVGRDSEDKNWALKEQLKSWQRLRHDLERARLLVELIRKREKLKRETIKVQQIAMEMQLTPFLILLRKTLEQLQEKDTGNIFSEPVPLSEVPDYLDHIKKPMDFFTMKQNLEAYRYLNFDDFEEDFNLIVSNCLKYNAKDTIFYRAAVRLREQGGAVLRQARRQAEKMGIDFETGMHIPHSLAGDEATHHTEDGGDISHTHIRGQCRGWTAFQKSPPGSRQCRQKAARLSSGKLSPGMLPKKPDWVNGSSARHSTSWCCYFTAVPAAEEERLVLLENQKHLPVEEQLKLLLERLDEVNASKQSVGRSRRAKMIKKEMTALRRKLAHQRETGRDGPERHGPSSRGSLTPHPAACDKDGQTDSAAEESSSQETSKGLGPNMSSTPAHEVGRRTSVLFSKKNPKTAGPPKRPGRPPKNRESQMTPSHGGSPVGPPQLPIMSSLRQRKRGRSPRPSSSSDSDSDKSTEDPPMDLPANGFSGGNQPVKKSFLVYRNDCSLPRSSSDSESSSSSSSSAASDRTSTTPSKQGRGKPSFSRGTFPEDSSEDTSGTENEAYSVGTGRGVGHSMVRKSLGRGAGWLSEDEDSPLDALDLVWAKCRGYPSYPALIIDPKMPREGMFHHGVPIPVPPLEVLKLGEQMTQEAREHLYLVLFFDNKRTWQWLPRTKLVPLGVNQDLDKEKMLEGRKSNIRKSVQIAYHRALQHRSKVQGEQSSETSDSD

SEQ ID NO: 843676 - protein, 1113 aa, Homo sapiens
CADAVAAAAAAAAATAFAATVSAAAVLALPLGASIVPAAPGPETGHLGGSRNGRRPTELRPQGAGGTRSGRGQLRNPGEPGPKRGAAGGRGGEVYGLRSWGSPFPARLSPPTSPSGVGAPAGAPGDEARTRGGRCDSMGVDFDVKTFCHNLRATKPPYECPVETCRKVYKSYSGIEYHLYHYDHDNPPPPQQTPLRKHKKKGRQSRPANKQSPSPSEVSQSPGREVMSYAQAQRMVEVDLHGRVHRISIFDNLDVVSEDEEAPEEAPENGSNKENTETPAATPKSGKHKNKEKRKDSNHHHHHNVSASTTPKLPEVVYRELEQDTPDAPPRPTSYYRYIEKSAEELDEEVEYDMDEEDYIWLDIMNERRKTEGVSPIPQEIFEYLMDRLEKESYFESHNKGDPNALVDEDAVCCICNDGECQNSNVILFCDMCNLEVHQECYGVPYIPEGQWLCRRCLQSPSRAVDCALCPNKGGAFKQTDDGRWAHVVCALWIPEVCFANTVFLEPIDSIEHIPPARWKLTCYICKQRGSGACIQCHKANCYTAFHVTCAQQAGLYMKMEPVRETGANGTSFSVRKTAYCDIHTPPGSARRLPALSHSEGEEDEDEEEDEGKGWSSEKVKKAKAKSRIKMKKARKILAEKRAAAPVVSVPCIPPHRLSKITNRLTIQRKSQFMQRLHSYWTLKRQSRNGVPLLRRLQTHLQSQRNCDQVGRDSEDKNWALKEQLKSWQRLRHDLERARLLVELIRKREKLKRETIKVQQIAMEMQLTPFLILLRKTLEQLQEKDTGNIFSEPVPLSEVPDYLDHIKKPMDFFTMKQNLEAYRYLNFDDFEEDFNLIVSNCLKYNAKDTIFYRAAVRLREQGGAVLRQARRQAEKMGIDFETGMHIPHSLAGDEATHHTEDAAEEERLVLLENQKHLPVEEQLKLLLERLDEVNASKQSVGRSRRAKMIKKEMTALRRKLAHQRETGRDGPERHGPSSRGSLTPHPAACDKDGQTDSAAEESSSQETSKGLGPNMSSTPAHEVGRRTSVLFSKKNPKTAGPPKRPGRPPKNRESQMTPSHGGSPVGPPQLPIMSSLALSAAGLYRTLQGPMAVQRKEREGPQVRKSSRDLTAL

SEQ ID NO: 843677 - protein, 1357 aa, Homo sapiens
CADAVAAAAAAAAATAFAATVSAAAVLALPLGASIVPAAPGPETGHLGGSRNGRRPTELRPQGAGGTRSGRGQLRNPGEPGPKRGAAGGRGGEVYGLRSWGSPFPARLSPPTSPSGVGAPAGAPGDEARTRGGRCDSMGVDFDVKTFCHNLRATKPPYECPVETCRKVYKSYSGIEYHLYHYDHDNPPPPQQTPLRKHKKKGRQSRPANKQSPSPSEVSQSPGREVMSYAQAQRMVEVDLHGRVHRISIFDNLDVVSEDEEAPEEAPENGSNKENTETPAATPKSGKHKNKEKRKDSNHHHHHNVSASTTPKLPEVVYRELEQDTPDAPPRPTSYYRYIEKSAEELDEEVEYDMDEEDYIWLDIMNERRKTEGVSPIPQEIFEYLMDRLEKESYFESHNKGDPNALVDEDAVCCICNDGECQNSNVILFCDMCNLEVHQECYGVPYIPEGQWLCRRCLQSPSRAVDCALCPNKGGAFKQTDDGRWAHVVCALWIPEVCFANTVFLEPIDSIEHIPPARWKLTCYICKQRGSGACIQCHKANCYTAFHVTCAQQAGLYMKMEPVRETGANGTSFSVRKTAYCDIHTPPGSARRLPALSHSEGEEDEDEEEDEGKGWSSEKVKKAKAKSRIKMKKARKILAEKRAAAPVVSVPCIPPHRLSKITNRLTIQRKSQFMQRLHSYWTLKRQSRNGVPLLRRLQTHLQSQRNCDQVGRDSEDKNWALKEQLKSWQRLRHDLERARLLVELIRKREKLKRETIKVQQIAMEMQLTPFLILLRKTLEQLQEKDTGNIFSEPVPLSEVTELDEVPDYLDHIKKPMDFFTMKQNLEAYRYLNFDDFEEDFNLIVSNCLKYNAKDTIFYRAAVRLREQGGAVLRQARRQAEKMGIDFETGMHIPHSLAGDEATHHTEDAAEEERLVLLENQKHLPVEEQLKLLLERLDEVNASKQSVGRSRRAKMIKKEMTALRRKLAHQRETGRDGPERHGPSSRGSLTPHPAACDKDGQTDSAAEESSSQETSKGLGPNMSSTPAHEVGRRTSVLFSKKNPKTAGPPKRPGRPPKNRESQMTPSHGGSPVGPPQLPIMSSLRQRKRGRSPRPSSSSDSDSDKSTEDPPMDLPANGFSGGNQPVKKSFLVYRNDCSLPRSSSDSESSSSSSSSAASDRTSTTPSKQGRGKPSFSRGTFPEDSSEDTSGTENEAYSVGTGRGVGHSMVRKSLGRGAGWLSEDEDSPLDALDLVWAKCRGYPSYPALIIDPKMPREGMFHHGVPIPVPPLEVLKLGEQMTQEAREHLYLVLFFDNKRTWQWLPRTKLVPLGVNQDLDKEKMLEGRKSNIRKSVQIAYHRALQHRSKVQGEQSSETSDSD

SEQ ID NO: 843678 - protein, 1256 aa, Homo sapiens
CADAVAAAAAAAAATAFAATVSAAAVLALPLGASIVPAAPGPETGHLGGSRNGRRPTELRPQGAGGTRSGRGQLRNPGEPGPKRGAAGGRGGEVYGLRSWGSPFPARLSPPTSPSGVGAPAGAPGDEARTRGGRCDSMGVDFDVKTFCHNLRATKPPYECPVETCRKVYKSYSGIEYHLYHYDHDNPPPPQQTPLRKHKKKGRQSRPANKQSPSPSEVSQSPGREVMSYAQAQRMVEVDLHGRVHRISIFDNLDVVSEDEEAPEEAPENGSNKENTETPAATPKSGKHKNKEKRKDSNHHHHHNVSASTTPKLPEVVYRELEQDTPDAPPRPTSYYRYIEKSAEELDEEVEYDMDEEDYIWLDIMNERRKTEGVSPIPQEIFEYLMDRLEKESYFESHNKGDPNALVDEDAVCCICNDGECQNSNVILFCDMCNLEVHQECYGVPYIPEGQWLCRRCLQSPSRAVDCALCPNKGGAFKQTDDGRWAHVVCALWIPEVCFANTVFLEPIDSIEHIPPARWKLTCYICKQRGSGACIQCHKANCYTAFHVTCAQQAGLYMKMEPVRETGANGTSFSVRKTAYCDIHTPPGSARRLPALSHSEGEEDEDEEEDEGKGWSSEKVKKAKAKSRIKMKKARKILAEKRAAAPVVSVPCIPPHRLSKITNRLTIQRKSQFMQRLHSYWTLKRQSRNGVPLLRRLQTHLQSQRNCDQVGRDSEDKNWALKEQLKSWQRLRHDLERARLLVELIRKREKLKRETIKVQQIAMEMQLTPFLILLRKTLEQLQEKDTGNIFSEPVPLSEVPDYLDHIKKPMDFFTMKQNLEAYRYLNFDDFEEDFNLIVSNCLKYNAKDTIFYRAAVRLREQGGAVLRQARRQAEKMGIDFETGMHIPHSLAGDEATHHTEDAAEEERLVLLENQKHLPVEEQLKLLLERLDEVNASKQSVGRSRRAKMIKKEMTALRRKLAHQRETGRDGPERHGPSSRGSLTPHPAACDKDGQTDSAAEESSSQETSKDLPANGFSGGNQPVKKSFLVYRNDCSLPRSSSDSESSSSSSSSAASDRTSTTPSKQGRGKPSFSRGTFPEDSSEDTSGTENEAYSVGTGRGVGHSMVRKSLGRGAGWLSEDEDSPLDALDLVWAKCRGYPSYPALIIDPKMPREGMFHHGVPIPVPPLEVLKLGEQMTQEAREHLYLVLFFDNKRTWQWLPRTKLVPLGVNQDLDKEKMLEGRKSNIRKSVQIAYHRALQHRSKVQGEQSSETSDSD

SEQ ID NO: 843679 - protein, 39 aa, Homo sapiens
IINITTSSNSCSRHHRQYLQMGNRPAAKMKALTIWPEEF

SEQ ID NO: 843680 - protein, 402 aa, Homo sapiens
MYREQMNLTSLDPPLQLRLEASWVQFHLGINRHGLYSRSSPVVSKLLQDMRHFPTISADYSQDEKALLGACDCTQIVKPSGVHLKLVLRFSDFGKGHVQTHEQRDEETPVDFFYFIDFQRHNAEIAAFHLDRILDFRRVPPTVGRIVNVTKEILEVTKNEILQSVFFVSPASNVCFFAKCPYMCKTEYAVCGNPHLLEGSLSAFLPSLNLAPRLSVPNPWIRSYTLAGKEEWEVNPLYCDTVKQIYPYNNSQRLLNVIDMAIFDFLIGNMDRHHYEMFTKFGDDGFLIHLDNARGFGRHSHDEISILSPLSQCCMIKKKTLLHLQLLAQADYRLSDVMRESLLEDQLSPVLTEPHLLALDRRLQTILRTVEGCIVAHGQQSVIVDGPVEQSAPDSGQANLTS

SEQ ID NO: 843681 - protein, 402 aa, Homo sapiens; identical to SEQ ID NO: 843680

SEQ ID NO: 843682 - protein, 402 aa, Homo sapiens; identical to SEQ ID NO: 843680

SEQ ID NO: 843683 - protein, 258 aa, Homo sapiens
NLRLGTRLGGPESVAAAARAFPFTAPKELERQQRRRFRFHHLFLFPSLRTPCRVSVSLQPWLWKATEVMAMFEQMRANVGKLLKGIDRYNPENLATLERYVETQAKENAYDLEANLAVLKLYQFNPAFFQTTVTAQILLKALTNLPHTDFTLCKCMIDQAHQEERPIRQILYLGDLLETCHFQAFWQALDENMDLLEGITGFEDSVRKFICHVVGITYQHIDRWLLAEMLGDLSDSQLKVWMSKYGWRCRRVGADLHL

SEQ ID NO: 843684 - protein, 210 aa, Homo sapiens
NPENLATLERYVETQAKENAYDLDVYLSIPLSKLLKGIDRYNPENLATLERYVETQAKENAYDLEANLAVLKLYQFNPAFFQTTVTAQILLKALTNLPHTDFTLCKCMIDQAHQEERPIRQILYLGDLLETCHFQAFWQALDENMDLLEGITGFEDSVRKFICHVVGITYQHIDRWLLAEMLGDLSDSQLKVWMSKYGWRCRRVGADLHL

SEQ ID NO: 843685 - protein, 210 aa, Homo sapiens; identical to SEQ ID NO: 843684

SEQ ID NO: 843686 - protein, 225 aa, Homo sapiens
NLRLGTRLGGPESVAAAARAFPFTAPKELERQQRRRFRFHHLFLFPSLRTPCRVSVSLQPWLWKATEVMAMFEQMRANVGKLLKGIDRYQFNPAFFQTTVTAQILLKALTNLPHTDFTLCKCMIDQAHQEERPIRQILYLGDLLETCHFQAFWQALDENMDLLEGITGFEDSVRKFICHVVGITYQHIDRWLLAEMLGDLSDSQLKVWMSKYGWRCRRVGADLHL

SEQ ID NO: 843687 - protein, 255 aa, Homo sapiens
EEEVTWQPESVAAAARAFPFTAPKELERQQRRRFRFHHLFLFPSLRTPCRVSVSLQPWLWKATEVMAMFEQMRANVGKLLKGIDRYNPENLATLERYVETQAKENAYDLEANLAVLKLYQFNPAFFQTTVTAQILLKALTNLPHTDFTLCKCMIDQAHQEERPIRQILYLGDLLETCHFQAFWQALDENMDLLEGITGFEDSVRKFICHVVGITYQHIDRWLLAEMLGDLSDSQLKVWMSKYGWRCRRVGADLHL

SEQ ID NO: 843688 - protein, 255 aa, Homo sapiens; identical to SEQ ID NO: 843687

SEQ ID NO: 843689 - protein, 229 aa, Homo sapiens
EEEVTWQPESVAAAARAFPFTAPKELERQQRRRFRFHHLFLFPSLRTPCRVSVSLQPWLWKATEVMAMFEQMRANVGKLLKGIDRYNPENLATLERYVETQAKENAYDLEANLAVLKLYQFNPAFFQTTVTAQILLKALTNLPHTDFTLCKCMIDQAHQEERPIRQILYLGDLLETCHFQAFWQALDENMDLLEGITGFEDSVRKYSQLKVWMSKYGWRCRRVGADLHL

SEQ ID NO: 843690 - protein, 239 aa, Homo sapiens
EEEVTWQPESVAAAARAFPFTAPKELERQQRRRFRFHHLFLFPSLRTPCRVSVSLQPWLWKATEVMAMFEQMRANVGKLLKGIDRYNPENLATLERYVETQAKENAYDLEANLAVLKLYQFNPAFFQTTVTAQILLKALTNLPHTDFTLCKCMIDQAHQEERPIRQILYLGDLLETCHFQAFWQALDENMDLLEGITGFEDSVRKFICHVVGITYHSQLKVWMSKYGWRCRRVGADLHL

SEQ ID NO: 843691 - protein, 232 aa, Homo sapiens
EEEVTWQPESVAAAARAFPFTAPKELERQQRRRFRFHHLFLFPSLRTPCRVSVSLQPWLWKATEVMAMFEQMRANVGKLLKGIDRYNPENLATLERYVETQAKENAYDLEANLAVLKLYQFNPAFFQTTVTAQILLKALTNLPHTDFTLCKCMIDQAHQEERPIRQILYLGDLLETCHFQAFWQALDENMDLLEGITGFEDSVRKFICHVVGITYQHIDRWLLAEMLGDLSG

SEQ ID NO: 843692 - protein, 229 aa, Homo sapiens; identical to SEQ ID NO: 843689

SEQ ID NO: 843693 - protein, 232 aa, Homo sapiens
EEEVTWQPESVAAAARAFPFTAPKELERQQRRRFRFHHLFLFPSLRTPCRVSVSLQPWLWKATEVMAMFEQMRANVGKLLKGIDRYNPENLATLERYVETQAKENAYDLEANLAVLKLYQFNPAFFQTTVTAQILLKALTNLPHTDFTLCKCMIDQAHQEERPIRQILYLGDLLETCHFQAFWSLPLSPSLECNGVISAHHNLHLLGSSDSPASASSVVGITGMCHHALLIL

SEQ ID NO: 843694 - protein, 103 aa, Homo sapiens
MIDQAHQEERPIRQILYLGDLLETCHFQAFWQALDENMDLLEGITGFEDSVRKFICHVVGITYQHIDRWLLAEMLGDLSDSQLKVWMSKYGWRCRRVGADLHL

SEQ ID NO: 843695 - protein, 190 aa, Homo sapiens
MAMFEQMRANVGKLLKGIDRYNPENLATLERYVETQAKENAYDLEANLAVLKLYQFNPAFFQTTVTAQILLKALTNLPHTDFTLCKCMIDQAHQEERPIRQILYLGDLLETCHFQAFWQALDENMDLLEGITGFEDSVRKFICHVVGITYQHIDRWLLAEMLGDLSDSQLKVWMSKYGWRCRRVGADLHL

SEQ ID NO: 843696 - protein, 85 aa, Homo sapiens
SKTSMFSSRASRRPGNGRSPAGPRGTTGFEDSVRKFICHVVGITYQHIDRWLLAEMLGDLSDSQLKVWMSKYGWRCRRVGADLHL

SEQ ID NO: 843697 - protein, 255 aa, Homo sapiens; identical to SEQ ID NO: 843687

SEQ ID NO: 843698 - protein, 103 aa, Homo sapiens; identical to SEQ ID NO: 843694

SEQ ID NO: 843699 - protein, 255 aa, Homo sapiens; identical to SEQ ID NO: 843687

SEQ ID NO: 843700 - protein, 258 aa, Homo sapiens; identical to SEQ ID NO: 843683

SEQ ID NO: 843701 - protein, 255 aa, Homo sapiens; identical to SEQ ID NO: 843687

SEQ ID NO: 843702 - protein, 304 aa, Homo sapiens
EEEVTWQPESVAAAARAFPFTAPKELERQQRRRFRFHHLFLFPSLRTPCRVSVSLQPWLWKATEVMAMFEQMRANVGKLLKGIDRYNPENLATLERYVETQAKENAYDLEANLAVLKLYQFNPAFFQTTVTAQILLKALTNLPHTDFTLCKCMIDQAHQEERPIRQILYLGDLLETCHFQAFWQALDENMDLLEGITGFEDSVRKFICHVVGITYQHIDRWLLAEMLGDLSVRTRGYGGEHIAGAKVGDIFSSPRHYPPREDQSATTAPTVHFGDTNGRCRRRLSPRESRDIGITKNTKRRTTQ

SEQ ID NO: 843703 - protein, 219 aa, Homo sapiens
EEEVTWQPESVAAAARAFPFTAPKELERQQRRRFRFHHLFLFPSLRTPCRVSVSLQPWLWKATEVMAMFEQMRANVGKLLKGIDRYNPENLATLERYVETQAKENAYDLEANLAVLKLYQFNPAFFQTTVTAQILLKALTNLPHTDFTLCKCMIDQAHQEERPIRQILYLGDLLETCHFQAFWQALDENMDLLEGITGFEDSVRKCKSLSEAGLPKGKG

SEQ ID NO: 843704 - protein, 200 aa, Homo sapiens
EEEVTWQPESVAAAARAFPFTAPKELERQQRRRFRFHHLFLFPSLRTPCRVSVSLQPWLWKATEVMAMFEQMRANVGKLLKGIDRYNPENLATLERYVETQAKENAYDLEANLAVLKLYQFNPAFFQTTVTAQILLKALTNLPHTDFTLCKCMIDQAHQEERPIRQILYLGDLLETCHFQAFWVTSLGSRGRGDGRAMWS

SEQ ID NO: 843705 - protein, 86 aa, Homo sapiens
RVIYPHPEKNKKVLFVDAADIRSKVADSLVHIKSLGPVFKDRPFLLYPSYKKVTVYINRNSSLGFGEPVVACVGYKKFQNSNFFIK

SEQ ID NO: 843706 - protein, 705 aa, Homo sapiens
MGESPASVVLNASGGLFSLKMETLESELTCPICLELFEDPLLLPCAHSLCFSCAHRILVSSCSSGESIEPITAFQCPTCRYVISLNHRGLDGLKRNVTLQNIIDRFQKASVSGPNSPSESRRERTYRPTTAMSSERIACQFCEQDPPRDAVKTCITCEVSYCDRCLRATHPNKKPFTSHRLVEPVPDTHLRGITCLDHENEKVNMYCVSDDQLICALCKLVGRHRDHQVASLNDRFEKLKQTLEMNLTNLVKRNSELENQMAKLIQICQQVEVNTAMHEAKLMEECDELVEIIQQRKQMIAVKIKETKVMKLRKLAQQVANCRQCLERSTVLINQAEHILKENDQARFLQSAKNIAERVAMATASSQVLIPDINFNDAFENFALDFSREKKLLEGLDYLTAPNPPSIREELCTASHDTITVHWISDDEFSISSYELQYTIFTGQANFISLYNSVDSWMIVPNIKQNHYTVHGLQSGTRYIFIVKAINQAGSRNSEPTRLKTNSQPFKLDPKMTHKKLKISNDGLQMEKDESSLKKSHTPERFSGTGCYGAAGNIFIDSGCHYWEVVMGSSTWYAIGIAYKSAPKNEWIGKNASSWVFSRCNSNFVVRHNNKEMLVDVPPHLKRLGVLLDYDNNMLSFYDPANSLHLHTFDVTFILPVCPTFTIWNKSLMILSGLPAPDFIDYPERQECNCRPQESPYVSGMKTCH

SEQ ID NO: 843707 - protein, 364 aa, Homo sapiens
  misc_feature (14)..(15): Xaa can be any naturally occurring amino acid
NTENQSIETPLHGXXFRVAMATASSQVLIPDINFNDAFENFALDFSREKKLLEGLDYLTAPNPPSIREELCTASHDTITVHWISDDEFSISSYELQYTIFTGQANFISLYNSVDSWMIVPNIKQNHYTVHGLQSGTRYIFIVKAINQAGSRNSEPTRLKTNSQPFKLDPKMTHKKLKISNDGLQMEKDESSLKKSHTPERFSGTGCYGAAGNIFIDSGCHYWEVVMGSSTWYAIGIAYKSAPKNEWIGKNASSWVFSRCNSNFVVRHNNKEMLVDVPPHLKRLGVLLDYDNNMLSFYDPANSLHLHTFDVTFILPVCPTFTIWNKSLMILSGLPAPDFIDYPERQECNCRPQESPYVSGMKTCH

SEQ ID NO: 843708 - protein, 735 aa, Homo sapiens
MGESPASVVLNASGGLFSLKMETLESELTCPICLELFEDPLLLPCAHSLCFSCAHRILVSSCSSGESIEPITAFQCPTCRYVISLNHRGLDGLKRNVTLQNIIDRFQKASVSGPNSPSESRRERTYRPTTAMSSERIACQFCEQDPPRDAVKTCITCEVSYCDRCLRATHPNKKPFTSHRLVEPVPDTHLRGITCLDHENEKVNMYCVSDDQLICALCKLVGRHRDHQVASLNDRFEKLKQTLEMNLTNLVKRNSELENQMAKLIQICQQVEVNTAMHEAKLMEECDELVEIIQQRKQMIAVKIKETKVMKLRKLAQQVANCRQCLERSTVLINQAEHILKENDQARFLQSAKNIAERVAMATASSQVLIPDINFNDAFENFALDFSREKKLLEGLDYLTAPNPPSIREELCTASHDTITVHWISDDEFSISSYELQYTIFTGQANFISKSWCSWGLWPEIRKCKEAVSCSRLAGAPRGLYNSVDSWMIVPNIKQNHYTVHGLQSGTRYIFIVKAINQAGSRNSEPTRLKTNSQPFKLDPKMTHKKLKISNDGLQMEKDESSLKKSHTPERFSGTGCYGAAGNIFIDSGCHYWEVVMGSSTWYAIGIAYKSAPKNEWIGKNASSWVFSRCNSNFVVRHNNKEMLVDVPPHLKRLGVLLDYDNNMLSFYDPANSLHLHTFDVTFILPVCPTFTIWNKSLMILSGLPAPDFIDYPERQECNCRPQESPYVSGMKTCH

SEQ ID NO: 843709 - protein, 720 aa, Homo sapiens
FLQDDRALEKRLLESAGESPASVVLNASGGLFSLKMETLESELTCPICLELFEDPLLLPCAHSLCFSCAHRILVSSCSSGESIEPITAFQCPTCRYVISLNHRGLDGLKRNVTLQNIIDRFQKASVSGPNSPSESRRERTYRPTTAMSSERIACQFCEQDPPRDAVKTCITCEVSYCDRCLRATHPNKKPFTSHRLVEPVPDTHLRGITCLDHENEKVNMYCVSDDQLICALCKLVGRHRDHQVASLNDRFEKLKQTLEMNLTNLVKRNSELENQMAKLIQICQQVEVNTAMHEAKLMEECDELVEIIQQRKQMIAVKIKETKVMKLRKLAQQVANCRQCLERSTVLINQAEHILKENDQARFLQSAKNIAERVAMATASSQVLIPDINFNDAFENFALDFSREKKLLEGLDYLTAPNPPSIREELCTASHDTITVHWISDDEFSISSYELQYTIFTGQANFISLYNSVDSWMIVPNIKQNHYTVHGLQSGTRYIFIVKAINQAGSRNSEPTRLKTNSQPFKLDPKMTHKKLKISNDGLQMEKDESSLKKSHTPERFSGTGCYGAAGNIFIDSGCHYWEVVMGSSTWYAIGIAYKSAPKNEWIGKNASSWVFSRCNSNFVVRHNNKEMLVDVPPHLKRLGVLLDYDNNMLSFYDPANSLHLHTFDVTFILPVCPTFTIWNKSLMILSGLPAPDFIDYPERQECNCRPQESPYVSGMKTCH

SEQ ID NO: 843710 - protein, 755 aa, Homo sapiens
GGAAVAVAGHARLRARLLKHGGGGVKLGAGSRDRWDRISLFSPTRLEETTPNRDTMGQTVNEDSMDVKKENQEKTPQSSTSSVQRDDFHWEEYLKETGSISAPSECFRQSQIPPVNDFKVGMKLEARDPRNATSVCIATVIGITGARLRLRLDGSDNRNDFWRLVDSPDIQPVGTCEKEGDLLQPPLGYQMNTSSWPMFLLKTLNGSEMASATLFKKEPPKPPLNNFKVGMKLEAIDKKNPYLICPATIGDVKGDEVHITFDGWSGAFDYWCKYDSRDIFPAGWCRLTGDVLQPPGTSVPIVKNIAKTESSPSEASQHSMQSPQKTTLILPTQQVRRSSRIKPPGPTAVPKRSSSVKNITPRKKGPNSGKKEKPLPVICSTSAASLKSLTRDRGMLYKDVASGPCKIVMSTVCVYVNKHGNFGPHLDPKRIQQLPDHFGPGPVNVVLRRIVQACVDCALETKTVFGYLKPDNRGGEVITASFDGETHSIQLPPVNSASFALRFLENFCHSLQCDNLLSSQPFSSSRGHTHSSAEHDKNQSAKEDVTERQSTKRSPQQTVPYVVPLSPKLPKTKEYASEGEPLFAGGSAIPKEENLSEDSKSSSLNSGNYLNPACRNPMYIHTSVSQDFSRSVPGTTSSPLVGDISPKSSPHEVKFQMQRKSEAPSYIAVPDPSVLKQGFSKDPSTWSVDEVIQFMKHTDPQISGPLADLFRQHEIDGKALFLLKSDVMMKYMGLKLGPALKLCYYIEKLKEGKYS

SEQ ID NO: 843711 - protein, 664 aa, Homo sapiens
GGAAVAVAGHARLRARLLKHGGGGVKLGAGSRDRWDRISLFSPTRLEETTPNRDTMGQTVNEDSMDVKKENQEKTPQSSTSSVQRDDFHWEEYLKETGSISAPSECFRQSQIPPVNDFKVGMKLEARDPRNATSVCIATVIGITGARLRLRLDGSDNRNDFWRLVDSPDIQPVGTCEKEGDLLQPPLGYQMNTSSWPMFLLKTLNGSEMASATLFKKEPPKPPLNNFKVGMKLEAIDKKNPYLICPATIGDVKGDEVHITFDGWSGAFDYWCKYDSRDIFPAGWCRLTGDVLQPPGTSVPIVKNIAKTESSPSEASQHSMQSPQKTTLILPTQQVRRSSRIKPPGPTAVPKRSSSVKNITPRKKGPNSGKKEKPLPVICSTSAASLKSLTRDRGMLYKDVASGPCKIVMSTVCVYVNKHGNFGPHLDPKRIQQLPDHFGPGPVNVVLRRIVQACVDCALETKTVFGYLKPDNRGGEVITASFDGETHSIQLPPVNSASFALRFLENFCHSLQCDNLLSSQPFSSSRGHTHSSAEHDKNQSAKEDVTERQSTKRSPQQTVPYVVPLSPKLPKTKEYASEGEPLFAGGSAIPKEENLSEDSKSSSLNSGNYLNPACRNPMYIHTSVSQDFSRSVPGTTSSPLVGDISPKSSPHEVKFQMQRKSEGN

SEQ ID NO: 843712 - protein, 1150 aa, Homo sapiens
LLEDAERCRHKMQTASTLISGLAGEKERWTEQSQEFAAQTKRLVGDVLLATAFLSYSGPFNQEFRDLLLNDWRKEMKARKIPFGKNLNLSEMLIDAPTISEWNLQGLPNDDLSIQNGIIVTKASRYPLLIDPQTQGKIWIKNKESRNELQITSLNHKYFRNHLEDSLSLGRPLLIEDVGEELDPALDNVLERNFIKTGSTFKVKVGDKEVDVLDGFRLYITTKLPNPAYTPEISARTSIIDFTVTMKGLEDQLLGRVILTEKQELEKERTHLMEDVTANKRRMKELEDNLLYRLTSTQGSLVEDESLIVVLSNTKRTAEEVTQKLEISAETEVQINSAREEYRPVATRGSILYFLITEMRLVNEMYQTSLRQFLGLFDLSLARSVKSPITSKRIANIIEHMTYEVYKYAARGLYEEHKFLFTLLLTLKIDIQRNRVKHEEFLTLIKGGASLDLKACPPKPSKWILDITWLNLVELSKLRQFSDVLDQISRNEKMWKIWFDKENPEEEPLPNAYDKSLDCFRRLLLIRSWCPDRTIAQARKYIVDSMGEKYAEGVILDLEKTWEESDPRTPLICLLSMGSDPTDSIIALGKRLKIETRYVSMGQGQEVHARKLLQQTMANGGWALLQNCHLGLDFMDELMDIIIETELVHDAFRLWMTTEVHKQFPITLLQMSIKFANDPPQGLRAGLKRTYSGVSQDLLDVSSGSQWKPMLYAVAFLHSTVQERRKFGALGWNIPYEFNQADFNATVQFIQNHLDDMDVKKGVSWTTIRYMIGEIQYGGRVTDDYDKRLLNTFAKVWFSENMFGPDFSFYQGYNIPKCSTVDNYLQYIQSLPAYDSPEVFGLHPNADITYQSKLAKDVLDTILGIQPKDTSGGGDETREAVVARLADDMLEKLPPDYVPFEVKERLQKMGPFQPMNIFLRQEIDRMQRVLSLVRSTLTELKLAIDGTIIMSENLRDALDCMFDARIPAWWKKASWVSSTLGFWFTELIERNSQFTSWVFNGRPHCFWMTGFFNPQGFLTAMRQEITRANKGWALDNMVLCNEVTKWMKDDISAPPTEGVYVYGLYLEGAGWDKRNMKLIESKPKVLFELMPVIRIYAENNTLRDPRFYSCPIYKKPVRTDLNYIAAVDLRTAQTPEHWVLRGVALLCDVK

SEQ ID NO: 843713 - protein, 1150 aa, Homo sapiens; identical to SEQ ID NO: 843712

SEQ ID NO: 843714 - protein, 188 aa, Homo sapiens
RRNSVPFIFNTHHLLEYSHLSEPAKPAHSQNQSNFSSYSSKGKPPEADGVDRSFGEKRYEPIQATPPPPPLPSQYAQPSQPVTSASLHIHSKGAHGEGNSVSFGIAISGGRDNPHFQSGETSIVISDVLKGGPAEGQLQENDRVAMVNGVSMDNVEHAFAVQQLRKSGKNAKITIRRKKKVQIPVSRP

SEQ ID NO: 843715 - protein, 1768 aa, Homo sapiens
MSARAAAAKSTAMEETAIWEQHTVTLHRAPGFGFGIAISGGRDNPHFQSGETSIVISDVLKGGPAEGQLQENDRVAMVNGVSMDNVEHAFAVQQLRKSGKNAKITIRRKKKVQIPVSRPDPEPVSDNEEDSYDEEIHDPRSGRSGVVNRRSEKIWPRDRSASRERSLSPRSDRRSVASSQPAKPTKVTLVKSRKNEEYGLRLASHIFVKEISQDSLAARDGNIQEGDVVLKINGTVTENMSLTDAKTLIERSKGKLKMVVQRDERATLLNVPDLSDSIHSANASERDDISEIQSLASDHSGRSHDRPPRRSRSRSPDQRSEPSDHSRHSPQQPSNGSLRSRDEERISKPGAVSTPVKHADDHTPKTVEEVTVERNEKQTPSLPEPKPVYAQVGQPDVDLPVSPSDGVLPNSTHEDGILRPSMKLVKFRKGDSVGLRLAGGNDVGIFVAGVLEDSPAAKEGLEEGDQILRVNNVDFTNIIREEAVLFLLDLPKGEEVTILAQKKKDVYRRIVESDVGDSFYIRTHFEYEKESPYGLSFNKGEVFRAVDTLYNGKLGSWLAIRIGKNHKEVERGIIPNKNRAEQLASVQYTLPKTAGGDRADFWRFRGLRSSKRNLRKSREDLSAQPVQTKFPAYERVVLREAGFLRPVTIFGPIADVAREKLAREEPDIYQIAKSEPRDAGTDQRSSGIIRLHTIKQIIDQDKHALLDVTPNAVDRLNYAQWYPIVVFLNPDSKQGVKTMRMRLCPESRKSARKLYERSHKLRKNNHHLFTTTINLNSMNDGWYGALKEAIQQQQNQLVWVSEGKADGATSDDLDLHDDRLSYLSAPGSEYSMYSTDSRHTSDYEDTDTEGGAYTDQELDETLNDEVGTPPESAITRSSEPVREDSSGMHHENQTYPPYSPQAQPQPIHRIDSPGFKPASQQKAEASSPVPYLSPETNPASSTSAVNHNVNLTNVRLEEPTPAPSTSYSPQADSLRTPSTEAAHIMLRDQEPSLSSHVDPTKVYRKDPYPEEMMRQNHVLKQPAVSHPGHRPDKEPNLTYEPQLPYVEKQASRDLEQPTYRYESSSYTDQFSRNYEHRLRYEDRVPMYEEQWSYYDDKQPYPSRPPFDNQHSQDLDSRQHPEESSERGYFPRFEEPAPLSYDSRPRYEQAPRASALRHEEQPAPGYDTHGRLRPEAQPHPSAGPKPAESKQYFEQYSRSYEQVPPQGFTSRAGHFEPLHGAAAVPPLIPSSQHKPEALPSNTKPLPPPPTQTEEEEDPAMKPQSVLTRVKMFENKRSASLETKKDVNDTGSFKPPEVASKPSGAPIIGPKPTSQNQFSEHDKTLYRIPEPQKPQLKPPEDIVRSNHYDPEEDEEYYRKQLSYFDRRSFENKPPAHIAASHLSEPAKPAHSQNQSNFSSYSSKGKPPEADGVDRSFGEKRYEPIQATPPPPPLPSQYAQPSQPVTSASLHIHSKGAHGEGNSVSLDFQNSLVSKPDPPPSQNKPATFRPPNREDTAQAAFYPQKSFPDKAPVNGTEQTQKTVTPAYNRFTPKPYTSSARPFERKFESPKFNHNLLPSETAHKPDLSSKTPTSPKTLVKSHSLAQPPEFDSGVETFSIHAEKPKYQINNISTVPKAIPVSPSAVEEDEDEDGHTVVATARGIFNSNGGVLSSIETGVSIIIPQGAIPEGVEQEIYFKVCRDNSILPPLDKEKGETLLSPLVMCGPHGLKFLKPVELRLPHCASMTPDGWSFALKSSDSSSGDPKTWQNKCLPGDPNYLVGANCVSVLIDHF

SEQ ID NO: 843716 - protein, 1688 aa, Homo sapiens
MSARAAAAKSTAMEETAIWEQHTVTLHRAPGFGFGIAISGGRDNPHFQSGETSIVISDVLKGGPAEGQLQENDRVAMVNGVSMDNVEHAFAVQQLRKSGKNAKITIRRKKKVQIPVSRPDPEPVSDNEEDSYDEEIHDPRSGRSGVVNRRSEKIWPRDRSASRERSLSPRSDRRSVASSQPAKPTKVTLVKSRKNEEYGLRLASHIFVKEISQDSLAARDGNIQEGDVVLKINGTVTENMSLTDAKTLIERSKGKLKMVVQRDERATLLNVPDLSDSIHSANASERDDISEIQSLASDHSGRSHDRPPRRSRSRSPDQRSEPSDHSRHSPQQPSNGSLRSRDEERISKPGAVSTPVKHADDHTPKTVEEVTVERNEKQTPSLPEPKPVYAQVGQPDVDLPVSPSDGVLPNSTHEDGILRPSMKLVKFRKGDSVGLRLAGGNDVGIFVAGVLEDSPAAKEGLEEGDQILRVNNVDFTNIIREEAVLFLLDLPKGEEVTILAQKKKDVYRRIVESDVGDSFYIRTHFEYEKESPYGLSFNKGEVFRAVDTLYNGKLGSWLAIRIGKNHKEVERGIIPNKNRAEQLASVQYTLPKTAGGDRADFWRFRGLRSSKRNLRKSREDLSAQPVQTKFPAYERVVLREAGFLRPVTIFGPIADVAREKLAREEPDIYQIAKSEPRDAGTDQRSSGIIRLHTIKQIIDQDKHALLDVTPNAVDRLNYAQWYPIVVFLNPDSKQGVKTMRMRLCPESRKSARKLYERSHKLRKNNHHLFTTTINLNSMNDGWYGALKEAIQQQQNQLVWVSEGKADGATSDDLDLHDDRLSYLSAPGSEYSMYSTDSRHTSDYEDTDTEGGAYTDQELDETLNDEVGTPPESAITRSSEPVREDSSGMHHENQTYPPYSPQAQPQPIHRIDSPGFKPASQQVYRKDPYPEEMMRQNHVLKQPAVSHPGHRPDKEPNLTYEPQLPYVEKQASRDLEQPTYRYESSSYTDQFSRNYEHRLRYEDRVPMYEEQWSYYDDKQPYPSRPPFDNQHSQDLDSRQHPEESSERGYFPRFEEPAPLSYDSRPRYEQAPRASALRHEEQPAPGYDTHGRLRPEAQPHPSAGPKPAESKQYFEQYSRSYEQVPPQGFTSRAGHFEPLHGAAAVPPLIPSSQHKPEALPSNTKPLPPPPTQTEEEEDPAMKPQSVLTRVKMFENKRSASLETKKDVNDTGSFKPPEVASKPSGAPIIGPKPTSQNQFSEHDKTLYRIPEPQKPQLKPPEDIVRSNHYDPEEDEEYYRKQLSYFDRRSFENKPPAHIAASHLSEPAKPAHSQNQSNFSSYSSKGKPPEADGVDRSFGEKRYEPIQATPPPPPLPSQYAQPSQPVTSASLHIHSKGAHGEGNSVSLDFQNSLVSKPDPPPSQNKPATFRPPNREDTAQAAFYPQKSFPDKAPVNGTEQTQKTVTPAYNRFTPKPYTSSARPFERKFESPKFNHNLLPSETAHKPDLSSKTPTSPKTLVKSHSLAQPPEFDSGVETFSIHAEKPKYQINNISTVPKAIPVSPSAVEEDEDEDGHTVVATARGIFNSNGGVLSSIETGVSIIIPQGAIPEGVEQEIYFKVCRDNSILPPLDKEKGETLLSPLVMCGPHGLKFLKPVELRLPHCASMTPDGWSFALKSSDSSSGDPKTWQNKCLPGDPNYLVGANCVSVLIDHF

SEQ ID NO: 843717 - protein, 1559 aa, Homo sapiens
RARRLTGSMDELWELIHKEEQTLPQDFESLKQEEIPYEAGLQQLQWSYLYSVHYCCELMLATARMSRSSWFVGPSCRDDISEIQSLASDHSGRSHDRPPRRSRSRSPDQRSEPSDHSRHSPQQPSNGSLRSRDEERISKPGAVSTPVKHADDHTPKTVEEVTVERNEKQTPSLPEPKPVYAQVGQPDVDLPVSPSDGVLPNSTHEDGILRPSMKLVKFRKGDSVGLRLAGGNDVGIFVAGVLEDSPAAKEGLEEGDQILRVNNVDFTNIIREEAVLFLLDLPKGEEVTILAQKKKDVYRRIVESDVGDSFYIRTHFEYEKESPYGLSFNKGEVFRAVDTLYNGKLGSWLAIRIGKNHKEVERGIIPNKNRAEQLASVQYTLPKTAGGDRADFWRFRGLRSSKRNLRKSREDLSAQPVQTKFPAYERVVLREAGFLRPVTIFGPIADVAREKLAREEPDIYQIAKSEPRDAGTDQRSSGIIRLHTIKQIIDQDKHALLDVTPNAVDRLNYAQWYPIVVFLNPDSKQGVKTMRMRLCPESRKSARKLYERSHKLRKNNHHLFTTTINLNSMNDGWYGALKEAIQQQQNQLVWVSEGKADGATSDDLDLHDDRLSYLSAPGSEYSMYSTDSRHTSDYEDTDTEGGAYTDQELDETLNDEVGTPPESAITRSSEPVREDSSGMHHENQTYPPYSPQAQPQPIHRIDSPGFKPASQQKAEASSPVPYLSPETNPASSTSAVNHNVNLTNVRLEEPTPAPSTSYSPQADSLRTPSTEAAHIMLRDQEPSLSSHVDPTKVYRKDPYPEEMMRQNHVLKQPAVSHPGHRPDKEPNLTYEPQLPYVEKQASRDLEQPTYRYESSSYTDQFSRNYEHRLRYEDRVPMYEEQWSYYDDKQPYPSRPPFDNQHSQDLDSRQHPEESSERGYFPRFEEPAPLSYDSRPRYEQAPRASALRHEEQPAPGYDTHGRLRPEAQPHPSAGPKPAESKQYFEQYSRSYEQVPPQGFTSRAGHFEPLHGAAAVPPLIPSSQHKPEALPSNTKPLPPPPTQTEEEEDPAMKPQSVLTRVKMFENKRSASLETKKDVNDTGSFKPPEVASKPSGAPIIGPKPTSQNQFSEHDKTLYRIPEPQKPQLKPPEDIVRSNHYDPEEDEEYYRKQLSYFDRRSFENKPPAHIAASHLSEPAKPAHSQNQSNFSSYSSKGKPPEADGVDRSFGEKRYEPIQATPPPPPLPSQYAQPSQPVTSASLHIHSKGAHGEGNSVSLDFQNSLVSKPDPPPSQNKPATFRPPNREDTAQAAFYPQKSFPDKAPVNGTEQTQKTVTPAYNRFTPKPYTSSARPFERKFESPKFNHNLLPSETAHKPDLSSKTPTSPKTLVKSHSLAQPPEFDSGVETFSIHAEKPKYQINNISTVPKAIPVSPSAVEEDEDEDGHTVVATARGIFNSNGGVLSSIETGVSIIIPQGAIPEGVEQEIYFKVCRDNSILPPLDKEKGETLLSPLVMCGPHGLKFLKPVELRLPHCASMTPDGWSFALKSSDSSSGDPKTWQNKCLPGDPNYLVGANCVSVLIDHF

SEQ ID NO: 843718 - protein, 1145 aa, Homo sapiens
ATQTKLPMTSMKEWTSRSSHSAAVSDSGTSYAQVAREKLTGTDQIFSHAKSEPRDAGTDQRSSGIIRLHTIKQIIDQDKHALLDVTPNAVDRLNYAQWYPIVVFLNPDSKQGVKTMRMRLCPESRKSARKLYERSHKLRKNNHHLFTTTINLNSMNDGWYGALKEAIQQQQNQLVWVSEGKADGATSDDLDLHDDRLSYLSAPGSEYSMYSTDSRHTSDYEDTDTEGGAYTDQELDETLNDEVGTPPESAITRSSEPVREDSSGMHHENQTYPPYSPQAQPQPIHRIDSPGFKPASQQKAEASSPVPYLSPETNPASSTSAVNHNVNLTNVRLEEPTPAPSTSYSPQADSLRTPSTEAAHIMLRDQEPSLSSHVDPTKVYRKDPYPEEMMRQNHVLKQPAVSHPGHRPDKEPNLTYEPQLPYVEKQASRDLEQPTYRYESSSYTDQFSRNYEHRLRYEDRVPMYEEQWSYYDDKQPYPSRPPFDNQHSQDLDSRQHPEESSERGYFPRFEEPAPLSYDSRPRYEQAPRASALRHEEQPAPGYDTHGRLRPEAQPHPSAGPKPAESKQYFEQYSRSYEQVPPQGFTSRAGHFEPLHGAAAVPPLIPSSQHKPEALPSNTKPLPPPPTQTEEEEDPAMKPQSVLTRVKMFENKRSASLETKKDVNDTGSFKPPEVASKPSGAPIIGPKPTSQNQFSEHDKTLYRIPEPQKPQLKPPEDIVRSNHYDPEEDEEYYRKQLSYFDRRSFENKPPAHIAASHLSEPAKPAHSQNQSNFSSYSSKGKPPEADGVDRSFGEKRYEPIQATPPPPPLPSQYAQPSQPVTSASLHIHSKGAHGEGNSVSLDFQNSLVSKPDPPPSQNKPATFRPPNREDTAQAAFYPQKSFPDKAPVNGTEQTQKTVTPAYNRFTPKPYTSSARPFERKFESPKFNHNLLPSETAHKPDLSSKTPTSPKTLVKSHSLAQPPEFDSGVETFSIHAEKPKYQINNISTVPKAIPVSPSAVEEDEDEDGHTVVATARGIFNSNGGVLSSIETGVSIIIPQGAIPEGVEQEIYFKVCRDNSILPPLDKEKGETLLSPLVMCGPHGLKFLKPVELRLPHCASMTPDGWSFALKSSDSSSGDPKTWQNKCLPGDPNYLVGANCVSVLIDHF

SEQ ID NO: 843719 - protein, 1115 aa, Homo sapiens
DYEFRSPGTPWQPDIYQIAKSEPRDAGTDQRSSGIIRLHTIKQIIDQDKHALLDVTPNAVDRLNYAQWYPIVVFLNPDSKQGVKTMRMRLCPESRKSARKLYERSHKLRKNNHHLFTTTINLNSMNDGWYGALKEAIQQQQNQLVWVSEGKADGATSDDLDLHDDRLSYLSAPGSEYSMYSTDSRHTSDYEDTDTEGGAYTDQELDETLNDEVGTPPESAITRSSEPVREDSSGMHHENQTYPPYSPQAQPQPIHRIDSPGFKPASQQKAEASSPVPYLSPETNPASSTSAVNHNVNLTNVRLEEPTPAPSTSYSPQADSLRTPSTEAAHIMLRDQEPSLSSHVDPTKVYRKDPYPEEMMRQNHVLKQPAVSHPGHRPDKEPNLTYEPQLPYVEKQASRDLEQPTYRYESSSYTDQFSRNYEHRLRYEDRVPMYEEQWSYYDDKQPYPSRPPFDNQHSQDLDSRQHPEESSERGYFPRFEEPAPLSYDSRPRYEQAPRASALRHEEQPAPGYDTHGRLRPEAQPHPSAGPKPAESKQYFEQYSRSYEQVPPQGFTSRAGHFEPLHGAAAVPPLIPSSQHKPEALPSNTKPLPPPPTQTEEEEDPAMKPQSVLTRVKMFENKRSASLETKKDVNDTGSFKPPEVASKPSGAPIIGPKPTSQNQFSEHDKTLYRIPEPQKPQLKPPEDIVRSNHYDPEEDEEYYRKQLSYFDRRSFENKPPAHIAASHLSEPAKPAHSQNQSNFSSYSSKGKPPEADGVDRSFGEKRYEPIQATPPPPPLPSQYAQPSQPVTSASLHIHSKGAHGEGNSVSLDFQNSLVSKPDPPPSQNKPATFRPPNREDTAQAAFYPQKSFPDKAPVNGTEQTQKTVTPAYNRFTPKPYTSSARPFERKFESPKFNHNLLPSETAHKPDLSSKTPTSPKTLVKSHSLAQPPEFDSGVETFSIHAEKPKYQINNISTVPKAIPVSPSAVEEDEDEDGHTVVATARGIFNSNGGVLSSIETGVSIIIPQGAIPEGVEQEIYFKVCRDNSILPPLDKEKGETLLSPLVMCGPHGLKFLKPVELRLPHCASMTPDGWSFALKSSDSSSGDPKTWQNKCLPGDPNYLVGANCVSVLIDHF

SEQ ID NO: 843720 - protein, 496 aa, Homo sapiens
ELGPIVIKRRKDVNRHGSFKPPEVASKPSGAPIIGPKPTSQNQFSEHDKTLYRIPEPQKPQLKPPEDIVRSNHYDPEEDEEYYRKQLSYFDRRSFENKPPAHIAASHLSEPAKPAHSQNQSNFSSYSSKGKPPEADGVDRSFGEKRYEPIQATPPPPPLPSQYAQPSQPVTSASLHIHSKGAHGEGNSVSLDFQNSLVSKPDPPPSQNKPATFRPPNREDTAQAAFYPQKSFPDKAPVNGTEQTQKTVTPAYNRFTPKPYTSSARPFERKFESPKFNHNLLPSETAHKPDLSSKTPTSPKTLVKSHSLAQPPEFDSGVETFSIHAEKPKYQINNISTVPKAIPVSPSAVEEDEDEDGHTVVATARGIFNSNGGVLSSIETGVSIIIPQGAIPEGVEQEIYFKVCRDNSILPPLDKEKGETLLSPLVMCGPHGLKFLKPVELRLPHCASMTPDGWSFALKSSDSSSGDPKTWQNKCLPGDPNYLVGANCVSVLIDHF

SEQ ID NO: 843721 - protein, 1768 aa, Homo sapiens; identical to SEQ ID NO: 843715

SEQ ID NO: 843722 - protein, 1755 aa, Homo sapiens
MSARAAAAKSTAMEETAIWEQHTVTLHRAPGFGFGIAISGGRDNPHFQSGETSIVISDVLKGGPAEGQLQENDRVAMVNGVSMDNVEHAFAVQQLRKSGKNAKITIRRKKKVQIPVSRPDPEPVSDNEEDSYDEEIHDPRSGRSGVVNRRSEKIWPRDRSASRERSLSPRSDRRSVASSQPAKPTKVTLVKSRKNEEYGLRLASHIFVKEISQDSLAARDGNIQEGDVVLKINGTVTENMSLTDAKTLIERSKGKLKMVVQRDERATLLNVPDLSDSIHSANASERDDISEIQSLASDHSGRSHDRPPRRSRSRSPDQRSEPSDHSRHSPQQPSNGSLRSRDEERISKPGAVSTPVKHADDHTPKTVEEVTVERNEKQTPSLPEPKPVYAQVGQPDVDLPVSPSDGVLPNSTHEDGILRPSMKLVKFRKGDSVGLRLAGGNDVGIFVAGVLEDSPAAKEGLEEGDQILRVNNVDFTNIIREEAVLFLLDLPKGEEVTILAQKKKDVYRRIVESDVGDSFYIRTHFEYEKESPYGLSFNKGEVFRAVDTLYNGKLGSWLAIRIGKNHKEVERGIIPNKNRAEQLASVQYTLPKTAGGDRADFWRFRGLRSSKRNLRKSREDLSAQPVQTKFPAYERVVLREAGFLRPVTIFGPIADVAREKLAREEPDIYQIAKSEPRDAGTDQRSSGIIRLHTIKQIIDQDKHALLDVTPNAVDRLNYAQWYPIVVFLNPDSKQGVKTMRMRLCPESRKSARKLYERSHKLRKNNHHLFTTTINLNSMNDGWYGALKEAIQQQQNQLVWVSEGKADGATSDDLDLHDDRLSYLSAPGSEYSMYSTDSRHTSDYEDTDTEGGAYTDQELDETLNDEVGTPPESAITRSSEPVREDSSGMHHENQTYPPYSPQAQPQPIHRIDSPGFKPASQQKAEASSPVPYLSPETNPASSTSAVNHNVNLTNVRLEEPTPAPSTSYSPQADSLRTPSTEAAHIMLRDQEPSLSSHVDPTKVYRKDPYPEEMMRQNHVLKQPAVSHPGHRPDKEPNLTYEPQLPYVEKQASRDLEQPTYRYESSSYTDQFSRNYEHRLRYEDRVPMYEEQWSYYDDKQPYPSRPPFDNQHSQDLDSRQHPEESSERGYFPRFEEPAPLSYDSRPRYEQAPRASALRHEEQPAPGYDTHGRLRPEAQPHPSAGPKPAESKQYFEQYSRSYEQVPPQGFTSRAGHFEPLHGAAAVPPLIPSSQHKPEALPSNTKPLPPPPTQTEEEEDPAMKPQSVLTRVKMFENKRSASLETKKDVNDTGSFKPPEVASKPSGAPIIGPKPTSQNQFSEHDKTLYRIPEPQKPQLKPPEDIVRSNHYDPEEDEEYYRKQLSYFDRRSFENKPPAHIAASHLSEPAKPAHSQNQSNFSSYSSKGKPPEADGVDRSFGEKRYEPIQATPPPPPLPSQYAQPSQPVTSASLHIHSKGAHGEGNSVSLDFQNSLVSKPDPPPSQNKPATFRPPNREDTAQAAFYPQKSFPDKAPVNGTEQTQKTVTPAYNRFTPKPYTSSARPFERKFESPKFNHNLLPSETAHKPDLSSKTPTSPKTLVKSHSLAQPPEFDSGVETFSIHAEKPKYQINNISTVPKAIPVSPSAVEEDEDEDGHTVVATARGIFNSNGGVLSSIETGVSIIIPQGAIPEGVEQEIYFKVCRDNSILPPLDKEKGETLLSPLVMCGPHGLKFLKPVELRLPHCASMTPDGDPKTWQNKCLPGDPNYLVGANCVSVLIDHF

SEQ ID NO: 843723 - protein, 419 aa, Homo sapiens [sequence omitted]

SEQ ID NO: 843724 - protein, 167 aa, Homo sapiens
MSARAAAAKSTAMEETAIWEQHTVTLHRAPGFGFGIAISGGRDNPHFQSGETSIVISDVLKGGPAEGQLQENDRVAMVNGVSMDNVEHAFAVQQLRKSGKNAKITIRRKKKVQIPVSRPDPEPVSDNEEDSYDEEIHDPRSGRSGVVNRRSEKIWPRDRSASRERTS

SEQ ID NO: 843725 - protein, 131 aa, Homo sapiens
LKCEFFIQVYRKDPYPEEMMRQNHVLKQPAVSHPGHRPDKEPNLTYEPQLPYVEKQASRDLEQPTYRYESSSYTDQFSRNYEHRLRYEDRVPMYEEQWSYYDDKQPYPSRPPFDNQHSQDLDSRQHPEESS

SEQ ID NO: 843726 - protein, 1748 aa, Homo sapiens
MSARAAAAKSTAMEETAIWEQHTVTLHRAPGFGFGIAISGGRDNPHFQSGETSIVISDVLKGGPAEGQLQENDRVAMVNGVSMDNVEHAFAVQQLRKSGKNAKITIRRKKKVQIPVSRPDPEPVSDNEEDSYDEEIHDPRSGRSGVVNRRSEKIWPRDRSASRERSLSPRSDRRSVASSQPAKPTKVTLVKSRKNEEYGLRLASHIFVKEISQDSLAARDGNIQEGDVVLKINGTVTENMSLTDAKTLIERSKGKLKMVVQRDERATLLNVPDLSDSIHSANASERDDISEIQSLASDHSGRSHDRPPRRSRSRSPDQRSEPSDHSRHSPQQPSNGSLRSRDEERISKPGAVSTPVKHADDHTPKTVEEVTVERNEKQTPSLPEPKPVYAQVGQPDVDLPVSPSDGVLPNSTHEDGILRPSMKLVKFRKGDSVGLRLAGGNDVGIFVAGVLEDSPAAKEGLEEGDQILRVNNVDFTNIIREEAVLFLLDLPKGEEVTILAQKKKDVYRRIVESDVGDSFYIRTHFEYEKESPYGLSFNKGEVFRAVDTLYNGKLGSWLAIRIGKNHKEVERGIIPNKNRAEQLASVQYTLPKTAGGDRADFWRFRGLRSSKRNLRKSREDLSAQPVQTKFPAYERVVLREAGFLRPVTIFGPIADVAREKLAREEPDIYQIAKSEPRDAGTDQRSSGIIRLHTIKQIIDQDKHALLDVTPNAVDRLNYAQWYPIVVFLNPDSKQGVKTMRMRLCPESRKSARKLYERSHKLRKNNHHLFTTTINLNSMNDGWYGALKEAIQQQQNQLVWVSEGKADGATSDDLDLHDDRLSYLSAPGSEYSMYSTDSRHTSDYEDTDTEGGAYTDQELDETLNDEVGTPPESAITRSSEPVREDSSGMHHENQTYPPYSPQAQPQPIHRIDSPGFKPASQQKAEASSPVPYLSPETNPASSTSAVNHNVNLTNVRLEEPTPAPSTSYSPQADSLRTPSTEAAHIMLRDQEPSLSSHVDPTKVYRKDPYPEEMMRQNHVLKQPAVSHPGHRPDKEPNLTYEPQLPYVEKQASRDLEQPTYRYESSSYTDQFSRNYEHRLRYEDRVPMYEEQWSYYDDKQPYPSRPPFDNQHSQDLDSRQHPEESSERGYFPRFEEPAPLSYDSRPRYEQAPRASALRHEEQPAPGYDTHGRLRPEAQPHPSAGPKPAESKQYFEQYSRSYEQVPPQGFTSRAGHFEPLHGAAAVPPLIPSSQHKPEALPSNTKPLPPPPTQTEEEEDPAMKPQSVLTRVKMFENKRSASLETKKDVNDTGSFKPPEVASKPSGAPIIGPKPTSQNQFSEHDKTLYRIPEPQKPQLKPPEDIVRSNHYDPEEDEEYYRKQLSYFDRRSFENKPPAHIAASHLSEPAKPAHSQNQSNFSSYSSKGKPPEADGVDRSFGEKRYEPIQATPPPPPLPSQYAQPSQPVTSASLHIHSKGAHGEGNSVSLDFQNSLVSKPDPPPSQNKPATFRPPNREDTAQAAFYPQKSFPDKAPVNGTEQTQKTVTPAYNRFTPKPYTSSARPFERKFESPKFNHNLLPSETAHKPDLSSKTPTSPKTLVKSHSLAQPPEFDSGVETFSIHAEKPKYQINNISTVPKAIPVSPSAVEEDEDEDGHTVVATARGIFNSNGGVLSSIETGVSIIIPQGAIPEGVEQEIYFKVCRDNSILPPLDKEKGETLLSPLVMCGPHGLKFLKPVELRLPHCDPKTWQNKCLPGDPNYLVGANCVSVLIDHF

SEQ ID NO: 843727 - protein, 1755 aa, Homo sapiens; identical to SEQ ID NO: 843722

SEQ ID NO: 843728 - protein, 1731 aa, Homo sapiens
MSARAAAAKSTAMEETAIWEQHTVTLHRAPGFGFGIAISGGRDNPHFQSGETSIVISDVLKGGPAEGQLQENDRVAMVNGVSMDNVEHAFAVQQLRKSGKNAKITIRRKKKVQIPVSRPDPEPVSDNEEDSYDEEIHDPRSGRSGVVNRRSEKIWPRDRSASRERSLSPRSDRRSVASSQPAKPTKVTLVKSRKNEEYGLRLASHIFVKEISQDSLAARDGNIQEGDVVLKINGTVTENMSLTDAKTLIERSKGKLKMVVQRDERATLLNVPDLSDSIHSANASERDDISEIQSLASDHSGRSHDRPPRRSRSRSPDQRSEPSDHSRHSPQQPSNGSLRSRDEERISKPGAVSTPVKHADDHTPKTVEEVTVERNEKQTPSLPEPKPVYAQVGQPDVDLPVSPSDGVLPNSTHEDGILRPSMKLVKFRKGDSVGLRLAGGNDVGIFVAGVLEDSPAAKEGLEEGDQILRVNNVDFTNIIREEAVLFLLDLPKGEEVTILAQKKKDVYRRIVESDVGDSFYIRTHFEYEKESPYGLSFNKGEVFRAVDTLYNGKLGSWLAIRIGKNHKEVERGIIPNKNRAEQLASVQYTLPKTAGGDRADFWRFRGLRSSKRNLRKSREDLSAQPVQTKFPAYERVVLREAGFLRPVTIFGPIADVAREKLAREEPDIYQIAKSEPRDAGTDQRSSGIIRLHTIKQIIDQDKHALLDVTPNAVDRLNYAQWYPIVVFLNPDSKQGVKTMRMRLCPESRKSARKLYERSHKLRKNNHHLFTTTINLNSMNDGWYGALKEAIQQQQNQLVWVSEGKADGATSDDLDLHDDRLSYLSAPGSEYSMYSTDSRHTSDYEDTDTEGGAYTDQELDETLNDEVGTPPESAITRSSEPVREDSSGMHHENQTYPPYSPQAQPQPIHRIDSPGFKPASQQKAEASSPVPYLSPETNPASSTSAVNHNVNLTNVRLEEPTPAPSTSYSPQADSLRTPSTEAAHIMLRDQEPSLSSHVDPTKVYRKDPYPEEMMRQNHVLKQPAVSHPGHRPDKEPNLTYEPQLPYVEKQASRDLEQPTYRYESSSYTDQFSRNYEHRLRYEDRVPMYEEQWSYYDDKQPYPSRPPFDNQHSQDLDSRQHPEESSERGYFPRFEEPAPLSYDSRPRYEQAPRASALRHEEQPAPGYDTHGRLRPEAQPHPSAGPKPAESKQYFEQYSRSYEQVPPQGFTSRAGHFEPLHGAAAVPPLIPSSQHKPEALPSNTKPLPPPPTQTEEEEDPAMKPQSVLTRVKMFENKRSASLETKKDVNDTGSFKPPEVASKPSGAPIIGPKPTSQNQFSEHDKTLYRIPEPQKPQLKPPEDIVRSNHYDPEEDEEYYRKQLSYFDRRSFENKPPAHIAASHLSEPAKPAHSQNQSNFSSYSSKGKPPEADGVDRSFGEKRYEPIQATPPPPPLPSQYAQPSQPVTSASLHIHSKGAHGEGNSVSLDFQNSLVSKPDPPPSQNKPATFRPPNREDTAQAAFYPQKSFPDKAPVNGTEQTQKTVTPAYNRFTPKPYTSSARPFERKFESPKFNHNLLPSETAHKPDLSSKTPTSPKTLVKSHSLAQPPEFDSGVETFSIHAEKPKYQINNISTVPKAIPVSPSAVEEDEDEDGHTVVATARGIFNSNGGVLSSIETGVSIIIPQGAIPEGVEQEIYFKVCRDNSILPPLDKEKGETLLSPLVMCGPHGLKFLKPVELRLPHCASMTPDAVLIDHF

SEQ ID NO: 843729 - protein, 659 aa, Homo sapiens
AAALADILSLSSAARGSSDPETPRRWPARSSRHRPRYEQAPRASALRHEEQPAPGYDTHGRLRPEAQPHPSAGPKPAESKQYFEQYSRSYEQVPPQGFTSRAGHFEPLHGAAAVPPLIPSSQHKPEALPSNTKPLPPPPTQTEEEEDPAMKPQSVLTRVKMFENKRSASLETKKDVNDTGSFKPPEVASKPSGAPIIGPKPTSQNQFSEHDKTLYRIPEPQKPQLKPPEDIVRSNHYDPEEDEEYYRKQLSYFDRRSFENKPPAHIAASHLSEPAKPAHSQNQSNFSSYSSKGKPPEADGVDRSFGEKRYEPIQATPPPPPLPSQYAQPSQPVTSASLHIHSKGAHGEGNSVSLDFQNSLVSKPDPPPSQNKPATFRPPNREDTAQAAFYPQKSFPDKAPVNGTEQTQKTVTPAYNRFTPKPYTSSARPFERKFESPKFNHNLLPSETAHKPDLSSKTPTSPKTLVKSHSLAQPPEFDSGVETFSIHAEKPKYQINNISTVPKAIPVSPSAVEEDEDEDGHTVVATARGIFNSNGGVLSSIETGVSIIIPQGAIPEGVEQEIYFKVCRDNSILPPLDKEKGETLLSPLVMCGPHGLKFLKPVELRLPHCASMTPDGWSFALKSSDSSSGDPKTWQNKCLPGDPNYLVGANCVSVLIDHF

SEQ ID NO: 843730 - protein, 114 aa, Homo sapiens [sequence omitted]

SEQ ID NO: 843731 - protein, 1748 aa, Homo sapiens; identical to SEQ ID NO: 843726

SEQ ID NO: 843732 - protein, 1697 aa, Homo sapiens
MSARAAAAKSTAMEETAIWEQHTVTLHRAPGFGFGIAISGGRDNPHFQSGETSIVISDVLKGGPAEGQLQENDRVAMVNGVSMDNVEHAFAVQQLRKSGKNAKITIRRKKKVQIPVSRPDPEPVSDNEEDSYDEEIHDPRSGRSGVVNRRSEKIWPRDRSASRERSLSPRSDRRSVASSQPAKPTKVTLVKSRKNEEYGLRLASHIFVKEISQDSLAARDGNIQEGDVVLKINGTVTENMSLTDAKTLIERSKGKLKMVVQRDERATLLNVPDLSDSIHSANASERDDISEIQSLASDHSGRSHDRPPRRSRSRSPDQRSEPSDHSRHSPQQPSNGSLRSRDEERISKPGAVSTPVKHADDHTPKTVEEVTVERNEKQTPSLPEPKPVYAQVGQPDVDLPVSPSDGVLPNSTHEDGILRPSMKLVKFRKGDSVGLRLAGGNDVGIFVAGVLEDSPAAKEGLEEGDQILRVNNVDFTNIIREEAVLFLLDLPKGEEVTILAQKKKDVYRRIVESDVGDSFYIRTHFEYEKESPYGLSFNKGEVFRAVDTLYNGKLGSWLAIRIGKNHKEVERGIIPNKNRAEQLASVQYTLPKTAGGDRADFWRFRGLRSSKRNLRKSREDLSAQPVQTKFPAYERVVLREAGFLRPVTIFGPIADVAREKLAREEPDIYQIAKSEPRDAGTDQRSSGIIRLHTIKQIIDQDKHALLDVTPNAVDRLNYAQWYPIVVFLNPDSKQGVKTMRMRLCPESRKSARKLYERSHKLRKNNHHLFTTTINLNSMNDGWYGALKEAIQQQQNQLVWVSEGKADGATSDDLDLHDDRLSYLSAPGSEYSMYSTDSRHTSDYEDTDTEGGAYTDQELDETLNDEVGTPPESAITRSSEPVREDSSGMHHENQTYPPYSPQAQPQPIHRIDSPGFKPASQQKAEASSPVPYLSPETNPASSTSAVNHNVNLTNVRLEEPTPAPSTSYSPQADSLRTPSTEAAHIMLRDQEPSLSSHVDPTKVYRKDPYPEEMMRQNHVLKQPAVSHPGHRPDKEPNLTYEPQLPYVEKQASRDLEQPTYRYESSSYTDQFSRNYEHRLRYEDRVPMYEEQWSYYDDKQPYPSRPPFDNQHSQDLDSRQHPEESSERGYFPRFEEPAPLSYDSRPRYEQAPRASALRHEEQPAPGYDTHGRLRPEAQPHPSAGPKPAESKQYFEQYSRSYEQVPPQGFTSRAGHFEPLHGAAAVPPLIPSSQHKPEALPSNTKPLPPPPTQTEEEEDPAMKPQSVLTRVKMFENKRSASLETKKDVNDTGSFKPPEVASKPSGAPIIGPKPTSQNQFSEHDKTLYRIPEPQKPQLKPPEDIVRSNHYDPEEDEEYYRKQLSYFDRRSFENKPPAHIAASHLSEPAKPAHSQNQSNFSSYSSKGKPPEADGVDRSFGEKRYEPIQATPPPPPLPSQYAQPSQPVTSASLHIHSKGAHGEGNSVSLDFQNSLVSKPDPPPSQNKPATFRPPNREDTAQAAFYPQKSFPDKAPVNGTEQTQKTVTPAYNRFTPKPYTSSARPFERKFESPKFNHNLLPSETAHKPDLSSKTPTSPKTLVKSHSLAQPPEFDSGVETFSIHAEKPKYQINNISTVPKAIPVSPSAVEEDEDEDGHTVVATARGIFNSNGGVLSSIETGVSIIIPQGAIPEGVEQEIYFKVCRDNSILPPLDKEKGKCVYFSP

SEQ ID NO: 843733 - protein, 92 aa, Homo sapiens
TSDYEDTDTEGGAYTDQELDETLNDEVGTPPESAITRSSEPVREDSSGMHHENQTYPPYSPQAQPQPIHRIDSPGFKPASQQVSSKHSTFCR

SEQ ID NO: 843734 - protein, 83 aa, Homo sapiens
MEEMVVSCVIKHLNLVDALQSLINFQYQEEHAEEYDLLCKIMGETFKKLNAMERQLQSVAELEQKWQSEVDDAMQGKLENNMP

SEQ ID NO: 843735 - protein, 78 aa, Homo sapiens
VISYCFLFVGTEAVSSASDLSDEGLGQHLDPQSKDSQGSNCSGHLLYPSVVPMVKSTAGPSSDHQRALAYCVHPRIRL

SEQ ID NO: 843736 - protein, 101 aa, Homo sapiens
SGHPHPRRGWGLGWGLWRRRSRGVLTRSDGLSVAVSPELSFLLVCKACFASSSPSAMIVHFLRPPQPCRTAYNLGFITTYIRIEVHEQKICPSGIPNAKLK

SEQ ID NO: 843737 - protein, 435 aa, Homo sapiens
MAAPLVLVLVVAVTVRAALFRSSLAEFISERVEVVSPLSSWKRVVEGLSLLDLGVSPYSGAVFHETPLIIYLFHFLIDYAELVFMITDALTAIALYFAIQDFNKVVFKKQKLLLELDQYAPDVAELIRTPMEMRYIPLKVALFYLLNPYTILSCVAKSTCAINNTLIAFFILTTIKGSAFLSAIFLALATYQSLYPLTLFVPGLLYLLQRQYIPVKMKSKAFWIFSWEYAMMYVGSLVVIICLSFFLLSSWDFIPAVYGFILSVPDLTPNIGLFWYFFAEMFEHFSLFFVCVFQINVFFYTIPLAIKLKEHPIFFMFIQIAVIAIFKSYPTVGDVALYMAFFPVWNHLYRFLRNIFVLTCIIIVCSLLFPVLWHLWIYAGSANSNFFYAITLTFNVGQILLISDYFYAFLRREYYLTHGLYLTAKDGTEAMLVLK

SEQ ID NO: 843738 - protein, 435 aa, Homo sapiens; identical to SEQ ID NO: 843737

SEQ ID NO: 843739 - protein, 435 aa, Homo sapiens; identical to SEQ ID NO: 843737

SEQ ID NO: 843740 - protein, 245 aa, Homo sapiens
MAAPLVLVLVVAVTVRAALFRSSLAEFISERVEVVSPLSSWKRVVEGLSLLDLGVSPYSGAVFHETPLIIYLFHFLIDYAELVFMITDALTAIALYFAIQDFNKVVFKKQKLLLELDQYAPDVAELIRTPMEMRYIPLKVALFYLLNPYTILSCVAKSTCAINNTLIAFFILTTIKAAVHTCENEEQSLLDLFLGVCHDVCGKPSGNHLPLLLPSQLLGFHPRSLWLYGAPHLLHVYPDRCHRHL

SEQ ID NO: 843741 - protein, 487 aa, Homo sapiens
MAAPLVLVLVVAVTVRAALFRSSLAEFISERVEVVSPLSSWKRVVEGLSLLDLGVSPYSGAVFHETPLIIYLFHFLIDYAELVFMITDALTAIALYFAIQDFNKVVFKKQKLLLELDQYAPDVAELIRTPMEMRYIPLKVALFYLLNPYTILSCVAKSTCAINNTLIAFFILTTIKGSAFLSAIFLALATYQSLYPLTLFVPGLLYLLQVLSINNCCHQKQKPSLLTKEHYPPPKFAKRIKSKIDQASGYSCNLQEILKTKRQYIPVKMKSKAFWIFSWEYAMMYVGSLVVIICLSFFLLSSWDFIPAVYGFILSVPDLTPNIGLFWYFFAEMFEHFSLFFVCVFQINVFFYTIPLAIKLKEHPIFFMFIQIAVIAIFKSYPTVGDVALYMAFFPVWNHLYRFLRNIFVLTCIIIVCSLLFPVLWHLWIYAGSANSNFFYAITLTFNVGQILLISDYFYAFLRREYYLTHGLYLTAKDGTEAMLVLK

SEQ ID NO: 843742 - protein, 118 aa, Homo sapiens
MLTLGLSIQGGHCSRESMPERACQANCEPSVFAVLRNIFVLTCIIIVCSLLFPVLWHLWIYAGSANSNFFYAITLTFNVGQILLISDYFYAFLRREYYLTHGLYLTAKDGTEAMLVLK

SEQ ID NO: 843743 - protein, 77 aa, Homo sapiens
IVIQSQAGAFLSSNNTCQQFRILGLGGGTQQRLTPSLSPQILLISDYFYAFLRREYYLTHGLYLTAKDGTEAMLVLK

SEQ ID NO: 843744 - protein, 150 aa, Homo sapiens
MREYKLVVLGSGGVGKSALTVQFVQGIFVEKYDPTIEDSYRKQVEVDAQQCMLEILDTAGTEQFTAMRDLYMKNGQGFALVYSITAQSTFNDLQDLREQILRVKDTDDVPMILVGNKCDLEDERVVGKEQGQNLARQWNNCAFLESSFKN

SEQ ID NO: 843745 - protein, 184 aa, Homo sapiens
MREYKLVVLGSGGVGKSALTVQFVQGIFVEKYDPTIEDSYRKQVEVDAQQCMLEILDTAGTEQFTAMRDLYMKNGQGFALVYSITAQSTFNDLQDLREQILRVKDTDDVPMILVGNKCDLEDERVVGKEQGQNLARQWNNCAFLESSAKSKINVNEIFYDLVRQINRKTPVPGKARKKSSCQLL

SEQ ID NO: 843746 - protein, 184 aa, Homo sapiens; identical to SEQ ID NO: 843745

SEQ ID NO: 843747 - protein, 133 aa, Homo sapiens
MLEILDTAGTEQFTAMRDLYMKNGQGFALVYSITAQSTFNDLQDLREQILRVKDTDDVPMILVGNKCDLEDERVVGKEQGQNLARQWNNCAFLESSAKSKINVNEIFYDLVRQINRKTPVPGKARKKSSCQLL

SEQ ID NO: 843748 - protein, 166 aa, Homo sapiens
MREYKLVVLGSGGVGKSALTVQFVQGIFVEKYDPTIEDSYRKQVEVDAQQCMLEILDTAGTEQFTAMRDLYMKDLQDLREQILRVKDTDDVPMILVGNKCDLEDERVVGKEQGQNLARQWNNCAFLESSAKSKINVNEIFYDLVRQINRKTPVPGKARKKSSCQLL

SEQ ID NO: 843749 - protein, 208 aa, Homo sapiens
MREYKLVVLGSGGVGKSALTVQFVQGIFVEKYDPTIEDSYRKQVEVDAQQCMLEILDTAGTEQFTAMRDLYMKNGQGFALVYSITAQSTFNDLQDLREQILRVKDTDDVPMILVGNKCDLEDERVVGKEQGQNLARQWNNCAFLESSAKSKINVNEIFYDLVRQINRKTPVPGKARSLKNCCPIQQCQHSNFVKPTNILNGLSCGGTL

SEQ ID NO: 843750 - protein, 136 aa, Homo sapiens
MREYKLVVLGSGGVGKSALTVQFVQGIFVEKYDPTIEDSYRKQVEVDAQQCMLEILDTAGTEQFTAMRDLYMKNGQGFALVYSITAQSTFNDLQDLREQILRVKDTDDIFYDLVRQINRKTPVPGKARKKSSCQLL

SEQ ID NO: 843751 - protein, 184 aa, Homo sapiens; identical to SEQ ID NO: 843745

SEQ ID NO: 843752 - protein, 184 aa, Homo sapiens; identical to SEQ ID NO: 843745

SEQ ID NO: 843753 - protein, 184 aa, Homo sapiens; identical to SEQ ID NO: 843745

SEQ ID NO: 843754 - protein, 184 aa, Homo sapiens; identical to SEQ ID NO: 843745

SEQ ID NO: 843755 - protein, 118 aa, Homo sapiens
MRDLYMKNGQGFALVYSITAQSTFNDLQDLREQILRVKDTDDVPMILVGNKCDLEDERVVGKEQGQNLARQWNNCAFLESSAKSKINVNEIFYDLVRQINRKTPVPGKARKKSSCQLL

SEQ ID NO: 843756 - protein, 115 aa, Homo sapiens
MLEILDTAGTEQFTAMRDLYMKDLQDLREQILRVKDTDDVPMILVGNKCDLEDERVVGKEQGQNLARQWNNCAFLESSAKSKINVNEIFYDLVRQINRKTPVPGKARKKSSCQLL

SEQ ID NO: 843757 - protein, 184 aa, Homo sapiens; identical to SEQ ID NO: 843745

SEQ ID NO: 843758 - protein, 206 aa, Homo sapiens
RFQGNELEVTIMMVVEALCELHCPEAIQGIAVWSSSIVGKNLLWINSVAQQAEGRFEKASVEYQEHLCAMTGVDCCISSFDKSVLTLANAGRNSASPKHSLNGESRKTVLSKPTDSSPEVINYLGNKACECYISIADWAAVQEWQNAIHDLKKSTSSTSLNLKADFNYIKSLSSFESGKFVECTEQLELLPGENINLLAGGSKEKI

SEQ ID NO: 843759 - protein, 78 aa, Homo sapiens
RFQGNELEVTIMMVVEALCELHCPEAIQGIAVWSSSIVGKNLLWINSVAQQAEGSIEACYKSLHQEASSVCSLVSSNT

SEQ ID NO: 843760 - protein, 1737 aa, Homo sapiens
TFFSAAPGQNPIVPETQVLHEEIELPGSNVKLRYLSSRTAGYKSLLKITMTQSTVPLNLIRVHLMVAVEGHLFQKSFQASPNLAYTFIWDKTDAYGQRVYGLSDAVVSVGFEYETCPSLILWEKRTALLQGFELDPSNLGGWSLDKHHILNVKSGILHKGTGENQFLTQQPAIITSIMGNGRRRSISCPSCNGLAEGNKLLAPVALAVGIDGSLYVGDFNYIRRIFPSRNVTSILELRNKEFKHSNNPAHKYYLAVDPVSGSLYVSDTNSRRIYRVKSLSGTKDLAGNSEVVAGTGEQCLPFDEARCGDGGKAIDATLMSPRGIAVDKNGLMYFVDATMIRKVDQNGIISTLLGSNDLTAVRPLSCDSSMDVAQVRLEWPTDLAVNPMDNSLYVLENNVILRITENHQVSIIAGRPMHCQVPGIDYSLSKLAIHSALESASAIAISHTGVLYITETDEKKINRLRQVTTNGEICLLAGAASDCDCKNDVNCNCYSGDDAYATDAILNSPSSLAVAPDGTIYIADLGNIRIRAVSKNKPVLNAFNQYEAASPGEQELYVFNADGIHQYTVSLVTGEYLYNFTYSTDNDVTELIDNNGNSLKIRRDSSGMPRHLLMPDNQIITLTVGTNGGLKVVSTQNLELGLMTYDGNTGLLATKSDETGWTTFYDYDHEGRLTNVTRPTGVVTSLHREMEKSITIDIENSNRDDDVTVITNLSSVEASYTVVQDQVRNSYQLCNNGTLRVMYANGMGISFHSEPHVLAGTITPTIGRCNISLPMENGLNSIEWRLRKEQIKGKVTIFGRKLRVHGRNLLSIDYDRNIRTEKIYDDHRKFTLRIIYDQVGRPFLWLPSSGLAAVNVSYFFNGRLAGLQRGAMSERTDIDKQGRIVSRMFADGKVWSYSYLDKSMVLLLQSQRQYIFEYDSSDRLLAVTMPSVARHSMSTHTSIGYIRNIYNPPESNASVIFDYSDDGRILKTSFLGTGRQVFYKYGKLSKLSEIVYDSTAVTFGYDETTGVLKMVNLQSGGFSCTIRYRKIGPLVDKQIYRFSEEGMVNARFDYTYHDNSFRIASIKPVISETPLPVDLYRYDEISGKVEHFGKFGVIYYDINQIITTAVMTLSKHFDTHGRIKEVQYEMFRSLMYWMTVQYDSMGRVIKRELKLGPYANTTKYTYDYDGDGQLQSVAVNDRPTWRYSYDLNGNLHLLNPGNSVRLMPLRYDLRDRITRLGDVQYKIDDDGYLCQRGSDIFEYNSKGLLTRAYNKASGWSVQYRYDGVGRRASYKTNLGHHLQYFYSDLHNPTRITHVYNHSNSEITSLYYDLQGHLFAMESSSGEEYYVASDNTGTPLAVFSINGLMIKQLQYTAYGEIYYDSNPDFQMVIGFHGGLYDPLTKLVHFTQRDYDVLAGRWTSPDYTMWKNVGKEPAPFNLYMFKSNNPLSSELDLKNYVTDVKSWLVMFGFQLSNIIPGFPRAKMYFVPPPYELSESQASENGQLITGVQQTTERHNQAFMALEGQVITKKLHASIREKAGHWFATTTPIIGKGIMFAIKEGRVTTGVSSIASEDSRKVASVLNNAYYLDKMHYSIEGKDTHYFVKIGSADGDLVTLGTTIGRKVLESGVNVTVSQPTLLVNGRTRRFTNIEFQYSTLLLSIRYGLTPDTLDEEKARVLDQARQRALGTAWAKEQQKARDGREGSRLWTEGEKQQLLSTGRVQGYEGYYVLPVEQYPELADSSSNIQFLRQNEMGKR

SEQ ID NO: 843761 - protein, 560 aa, Homo sapiens
MLYQRIPQENSYDLNGNLHLLNPGNSVRLMPLRYDLRDRITRLGDVQYKIDDDGYLCQRGSDIFEYNSKGLLTRAYNKASGWSVQYRYDGVGRRASYKTNLGHHLQYFYSDLHNPTRITHVYNHSNSEITSLYYDLQGHLFAMESSSGEEYYVASDNTGTPLAVFSINGLMIKQLQYTAYGEIYYDSNPDFQMVIGFHGGLYDPLTKLVHFTQRDYDVLAGRWTSPDYTMWKNVGKEPAPFNLYMFKSNNPLSSELDLKNYVTDVKSWLVMFGFQLSNIIPGFPRAKMYFVPPPYELSESQASENGQLITGVQQTTERHNQAFMALEGQVITKKLHASIREKAGHWFATTTPIIGKGIMFAIKEGRVTTGVSSIASEDSRKVASVLNNAYYLDKMHYSIEGKDTHYFVKIGSADGDLVTLGTTIGRKVLESGVNVTVSQPTLLVNGRTRRFTNIEFQYSTLLLSIRYGLTPDTLDEEKARVLDQARQRALGTAWAKEQQKARDGREGSRLWTEGEKQQLLSTGRVQGYEGYYVLPVEQYPELADSSSNIQFLRQNEMGKR

SEQ ID NO: 843762 - protein, 535 aa, Homo sapiens
LYGSCLEILVALDQFAYWSLSVQNRVVTVDKSLRGSDIFEYNSKGLLTRAYNKASGWSVQYRYDGVGRRASYKTNLGHHLQYFYSDLHNPTRITHVYNHSNSEITSLYYDLQGHLFAMESSSGEEYYVASDNTGTPLAVFSINGLMIKQLQYTAYGEIYYDSNPDFQMVIGFHGGLYDPLTKLVHFTQRDYDVLAGRWTSPDYTMWKNVGKEPAPFNLYMFKSNNPLSSELDLKNYVTDVKSWLVMFGFQLSNIIPGFPRAKMYFVPPPYELSESQASENGQLITGVQQTTERHNQAFMALEGQVITKKLHASIREKAGHWFATTTPIIGKGIMFAIKEGRVTTGVSSIASEDSRKVASVLNNAYYLDKMHYSIEGKDTHYFVKIGSADGDLVTLGTTIGRKVLESGVNVTVSQPTLLVNGRTRRFTNIEFQYSTLLLSIRYGLTPDTLDEEKARVLDQARQRALGTAWAKEQQKARDGREGSRLWTEGEKQQLLSTGRVQGYEGYYVLPVEQYPELADSSSNIQFLRQNEMGKR

SEQ ID NO: 843763 - protein, 94 aa, Homo sapiens
MVLLLQSQRQYIFEYDSSDRLLAVTMPSVARHSMSTHTSIGYIRNIYNPPESNASVIFDYSDDGRILKTSFLGTGRQVFYKYGKLSKLSEIVYD

SEQ ID NO: 843764 - protein, 1737 aa, Homo sapiens; identical to SEQ ID NO: 843760

SEQ ID NO: 843765 - protein, 804 aa, Homo sapiens
TFFSAAPGQNPIVPETQVLHEEIELPGSNVKLRYLSSRTAGYKSLLKITMTQSTVPLNLIRVHLMVAVEGHLFQKSFQASPNLAYTFIWDKTDAYGQRVYGLSDAVVSVGFEYETCPSLILWEKRTALLQGFELDPSNLGGWSLDKHHILNVKSGILHKGTGENQFLTQQPAIITSIMGNGRRRSISCPSCNGLAEGNKLLAPVALAVGIDGSLYVGDFNYIRRIFPSRNVTSILELRNKEFKHSNNPAHKYYLAVDPVSGSLYVSDTNSRRIYRVKSLSGTKDLAGNSEVVAGTGEQCLPFDEARCGDGGKAIDATLMSPRGIAVDKNGLMYFVDATMIRKVDQNGIISTLLGSNDLTAVRPLSCDSSMDVAQVRLEWPTDLAVNPMDNSLYVLENNVILRITENHQVSIIAGRPMHCQVPGIDYSLSKLAIHSALESASAIAISHTGVLYITETDEKKINRLRQVTTNGEICLLAGAASDCDCKNDVNCNCYSGDDAYATDAILNSPSSLAVAPDGTIYIADLGNIRIRAVSKNKPVLNAFNQYEAASPGEQELYVFNADGIHQYTVSLVTGEYLYNFTYSTDNDVTELIDNNGNSLKIRRDSSGMPRHLLMPDNQIITLTVGTNGGLKVVSTQNLELGLMTYDGNTGLLATKSDETGWTTFYDYDHEGRLTNVTRPTGVVTSLHREMEKSITIDIENSNRDDDVTVITNLSSVEASYTVVQDQVRNSYQLCNNGTLRVMYANGMGISFHSEPHVLAGTITPTIGRCNISLPMENGLNSIEWRLRKEQIKGKVTIFGRKLRV

SEQ ID NO: 843766 - protein, 415 aa, Homo sapiens
ARLGLGSGGGGRTVSSTLSPGLGPRGGEGGRGGGGGGGGGGGTMFLHSVNLWNLAFYVFMVFLATLGLWDVFFGFEENKCSMSYMFEYPEYQSSAVPKTWVSTDHLSIVWCKQLQLTTVRAFFDLIDADTKQITQNSKKKLSVLYHHFIRHPSKHFEENPAIISDLTGTSMWVLVKVSKWTYVAYNESEKIYFTFPLENHRKIYTHVYCQSTMLDTNSWIFACINSTSMCLQGVDLSWKAELLPTIKYLTLRLQDYPSLSHLVVYVPSVRGSKFVVDCEFFKKEKRYIQLPVTHLFSFGLSSRKVVLNTNGLYYNLELLNFGQIYQAFKINVVSKCSAVKEEITSIYRLHIPWSYEDSLTIAQAPSSTEISLKLHIAQPENNTHVALFKMYTSSDCRYEVTVKTSFSQILGQVVA

SEQ ID NO: 843767 - protein, 635 aa, Homo sapiens
ARLGLGSGGGGRTVSSTLSPGLGPRGGEGGRGGGGGGGGGGGTMFLHSVNLWNLAFYVFMVFLATLGLWDVFFGFEENKCSMSYMFEYPEYQKIELPKKLAKRYPAYELYLYGEGSYAEEHKILPLTGIPVLFLPGNAGSYKQVRSIGSIALRKAEDIDFKYHFDFFSVNFNEELVALYGGSLQKQTKFVHECIKTILKLYKGQEFAPKSVAIIGHSMGGLVARALLTLKNFKHDLINLLITQATPHVAPVMPLDRFITDFYTTVNNYWILNARHINLTTLSVAGGFRDYQVRSGLTFLPKLSHHTSALSVVSSAVPKTWVSTDHLSIVWCKQLQLTTVRAFFDLIDADTKQITQNSKKKLSVLYHHFIRHPSKHFEENPAIISDLTGTSMWVLVKVSKWTYVAYNESEKIYFTFPLENHRKIYTHVYCQSTMLDTNSWIFACINSTSMCLQGVDLSWKAELLPTIKYLTLRLQDYPSLSHLVVYVPSVRGSKFVVDCEFFKKEKRYIQLPVTHLFSFGLSSRKVVLNTNGLYYNLELLNFGQIYQAFKINVVSKCSAVKEEITSIYRLHIPWSYEDSLTIAQAPSSTEISLKLHIAQPENNTHVALFKMYTSSDCRYEVTVKTSFSQILGQVVA

SEQ ID NO: 843768 - protein, 86 aa, Homo sapiens
KLRLPPGNFGLLLPLRQQAKKGVTVLSGVIDQDCEDEISLLLHNGVDGDGQGVTASLFLALIIFLDIKSHHLFPTKKERQDHQTLQ

SEQ ID NO: 843769 - protein, 199 aa, Homo sapiens
MNLTEGPLAMAEMDPTQGRVVFEDVAIYFSQEEWGHLDEAQRLLYRDVMLENLALLSSLGSWHGAEDEEAPSQQGFSVGVSEVTTSKPCLSSQKVHPSETCGPPLKDILCLVEHNGIHPEQHIYICEAELFQHPKQQIGENLSRGDDWIPSFGKNHRVHMAEEIFTCMEGWKDLPATSCLLQHQGPQSEWKPYRDTEDR

SEQ ID NO: 843770 - protein, 120 aa, Homo sapiens
MNLTEGPLAMAEMDPTQGRVVFEDVAIYFSQEEWGHLDEAQRLLYRDVMLENLALLSSLGSWHGAEDEEAPSQQGFSVGVSEVTTSKPCLSSQKVHPSETCGPPLNSIVLNQAQNVFQGW

SEQ ID NO: 843771 - protein, 187 aa, Homo sapiens
MNLTEGRVVFEDVAIYFSQEEWGHLDEAQRLLYRDVMLENLALLSSLGSWHGAEDEEAPSQQGFSVGVSEVTTSKPCLSSQKVHPSETCGPPLKDILCLVEHNGIHPEQHIYICEAELFQHPKQQIGENLSRGDDWIPSFGKNHRVHMAEEIFTCMEGWKDLPATSCLLQHQGPQSEWKPYRDTEDR

SEQ ID NO: 843772 - protein, 70 aa, Homo sapiens
YKLLKNNKYLTDLGQKILICHYIRIQRRMKTQITSFRSLQVYKSNSNTHKTIYGLRSQESVYCCGEADTG

SEQ ID NO: 843773 - protein, 132 aa, Homo sapiens
FGVRASSSTTLGDTRQFIAVALLWFVSNYTAWLIFSLNISVLSLSFSLHLPLSEMYVNLKVQSHPLSVLVISSSSRASSMTCTCVTPTSDLPSLLVLLIHSPASLWPPPTKETFPMTTKEFPFDLFIYFSIS

SEQ ID NO: 843774 - protein, 188 aa, Homo sapiens
NERQKAIKACLDRNPEAFKPKIGKGKEGESDRRHSKGCNCKRSGCLKNYCECYEAKIMCSSICKCIGCKNFEESPERKTLMHLADAAEVRVQQQTAAKTKLSSQISDLLTRPTPALNSGGGKLPFTFVTKEVAEATCNCLLAQAEQADKKGKSKAAAERMILEEFGRCLMSVINSAGKAKSDPCAMNC

SEQ ID NO: 843775 - protein, 188 aa, Homo sapiens; identical to SEQ ID NO: 843774

SEQ ID NO: 843776 - protein, 112 aa, Homo sapiens
MSPQELVQGLGPQGLAWSLGLQGLTWQLEWLWILVLLKALSLETGLKAGSVGSGLDTEILTLAWTVEPQGQSGSMGIGLCSGATVTGFMGRSLRFRVKRLDPRVWVFVQGPQ

SEQ ID NO: 843777 - protein, 320 aa, Homo sapiens
MEKGPVRAPAEKPRGARCSNGFPERDPPRPGPSRPAEKPPRPEAKSAQPADGWKGERPRSEEDNELNLPNLAAAYSSILSSLGENPQRQGLLKTPWRAASAMQFFTKGYQETISDVLNDAIFDEDHDEMVIVKDIDMFSMCEHHLVPFVGKVHIGYLPNKQVLGLSKLARIVEIYSRRLQVQERLTKQIAVAITEALRPAGVGVVVEATGLQNHSFHAPERAQNELTVEDIMSCVQRFNQSVSYQRSVKMHWKLLVPVSFVVYVGLVLIVTPYRWYRYFNPGSCCLINDYLKISSIGAAWAKLKQTKPQLLHRNTNTVIP

SEQ ID NO: 843778 - protein, 209 aa, Homo sapiens
MEKGPVRAPAEKPRGARCSNGFPERDPPRPGPSRPAEKPPRPEAKSAQPADGWKGERPRSEEDNELNLPNLAAAYSSILSSLGENPQRQGLLKTPWRAASAMQFFTKGYQETISDVLNDAIFDEDHDEMVIVKDIDMFSMCEHHLVPFVGKVHIGYLPNKQVLGLSKLARIVEIYSRRLQVQERLTKQIAVAITEALRPAGVGVVVEAT

SEQ ID NO: 843779 - protein, 149 aa, Homo sapiens
MQFFTKGYQETISDVLNDAIFDEDHDEMVIVKDIDMFSMCEHHLVPFVGKVHIGYLPNKQVLGLSKLARIVEIYSRRLQVQERLTKQIAVAITEALRPAGVGVVVEATHMCMVMRGVQKMNSKTVTSTMLGVFREDPKTREEFLTLIRS

SEQ ID NO: 843780 - protein, 250 aa, Homo sapiens
MEKGPVRAPAEKPRGARCSNGFPERDPPRPGPSRPAEKPPRPEAKSAQPADGWKGERPRSEEDNELNLPNLAAAYSSILSSLGENPQRQGLLKTPWRAASAMQFFTKGYQETISDVLNDAIFDEDHDEMVIVKDIDMFSMCEHHLVPFVGKVHIGYLPNKQVLGLSKLARIVEIYSRRLQVQERLTKQIAVAITEALRPAGVGVVVEATHMCMVMRGVQKMNSKTVTSTMLGVFREDPKTREEFLTLIRS

SEQ ID NO: 843781 - protein, 232 aa, Homo sapiens
MEKGPVRAPAEKPRGARCSNGFPERDPPRPGPSRPAEKPPRPEAKSAQPADGWKGERPRSEEDNELNLPNLAAAYSSILSSLGENPQRQGLLKTPWRAASAMQFFTKGYQETISDVLNDAIFDEDHDEMVIVKDIDMFSMCEHHLVPFVGKVHIGYLPNKQVLGLSKLARIVEIYSRRLQVQERLTKQIAVAITEALRPAGVGVVVEATHMCMVMRGVQKMNSKKFLTLIRS

SEQ ID NO: 843782 - protein, 250 aa, Homo sapiens; identical to SEQ ID NO: 843780

SEQ ID NO: 843783 - protein, 250 aa, Homo sapiens; identical to SEQ ID NO: 843780

SEQ ID NO: 843784 - protein, 233 aa, Homo sapiens
MEKGPVRAPAEKPRGARCSNGFPERDPPRPGPSRPAEKPPRPEAKSAQPADGWKGERPRSEEDNELNLPNLAAAYSSILSSLGENPQRQGLLKTPWRAASAMQFFTKGYQETISDVLNDAIFDEDHDEMVIVKDIDMFSMCEHHLVPFVGKVHIGYLPNKQVLGLSKLARIVEIYSRRLQVQERLTKQIAVAITEALRPAGVGVVVEATKSNKYNKGLSPLLSSCHLFVAILK

SEQ ID NO: 843785 - protein, 250 aa, Homo sapiens; identical to SEQ ID NO: 843780

SEQ ID NO: 843786 - protein, 250 aa, Homo sapiens; identical to SEQ ID NO: 843780

SEQ ID NO: 843787 - protein, 250 aa, Homo sapiens; identical to SEQ ID NO: 843780

SEQ ID NO: 843788 - protein, 113 aa, Homo sapiens
MLCFAVAFGSFFQGYGPYPSATKMALPSQHSLQEPYTASVVRSRNLLIYEEHSPPEESSSPGSAGELGGWDRGSSLLRVSGLESRPDVDLPHFIISNETSLEKSVLLELQQHL

SEQ ID NO: 843789 - protein, 172 aa, Homo sapiens
TLLQQLQKLQTLVMGKVSRTCKLAGTQTGTCLMVVVLCFAVAFGSFFQGYGPYPSATKMALPSQHSLQEPYTASVVRSRNLLIYEEHSPPEESSSPGSAGELGGWDRGSSLLRVSGLESRPDVDLPHFIISNETSLEKSVLLELQQHLVSAKLEGNETLKVVELDRRVNTTF

SEQ ID NO: 843790 - protein, 162 aa, Homo sapiens
SELRRKREELEEAPVSSHSFDSSNVRKPLETGHRCSSSSSLPVIHDPSVFLLGPQLYLPQPQFLSPDVLMPTMAGEPNRLPGTSRSVQQFLAMCDRGETSQGAKYTGRTLNYQSLPHRSRTDNSWAPWSETNQHIGTRFLTTPGCNPQLTYTATLPERSKGL

SEQ ID NO: 843791 - protein, 133 aa, Homo sapiens
HSKSTASMTSASPGLPKEYSPCDLTVTHMYSGPQATLVSWWQNQLGLRSVPLYLRILLWPRADLNVSSVGASRILLSVVLCCDRAAVSSNAKSHTPLAPPHAQILSPSCCARGEGGGHRRCRTVFPTLFSASS

SEQ ID NO: 843792 - protein, 168 aa, Homo sapiens
  misc_feature (5)..(6): Xaa can be any naturally occurring amino acid
LLLLXXRPVDVTHPDTITIQSHPDLSPSSSRVTSPFTITIKVTSPFTITIRVYLHLLHLYPHPRLPPSSPPVSSPASTSIFSTCILTRVYLHLLHLYPHPRLSPPSSPVSSSACVSIFFTCILIRVCLHLLRLYPHPRVSPSSSPVSSTACVSIFSISTAPLSTSTAM

SEQ ID NO: 843793 - protein, 218 aa, Homo sapiens
MSSSPVTNTDDMLFKDHGYPAFLKSFHLVGLGATLCAINITEIPLIKISEFRVVVARIGTLLCSTHVLAEFKRKAEVVFGDPTEWTSSVLQELGTIAAGLTKAELRMLDKDLMPYFQPSAIKCLPDEIFKELSAEQIASLGPENAAAVTHAQRRRLSPLQLQSLQQALDGAKTHSWQDAPASAGPTRTSSSRSPAGALQSWGLWLGCPLLVLMAKLLW

SEQ ID NO: 843794 - protein, 232 aa, Homo sapiens
FLFPPPSAATNDKNNQLQAESFCKVYLDDSGYSIQDLKSFHLVGLGATLCAINITEIPLIKISEFRVVVARIGTLLCSTHVLAEFKRKAEVVFGDPTEWTSSVLQELGTIAAGLTKAELRMLDKDLMPYFQPSAIKCLPDEIFKELSAEQIASLGPENAAAVTHAQRRRLSPLQLQSLQQALDGAKTHSWQDAPASAGPTRTSSSRSPAGALQSWGLWLGCPLLVLMAKLLW

SEQ ID NO: 843795 - protein, 162 aa, Homo sapiens
TLTGPNRPRGLLGPHLRPQRSSEVAPASLATPSPPGKKHILVLSELRAEDAGEVRFQAGPAQSLALLEVEALPLQMCRHPPREKTVLVGRRAVLEVTVSRSGGHVCWLREGAELCPGDKYEMRSHGPTHSLVIHDVRPEDQGTYCCQAGQDSTHTRLLVEGN

SEQ ID NO: 843796 - protein, 955 aa, Homo sapiens
APGLGSPLRTPPCPPTVRRCRRSAAAMKASSGDQGSPPCFLRFPRPVRVVSGAEAELKCVVLGEPPPVVVWEKGGQQLAASERLSFPADGAEHGLLLTAALPTDAGVYVCRARNAAGEAYAAAAVTVLEPPASDPELQPAERPLPSPGSGEGAPVFLTGPREPARDPDEAPAPVVEPLKCAPKTFWVNEGKHAKFRCYVMGKPEPEIEWHWEGRPLLPDRRRLMYRDRDGGFVLKVLYCQAKDRGLYVCAARNSAGQTLSAVQLHVKEPRLRFTRPLQDVEGREHGIAVLECKVPNSRIPTAWFREDQRLLPCRKYEQIEEGTVRRLIIHRLKADDDGIYLCEMRGRVRTVANVTVKGPILKRLPRKLDVLEGENAVLLVETLEAGVEGRWSRDGEELPVICQSSSGHMHALVLPGVTREDAGEVTFSLGNSRTTTLLRVKCVKHSPPGPPILAEMFKGHKNTVLLTWKPPEPAPETPFIYRLERQEVGSEDWIQCFSIEKAGAVEVPGDCVPSEGDYRFRICTVSGHGRSPHVVFHGSAHLVPTARLVAGLEDVQVYDGEDAVFSLDLSTIIQGTWFLNGEELKSNEPEGQVEPGALRYRIEQKGLQHRLILHAVKHQDSGALVGFSCPGVQDSAALTIQESPVHILSPQDKVSLTFTTSERVVLTCELSRVDFPATWYKDGQKVEESELLVVKMDGRKHRLILPEAKVQDSGEFECRTEGVSAFFGVTVQDPPVHIVDPREHVFVHAITSECVMLACEVDREDAPVRWYKDGQEVEESDFVVLENEGPHRRLVLPATQPSDGGEFQCVAGDECAYFTVTITDVSSWIVYPSGKVYVAAVRLERVVLTCELCRPWAEVRWTKDGEEVVESPALLLQKEDTVRRLVLPAVQLEDSGEYLCEIDDESASFTVTVTESYQSQDSSNNNPELCVLLKKPKTRRLWSRFPPWRRTAGTE

SEQ ID NO: 843797 - protein, 1098 aa, Homo sapiens
APGLGSPLRTPPCPPTVRRCRRSAAAMKASSGDQGSPPCFLRFPRPVRVVSGAEAELKCVVLGEPPPVVVWEKGGQQLAASERLSFPADGAEHGLLLTAALPTDAGVYVCRARNAAGEAYAAAAVTVLEPPASDPELQPAERPLPSPGSGEGAPVFLTGPRSQWVLRGAEVVLTCRAGGLPEPTLYWEKDGMALDEVWDSSHFALQPGRAEDGPGASLALRILAARLPDSGVYVCHARNAHGHAQAGALLQVHQPPESPPADPDEAPAPVVEPLKCAPKTFWVNEGKHAKFRCYVMGKPEPEIEWHWEGRPLLPDRRRLMYRDRDGGFVLKVLYCQAKDRGLYVCAARNSAGQTLSAVQLHVKEPRLRFTRPLQDVEGREHGIAVLECKVPNSRIPTAWFREDQRLLPCRKYEQIEEGTVRRLIIHRLKADDDGIYLCEMRGRVRTVANVTVKGPILKRLPRKLDVLEGENAVLLVETLEAGVEGRWSRDGEELPVICQSSSGHMHALVLPGVTREDAGEVTFSLGNSRTTTLLRVKCEGRKASGQARQGRRLARCRSWVGEVDLRWKGCGGPSKAGNIPALVSGVKHSPPGPPILAEMFKGHKNTVLLTWKPPEPAPETPFIYRLERQEVGSEDWIQCFSIEKAGAVEVPGDCVPSEGDYRFRICTVSGHGRSPHVVFHGSAHLVPTARLVAGLEDVQVYDGEDAVFSLDLSTIIQGTWFLNGEELKSNEPEGQVEPGALRYRIEQKGLQHRLILHAVKHQDSGALVGFSCPGVQDSAALTIQESPVHILSPQDKVSLTFTTSERVVLTCELSRVDFPATWYKDGQKVEESELLVVKMDGRKHRLILPEAKVQDSGEFECRTEGVSAFFGVTVQDPPVHIVDPREHVFVHAITSECVMLACEVDREDAPVRWYKDGQEVEESDFVVLENEGPHRRLVLPATQPSDGGEFQCVAGDECAYFTVTITDVSSWIVYPSGKVYVAAVRLERVVLTCELCRPWAEVRWTKDGEEVVESPALLLQKEDTVRRLVLPAVQLEDSGEYLCEIDDESASFTVTVTESYQSQDSSNNNPELCVLLKKPKTRRLWSRFPPWRRTAGTE

SEQ ID NO: 843798 - protein, 1477 aa, Homo sapiens
APGLGSPLRTPPCPPTVRRCRRSAAAMKASSGDQGSPPCFLRFPRPVRVVSGAEAELKCVVLGEPPPVVVWEKGGQQLAASERLSFPADGAEHGLLLTAALPTDAGVYVCRARNAAGEAYAAAAVTVLEPPASDPELQPAERPLPSPGSGEGAPVFLTGPRSQWVLRGAEVVLTCRAGGLPEPTLYWEKDGMALDEVWDSSHFALQPGRAEDGPGASLALRILAARLPDSGVYVCHARNAHGHAQAGALLQVHQPPESPPADPDEAPAPVVEPLKCAPKTFWVNEGKHAKFRCYVMGKPEPEIEWHWEGRPLLPDRRRLMYRDRDGGFVLKVLYCQAKDRGLYVCAARNSAGQTLSAVQLHVKEPRLRFTRPLQDVEGREHGIAVLECKVPNSRIPTAWFREDQRLLPCRKYEQIEEGTVRRLIIHRLKADDDGIYLCEMRGRVRTVANVTVKGPILKRLPRKLDVLEGENAVLLVETLEAGVEGRWSRDGEELPVICQSSSGHMHALVLPGVTREDAGEVTFSLGNSRTTTLLRVKCVKHSPPGPPILAEMFKGHKNTVLLTWKPPEPAPETPFIYRLERQEVGSEDWIQCFSIEKAGAVEVPGDCVPSEGDYRFRICTVSGHGRSPHVVFHGSAHLVPTARLVAGLEDVQVYDGEDAVFSLDLSTIIQGTWFLNGEELKSNEPEGQVEPGALRYRIEQKGLQHRLILHAVKHQDSGALVGFSCPGVQDSAALTIQESPVHILSPQDKVSLTFTTSERVVLTCELSRVDFPATWYKDGQKVEESELLVVKMDGRKHRLILPEAKVQDSGEFECRTEGVSAFFGVTVQDPPVHIVDPREHVFVHAITSECVMLACEVDREDAPVRWYKDGQEVEESDFVVLENEGPHRRLVLPATQPSDGGEFQCVAGDECAYFTVTITDVSSWIVYPSGKVYVAAVRLERVVLTCELCRPWAEVRWTKDGEEVVESPALLLQKEDTVRRLVLPAVQLEDSGEYLCEIDDESASFTVTVTEPPVRIIYPRDEVTLIAVTLECVVLMCELSREDAPVRWYKDGLEVEESEALVLERDGPRCRLVLPAAQPEDGGEFVCDAGDDSAFFTVTVTAPPERIVHPAARSLDLHFGAPGRVELRCEVAPAGSQVRWYKDGLEVEASDALQLGAEGPTRTLTLPHAQPEDAGEYVCETRHEAITFNVILAEPPVQFLALETTPSPLCVAPGEPVVLSCELSRAGAPVVWSHNGRPVQEGEGLELHAEGPRRVLCIQAAGPAHAGLYTCQSGAAPGAPSLSFTVQVAEPLLVKLVSDLTPLTVHEGDDATFRCEVSPPDADVTWLRNGAVVTPGPQVEMAQNGSSRILTLRGCQLGDAGTVTLRAGSTATSARLHVRETELLFLRRLQDVRAEEGQDVCLEVETGRVGAAGAVRWVRGGQPLPHDSRLSMAQDGHIHRLFIHGVILADQGTYGCESHHDRTLARLSVRRECPVLS

SEQ ID NO: 843799 - protein, 1719 aa, Homo sapiens
APGLGSPLRTPPCPPTVRRCRRSAAAMKASSGDQGSPPCFLRFPRPVRVVSGAEAELKCVVLGEPPPVVVWEKGGQQLAASERLSFPADGAEHGLLLTAALPTDAGVYVCRARNAAGEAYAAAAVTVLEPPASDPELQPAERPLPSPGSGEGAPVFLTGPRSQWVLRGAEVVLTCRAGGLPEPTLYWEKDGMALDEVWDSSHFALQPGRAEDGPGASLALRILAARLPDSGVYVCHARNAHGHAQAGALLQVHQPPESPPADPDEAPAPVVEPLKCAPKTFWVNEGKHAKFRCYVMGKPEPEIEWHWEGRPLLPDRRRLMYRDRDGGFVLKVLYCQAKDRGLYVCAARNSAGQTLSAVQLHVKEPRLRFTRPLQDVEGREHGIAVLECKVPNSRIPTAWFREDQRLLPCRKYEQIEEGTVRRLIIHRLKADDDGIYLCEMRGRVRTVANVTVKGPILKRLPRKLDVLEGENAVLLVETLEAGVEGRWSRDGEELPVICQSSSGHMHALVLPGVTREDAGEVTFSLGNSRTTTLLRVKCVKHSPPGPPILAEMFKGHKNTVLLTWKPPEPAPETPFIYRLERQEVGSEDWIQCFSIEKAGAVEVPGDCVPSEGDYRFRICTVSGHGRSPHVVFHGSAHLVPTARLVAGLEDVQVYDGEDAVFSLDLSTIIQGTWFLNGEELKSNEPEGQVEPGALRYRIEQKGLQHRLILHAVKHQDSGALVGFSCPGVQDSAALTIQESPVHILSPQDKVSLTFTTSERVVLTCELSRVDFPATWYKDGQKVEESELLVVKMDGRKHRLILPEAKVQDSGEFECRTEGVSAFFGVTVQDPPVHIVDPREHVFVHAITSECVMLACEVDREDAPVRWYKDGQEVEESDFVVLENEGPHRRLVLPATQPSDGGEFQCVAGDECAYFTVTITDVSSWIVYPSGKVYVAAVRLERVVLTCELCRPWAEVRWTKDGEEVVESPALLLQKEDTVRRLVLPAVQLEDSGEYLCEIDDESASFTVTVTEPPVRIIYPRDEVTLIAVTLECVVLMCELSREDAPVRWYKDGLEVEESEALVLERDGPRCRLVLPAAQPEDGGEFVCDAGDDSAFFTVTVTEPPVQFLALETTPSPLCVAPGEPVVLSCELSRAGAPVVWSHNGRPVQEGEGLELHAEGPRRVLCIQAAGPAHAGLYTCQSGAAPGAPSLSFTVQVAEPPVRVVAPEAAQTRVRSTPGGDLELVVHLSGPGGPVRWYKDGERLASQGRVQLEQAGARQVLRVQGARSGDAGEYLCDAPQDSRIFLVSVEEPLLVKLVSDLTPLTVHEGDDATFRCEVSPPDADVTWLRNGAVVTPGPQETELLFLRRLQDVRAEEGQDVCLEVETGRVGAAGAVRWVRGGQPLPHDSRLSMAQDGHIHRLFIHGVILADQGTYGCESHHDRTLARLSVRRRERAYAYPRLRLQALGTRRLLQLRRCGPSDAGTYSCAVGTARAGPVRLTVRGGYGVMWRLGTALGARLAELSSPDPDDLRVLLERGRGGGVTGNCPLPRPAHAPGSAPERTVAVLSELRSVSAREGDGATFECTVSEVETTGRWELGGRPLRPGARVRIQQEGKKHILVLSELRAEDAGEVRFQAGPAQSLALLEVEALPLQMCRHPPREKTVLVGRRAVLEVTVSRSGGHVCWLREGAELCPGDKYEMRSHGPTHSLVIHDVRPEDQGTYCCQAGQDSTHTRLLVEGE

SEQ ID NO: 843800 - protein, 1670 aa, Homo sapiens
APGLGSPLRTPPCPPTVRRCRRSAAAMKASSGDQGSPPCFLRFPRPVRVVSGAEAELKCVVLGEPPPVVVWEKGGQQLAASERLSFPADGAEHGLLLTAALPTDAGVYVCRARNAAGEAYAAAAVTVLEPPASDPELQPAERPLPSPGSGEGAPVFLTGPRSQWVLRGAEVVLTCRAGGLPEPTLYWEKDGMALDEVWDSSHFALQPGRAEDGPGASLALRILAARLPDSGVYVCHARNAHGHAQAGALLQVHQPPESPPADPDEAPAPVVEPLKCAPKTFWVNEGKHAKFRCYVMGKPEPEIEWHWEGRPLLPDRRRLMYRDRDGGFVLKVLYCQAKDRGLYVCAARNSAGQTLSAVQLHVKEPRLRFTRPLQDVEGREHGIAVLECKVPNSRIPTAWFREDQRLLPCRKYEQIEEGTVRRLIIHRLKADDDGIYLCEMRGRVRTVANVTVKGPILKRLPRKLDVLEGENAVLLVETLEAGVEGRWSRDGEELPVICQSSSGHMHALVLPGVTREDAGEVTFSLGNSRTTTLLRVKCVKHSPPGPPILAEMFKGHKNTVLLTWKPPEPAPETPFIYRLERQEVGSEDWIQCFSIEKAGAVEVPGDCVPSEGDYRFRICTVSGHGRSPHVVFHGSAHLVPTARLVAGLEDVQVYDGEDAVFSLDLSTIIQGTWFLNGEELKSNEPEGQVEPGALRYRIEQKGLQHRLILHAVKHQDSGALVGFSCPGVQDSAALTIQESPVHILSPQDKVSLTFTTSERVVLTCELSRVDFPATWYKDGQKVEESELLVVKMDGRKHRLILPEAKVQDSGEFECRTEGVSAFFGVTVQDPPVHIVDPREHVFVHAITSECVMLACEVDREDAPVRWYKDGQEVEESDFVVLENEGPHRRLVLPATQPSDGGEFQCVAGDECAYFTVTITDVSSWIVYPSGKVYVAAVRLERVVLTCELCRPWAEVRWTKDGEEVVESPALLLQKEDTVRRLVLPAVQLEDSGEYLCEIDDESASFTVTVTEPPVRIIYPRDEVTLIAVTLECVVLMCELSREDAPVRWYKDGLEVEESEALVLERDGPRCRLVLPAAQPEDGGEFVCDAGDDSAFFTVTVTAPPERIVHPAARSLDLHFGAPGRVELRCEVAPAGSQVRWYKDGLEVEASDALQLGAEGPTRTLTLPHAQPEDAGEYVCETRHEAITFNVILAEPPVQFLALETTPSPLCVAPGEPVVLSCELSRAGAPVVWSHNGRPVQEGEGLELHAEGPRRVLCIQAAGPAHAGLYTCQSGAAPGAPSLSFTVQVAETELLFLRRLQDVRAEEGQDVCLEVETGRVGAAGAVRWVRGGQPLPHDSRLSMAQDGHIHRLFIHGVILADQGTYGCESHHDRTLARLSVRRRERAYAYPRLRLQALGTRRLLQLRRCGPSDAGTYSCAVGTARAGPVRLTVRGGYGVMWRLGTALGARLAELSSPDPDDLRVLLERGRGGGVTGNCPLPRPAHAPGSAPERTVAVLSELRSVSAREGDGATFECTVSEVETTGRWELGGRPLRPGARVRIQQEGKKHILVLSELRAEDAGEVRFQAGPAQSLALLEVEALPLQMCRHPPREKTVLVGRRAVLEVTVSRSGGHVCWLREGAELCPGDKYEMRSHGPTHSLVIHDVRPEDQGTYCCQAGQDSTHTRLLVEGN

SEQ ID NO: 843801 - protein, 1751 aa, Homo sapiens
APGLGSPLRTPPCPPTVRRCRRSAAAMKASSGDQGSPPCFLRFPRPVRVVSGAEAELKCVVLGEPPPVVVWEKGGQQLAASERLSFPADGAEHGLLLTAALPTDAGVYVCRARNAAGEAYAAAAVTVLEPPASDPELQPAERPLPSPGSGEGAPVFLTGPRSQWVLRGAEVVLTCRAGGLPEPTLYWEKDGMALDEVWDSSHFALQPGRAEDGPGASLALRILAARLPDSGVYVCHARNAHGHAQAGALLQVHQPPESPPADPDEAPAPVVEPLKCAPKTFWVNEGKHAKFRCYVMGKPEPEIEWHWEGRPLLPDRRRLMYRDRDGGFVLKVLYCQAKDRGLYVCAARNSAGQTLSAVQLHVKEPRLRFTRPLQDVEGREHGIAVLECKVPNSRIPTAWFREDQRLLPCRKYEQIEEGTVRRLIIHRLKADDDGIYLCEMRGRVRTVANVTVKGPILKRLPRKLDVLEGENAVLLVETLEAGVEGRWSRDGEELPVICQSSSGHMHALVLPGVTREDAGEVTFSLGNSRTTTLLRVKCVKHSPPGPPILAEMFKGHKNTVLLTWKPPEPAPETPFIYRLERQEVGSEDWIQCFSIEKAGAVEVPGDCVPSEGDYRFRICTVSGHGRSPHVVFHGSAHLVPTARLVAGLEDVQVYDGEDAVFSLDLSTIIQGTWFLNGEELKSNEPEGQVEPGALRYRIEQKGLQHRLILHAVKHQDSGALVGFSCPGVQDSAALTIQESPVHILSPQDKVSLTFTTSERVVLTCELSRVDFPATWYKDGQKVEESELLVVKMDGRKHRLILPEAKVQDSGEFECRTEGVSAFFGVTVQDPPVHIVDPREHVFVHAITSECVMLACEVDREDAPVRWYKDGQEVEESDFVVLENEGPHRRLVLPATQPSDGGEFQCVAGDECAYFTVTITDVSSWIVYPSGKVYVAAVRLERVVLTCELCRPWAEVRWTKDGEEVVESPALLLQKEDTVRRLVLPAVQLEDSGEYLCEIDDESASFTVTVTEPPVRIIYPRDEVTLIAVTLECVVLMCELSREDAPVRWYKDGLEVEESEALVLERDGPRCRLVLPAAQPEDGGEFVCDAGDDSAFFTVTVTETTPSPLCVAPGEPVVLSCELSRAGAPVVWSHNGRPVQEGEGLELHAEGPRRVLCIQAAGPAHAGLYTCQSGAAPGAPSLSFTVQVAEPPVRVVAPEAAQTRVRSTPGGDLELVVHLSGPGGPVRWYKDGERLASQGRVQLEQAGARQVLRVQGARSGDAGEYLCDAPQDSRIFLVSVEEPLLVKLVSDLTPLTVHEGDDATFRCEVSPPDADVTWLRNGAVVTPGPQVEMAQNGSSRILTLRGCQLGDAGTVTLRAGSTATSARLHVRETELLFLRRLQDVRAEEGQDVCLEVETGRVGAAGAVRWVRGGQPLPHDSRLSMAQDGHIHRLFIHGVILADQGTYGCESHHDRTLARLSVRRRERAYAYPRLRLQALGTRRLLQLRRCGPSDAGTYSCAVGTARAGPVRLTVRGGYGVMWRLGTALGARLAELSSPDPDDLRVLLERGRGGGVTGNCPLPRPAHAPGSAPERTVAVLSELRSVSAREGDGATFECTVSEVETTGRWELGGRPLRPGARVRIQQEGKKHILVLSELRAEDAGEVRFQAGPAQSLALLEVEALPLQMCRHPPREKTVLVGRRAVLEVTVSRSGGHVCWLREGAELCPGDKYEMRSHGPTHSLVIHDVRPEDQGTYCCQAGQDSTHTRLLVEGN

SEQ ID NO: 843802 - protein, 1569 aa, Homo sapiens
APGLGSPLRTPPCPPTVRRCRRSAAAMKASSGDQGSPPCFLRFPRPVRVVSGAEAELKCVVLGEPPPVVVWEKGGQQLAASERLSFPADGAEHGLLLTAALPTDAGVYVCRARNAAGEAYAAAAVTVLEPPASDPELQPAERPLPSPGSGEGAPVFLTGPRSQWVLRGAEVVLTCRAGGLPEPTLYWEKDGMALDEVWDSSHFALQPGRAEDGPGASLALRILAARLPDSGVYVCHARNAHGHAQAGALLQVHQPPESPPADPDEAPAPVVEPLKCAPKTFWVNEGKHAKFRCYVMGKPEPEIEWHWEGRPLLPDRRRLMYRDRDGGFVLKVLYCQAKDRGLYVCAARNSAGQTLSAVQLHVKEPRLRFTRPLQDVEGREHGIAVLECKVPNSRIPTAWFREDQRLLPCRKYEQIEEGTVRRLIIHRLKADDDGIYLCEMRGRVRTVANVTVKGPILKRLPRKLDVLEGENAVLLVETLEAGVEGRWSRDGEELPVICQSSSGHMHALVLPGVTREDAGEVTFSLGNSRTTTLLRVKCVKHSPPGPPILAEMFKGHKNTVLLTWKPPEPAPETPFIYRLERQEVGSEDWIQCFSIEKAGAVEVPGDCVPSEGDYRFRICTVSGHGRSPHVVFHGSAHLVPTARLVAGLEDVQVYDGEDAVFSLDLSTIIQGTWFLNGEELKSNEPEGQVEPGALRYRIEQKGLQHRLILHAVKHQDSGALVGFSCPGVQDSAALTIQESPVHILSPQDKVSLTFTTSERVVLTCELSRVDFPATWYKDGQKVEESELLVVKMDGRKHRLILPEAKVQDSGEFECRTEGVSAFFGVTVQDPPVHIVDPREHVFVHAITSECVMLACEVDREDAPVRWYKDGQEVEESDFVVLENEGPHRRLVLPATQPSDGGEFQCVAGDECAYFTVTITDVSSWIVYPSGKVYVAAVRLERVVLTCELCRPWAEVRWTKDGEEVVESPALLLQKEDTVRRLVLPAVQLEDSGEYLCEIDDESASFTVTVTEPPVRIIYPRDEVTLIAVTLECVVLMCELSREDAPVRWYKDGLEVEESEALVLERDGPRCRLVLPAAQPEDGGEFVCDAGDDSAFFTVTVTAPPERIVHPAARSLDLHFGAPGRVELRCEVAPAGSQVRWYKDGLEVEASDALQLGAEGPTRTLTLPHAQPEDAGEYVCETRHEAITFNVILAEPPVQFLALETTPSPLCVAPGEPVVLSCELSRAGAPVVWSHNGRPVQEGEGLELHAEGPRRVLCIQAAGPAHAGLYTCQSGAAPGAPSLSFTVQVAEPPVRVVAPEAAQTRVRSTPGGDLELVVHLSGPGGPVRWYKDGERLASQGRVQLEQAGARQVLRVQGARSGDAGEYLCDAPQDSRIFLVSVEEPLLVKLVSDLTPLTVHEGDDATFRCEVSPPDADVTWLRNGAVVTPGPQVEMAQNGSSRILTLRGCQLGDAGTVTLRAGSTATSARLHVRETELLFLRRLQDVRAEEGQDVCLEVETGRVGAAGAVRWVRGGQPLPHDSRLSMAQDGHIHRLFIHGVILADQGTYGCESHHDRTLARLSVRRECPVLS

SEQ ID NO: 843803 - protein, 1864 aa, Homo sapiens
APGLGSPLRTPPCPPTVRRCRRSAAAMKASSGDQGSPPCFLRFPRPVRVVSGAEAELKCVVLGEPPPVVVWEKGGQQLAASERLSFPADGAEHGLLLTAALPTDAGVYVCRARNAAGEAYAAAAVTVLEPPASDPELQPAERPLPSPGSGEGAPVFLTGPRSQWVLRGAEVVLTCRAGGLPEPTLYWEKDGMALDEVWDSSHFALQPGRAEDGPGASLALRILAARLPDSGVYVCHARNAHGHAQAGALLQVHQPPESPPADPDEAPAPVVEPLKCAPKTFWVNEGKHAKFRCYVMGKPEPEIEWHWEGRPLLPDRRRLMYRDRDGGFVLKVLYCQAKDRGLYVCAARNSAGQTLSAVQLHVKEPRLRFTRPLQDVEGREHGIAVLECKVPNSRIPTAWFREDQRLLPCRKYEQIEEGTVRRLIIHRLKADDDGIYLCEMRGRVRTVANVTVKGPILKRLPRKLDVLEGENAVLLVETLEAGVEGRWSRDGEELPVICQSSSGHMHALVLPGVTREDAGEVTFSLGNSRTTTLLRVKCVKHSPPGPPILAEMFKGHKNTVLLTWKPPEPAPETPFIYRLERQEVGSEDWIQCFSIEKAGAVEVPGDCVPSEGDYRFRICTVSGHGRSPHVVFHGSAHLVPTARLVAGLEDVQVYDGEDAVFSLDLSTIIQGTWFLNGEELKSNEPEGQVEPGALRYRIEQKGLQHRLILHAVKHQDSGALVGFSCPGVQDSAALTIQESPVHILSPQDKVSLTFTTSERVVLTCELSRVDFPATWYKDGQKVEESELLVVKMDGRKHRLILPEAKVQDSGEFECRTEGVSAFFGVTVQDPPVHIVDPREHVFVHAITSECVMLACEVDREDAPVRWYKDGQEVEESDFVVLENEGPHRRLVLPATQPSDGGEFQCVAGDECAYFTVTITDVSSWIVYPSGKVYVAAVRLERVVLTCELCRPWAEVRWTKDGEEVVESPALLLQKEDTVRRLVLPAVQLEDSGEYLCEIDDESASFTVTVTEPPVRIIYPRDEVTLIAVTLECVVLMCELSREDAPVRWYKDGLEVEESEALVLERDGPRCRLVLPAAQPEDGGEFVCDAGDDSAFFTVTVTAPPERIVHPAARSLDLHFGAPGRVELRCEVAPAGSQVRWYKDGLEVEASDALQLGAEGPTRTLTLPHAQPEDAGEYVCETRHEAITFNVILAEPPVQFLALETTPSPLCVAPGEPVVLSCELSRAGAPVVWSHNGRPVQEGEGLELHAEGPRRVLCIQAAGPAHAGLYTCQSGAAPGAPSLSFTVQVAEPPVRVVAPEAAQTRVRSTPGGDLELVVHLSGPGGPVRWYKDGERLASQGRVQLEQAGARQVLRVQGARSGDAGEYLCDAPQDSRIFLVSVEEPLLVKLVSDLTPLTVHEGDDATFRCEVSPPDADVTWLRNGAVVTPGPQVEMAQNGSSRILTLRGCQLGDAGTVTLRAGSTATSARLHVRETELLFLRRLQDVRAEEGQDVCLEVETGRVGAAGAVRWVRGGQPLPHDSRLSMAQDGHIHRLFIHGVILADQGTYGCESHHDRTLARLSVRRRERAYAYPRLRLQALGTRRLLQLRRCGPSDAGTYSCAVGTARAGPVRLTVRGGYGVMWRLGTALGARLAELSSPDPDDLRVLLERGRGGGVTGNCPLPRPAHAPGSAPERTVAVLSELRSVSAREGDGATFECTVSEVETTGRWELGGRPLRPGARVRIQQEGKKHILVLSELRAEDAGEVRFQAGPAQSLALLEVEALPLQMCRHPPREKTVLVGRRAVLEVTVSRSGGHVCWLREGAELCPGDKYEMRSHGPTHSLVIHDVRPEDQGTYCCQAGQDSTHTRLLVEAPCGVIPLQATRRT

SEQ ID NO: 843804 - protein, 1632 aa, Homo sapiens
APGLGSPLRTPPCPPTVRRCRRSAAAMKASSGDQGSPPCFLRFPRPVRVVSGAEAELKCVVLGEPPPVVVWEKGGQQLAASERLSFPADGAEHGLLLTAALPTDAGVYVCRARNAAGEAYAAAAVTVLEPPASDPELQPAERPLPSPGSGEGAPVFLTGPRSQWVLRGAEVVLTCRAGGLPEPTLYWEKDGMALDEVWDSSHFALQPGRAEDGPGASLALRILAARLPDSGVYVCHARNAHGHAQAGALLQVHQPPESPPADPDEAPAPVVEPLKCAPKTFWVNEGKHAKFRCYVMGKPEPEIEWHWEGRPLLPDRRRLMYRDRDGGFVLKVLYCQAKDRGLYVCAARNSAGQTLSAVQLHVKEPRLRFTRPLQDVEGREHGIAVLECKVPNSRIPTAWFREDQRLLPCRKYEQIEEGTVRRLIIHRLKADDDGIYLCEMRGRVRTVANVTVKGPILKRLPRKLDVLEGENAVLLVETLEAGVEGRWSRDGEELPVICQSSSGHMHALVLPGVTREDAGEVTFSLGNSRTTTLLRVKCVKHSPPGPPILAEMFKGHKNTVLLTWKPPEPAPETPFIYRLERQEVGSEDWIQCFSIEKAGAVEVPGDCVPSEGDYRFRICTVSGHGRSPHVVFHGSAHLVPTARLVAGLEDVQVYDGEDAVFSLDLSTIIQGTWFLNGEELKSNEPEGQVEPGALRYRIEQKGLQHRLILHAVKHQDSGALVGFSCPGVQDSAALTIQESPVHILSPQDKVSLTFTTSERVVLTCELSRVDFPATWYKDGQKVEESELLVVKMDGRKHRLILPEAKVQDSGEFECRTEGVSAFFGVTVQDPPVHIVDPREHVFVHAITSECVMLACEVDREDAPVRWYKDGQEVEESDFVVLENEGPHRRLVLPATQPSDGGEFQCVAGDECAYFTVTITDVSSWIVYPSGKVYVAAVRLERVVLTCELCRPWAEVRWTKDGEEVVESPALLLQKEDTVRRLVLPAVQLEDSGEYLCEIDDESASFTVTVTEPPVRIIYPRDEVTLIAVTLECVVLMCELSREDAPVRWYKDGLEVEESEALVLERDGPRCRLVLPAAQPEDGGEFVCDAGDDSAFFTVTVTAPPERIVHPAARSLDLHFGAPGRVELRCEVAPAGSQVRWYKDGLEVEASDALQLGAEGPTRTLTLPHAQPEDAGEYVCETRHEAITFNVILAEPPVQFLALETTPSPLCVAPGEPVVLSCELSRAGAPVVWSHNGRPVQEGEGLELHAEGPRRVLCIQAAGPAHAGLYTCQSGAAPGAPSLSFTVQVAEPPVRVVAPEAAQTRVRSTPGGDLELVVHLSGPGGPVRWYKDGERLASQGRVQLEQAGARQVLRVQGARSGDAGEYLCDAPQDSRIFLVSVEEPLLVKLVSDLTPLTVHEGDDATFRCEVSPPDADVTWLRNGAVVTPGPQVEMAQNGSSRILTLRGCQLGDAGTVTLRAGSTATSARLHVRETELLFLRRLQDVRAEEGQDVCLEVETGRVGAAGAVRWVRGGQPLPHDSRLSMAQDGHIHRLFIHGVILADQGTYGCESHHDRTLARLSVRPRQLRVLRPLEDVTISEGGSATFQLELSQEGVTGEWARGGVRLYPGPKCHIHSDGHRHRLVLNGLGLADS

SEQ ID NO: 843805 - protein, 1114 aa, Homo sapiens
APGLGSPLRTPPCPPTVRRCRRSAAAMKASSGDQGSPPCFLRFPRPVRVVSGAEAELKCVVLGEPPPVVVWEKGGQQLAASERLSFPADGAEHGLLLTAALPTDAGVYVCRARNAAGEAYAAAAVTVLEPPASDPELQPAERPLPSPGSGEGAPVFLTGPRSQWVLRGAEVVLTCRAGGLPEPTLYWEKDGMALDEVWDSSHFALQPGRAEDGPGASLALRILAARLPDSGVYVCHARNAHGHAQAGALLQVHQPPESPPADPDEAPAPVVEPLKCAPKTFWVNEGKHAKFRCYVMGKPEPEIEWHWEGRPLLPDRRRLMYRDRDGGFVLKVLYCQAKDRGLYVCAARNSAGQTLSAVQLHVKEPRLRFTRPLQDVEGREHGIAVLECKVPNSRIPTAWFREDQRLLPCRKYEQIEEGTVRRLIIHRLKADDDGIYLCEMRGRVRTVANVTVKGPILKRLPRKLDVLEGENAVLLVETLEAGVEGRWSRDGEELPVICQSSSGHMHALVLPGVTREDAGEVTFSLGNSRTTTLLRVKCVKHSPPGPPILAEMFKGHKNTVLLTWKPPEPAPETPFIYRLERQEVGSEDWIQCFSIEKAGAVEVPGDCVPSEGDYRFRICTVSGHGRSPHVVFHGSAHLVPTARLVAGLEDVQVYDGEDAVFSLDLSTIIQGTWFLNGEELKSNEPEGQVEPGALRYRIEQKGLQHRLILHAVKHQDSGALVGFSCPGVQDSAALTIQESPVHILSPQDKVSLTFTTSERVVLTCELSRVDFPATWYKDGQKVEESELLVVKMDGRKHRLILPEAKVQDSGEFECRTEGVSAFFGVTVQDPPVHIVDPREHVFVHAITSECVMLACEVDREDAPVRWYKDGQEVEESDFVVLENEGPHRRLVLPATQPSDGGEFQCVAGDECAYFTVTITDVSSWIVYPSGKVYVAAVRLERVVLTCELCRPWAEVRWTKDGEEVVESPALLLQKEDTVRRLVLPAVQLEDSGEYLCEIDDESASFTVTVTEPPVRIIYPRDEVTLIAVTLECVVLMCELSREDAPVRWYKDGLEVEESEALVLERDGPRCRLVLPAAQPEDGGEFVCDAGDDSAFFTVTVTGGQSLQHREEVER

SEQ ID NO: 843806 - protein, 793 aa, Homo sapiens
MDCSWHCSQELCCQWGGLRIWRVRQERPAGQAYVPLSMPTQPAPPERIVHPAARSLDLHFGAPGRVELRCEVAPAGSQVRWYKDGLEVEASDALQLGAEGPTRTLTLPHAQPEDAGEYVCETRHEAITFNVILAEPPVQFLALETTPSPLCVAPGEPVVLSCELSRAGAPVVWSHNGRPVQEGEGLELHAEGPRRVLCIQAAGPAHAGLYTCQSGAAPGAPSLSFTVQVAEPPVRVVAPEAAQTRVRSTPGGDLELVVHLSGPGGPVRWYKDGERLASQGRVQLEQAGARQVLRVQGARSGDAGEYLCDAPQDSRIFLVSVEEPLLVKLVSDLTPLTVHEGDDATFRCEVSPPDADVTWLRNGAVVTPGPQVEMAQNGSSRILTLRGCQLGDAGTVTLRAGSTATSARLHVRETELLFLRRLQDVRAEEGQDVCLEVETGRVGAAGAVRWVRGGQPLPHDSRLSMAQDGHIHRLFIHGVILADQGTYGCESHHDRTLARLSVRRRERAYASPRLRLQALGTRRLLQLRRCGPSDAGTYSCAVGTARAGPVRLTVRGGYGVMWRLGTALGARLAELSSPDPDDLRVLLERGRGGGVTGNCPLPRPAHAPGSAPERTVAVLSELRSVSAREGDGATFECTVSEVETTGRWELGGRPLRPGARVRIQQEGKKHILVLSELRAEDAGEVRFQAGPAQSLALLEVEALPLQMCRHPPREKTVLVGRRAVLEVTVSRSGGHVCWLREGAELCPGDKYEMRSHGPTHSLVIHDVRPEDQGTYCCQAGQDSTHTRLLVEGN

SEQ ID NO: 843807 - protein, 110 aa, Homo sapiens
MTANTTLQKGIIKVRWTKDGEEVVESPALLLQKEDTVRRLVLPAVQLEDSGEYLCEIDDESASFTVTVTESYQSQDSSNNNPELCVLLKKPKTRRLWSRFPPWRRTAGTE

SEQ ID NO: 843808 - protein, 401 aa, Homo sapiens
MEQGASLQPHQTPWPPSSPPETELLFLRRLQDVRAEEGQDVCLEVETGRVGAAGAVRWVRGGQPLPHDSRLSMAQDGHIHRLFIHGVILADQGTYGCESHHDRTLARLSVRRRERAYAYPRLRLQALGTRRLLQLRRCGPSDAGTYSCAVGTARAGPVRLTVRGGYGVMWRLGTALGARLAELSSPDPDDLRVLLERGRGGGVTGNCPLPRPAHAPGSAPERTVAVLSELRSVSAREGDGATFECTVSEVETTGRWELGGRPLRPGARVRIQQEGKKHILVLSELRAEDAGEVRFQAGPAQSLALLEVEALPLQMCRHPPREKTVLVGRRAVLEVTVSRSGGHVCWLREGAELCPGDKYEMRSHGPTHSLVIHDVRPEDQGTYCCQAGQDSTHTRLLVEGN

SEQ ID NO: 843809 - protein, 89 aa, Homo sapiens
TPLMPGSGCPCPPDVSSWIVYPSGKVYVAAVRLERVVLTCELCRPWAEVRWTKDGEEVVESPALLLQKEDTVRRLVLPAVQLEDSGEYL

SEQ ID NO: 843810 - protein, 1051 aa, Homo sapiens
APGLGSPLRTPPCPPTVRRCRRSAAAMKASSGDQGSPPCFLRFPRPVRVVSGAEAELKCVVLGEPPPVVVWEKGGQQLAASERLSFPADGAEHGLLLTAALPTDAGVYVCRARNAAGEAYAAAAVTVLEPPASDPELQPAERPLPSPGSGEGAPVFLTGPRSQWVLRGAEVVLTCRAGGLPEPTLYWEKDGMALDEVWDSSHFALQPGRAEDGPGASLALRILAARLPDSGVYVCHARNAHGHAQAGALLQVHQPPESPPADPDEAPAPVVEPLKCAPKTFWVNEGKHAKFRCYVMGKPEPEIEWHWEGRPLLPDRRRLMYRDRDGGFVLKVLYCQAKDRGLYVCAARNSAGQTLSAVQLHVKEPRLRFTRPLQDVEGREHGIAVLECKVPNSRIPTAWFREDQRLLPCRKYEQIEEGTVRRLIIHRLKADDDGIYLCEMRGRVRTVANVTVKGPILKRLPRKLDVLEGENAVLLVETLEAGVEGRWSRDGEELPVICQSSSGHMHALVLPGVTREDAGEVTFSLGNSRTTTLLRVKCVKHSPPGPPILAEMFKGHKNTVLLTWKPPEPAPETPFIYRLERQEVGSEDWIQCFSIEKAGAVEVPGDCVPSEGDYRFRICTVSGHGRSPHVVFHGSAHLVPTARLVAGLEDVQVYDGEDAVFSLDLSTIIQGTWFLNGEELKSNEPEGQVEPGALRYRIEQKGLQHRLILHAVKHQDSGALVGFSCPGVQDSAALTIQESPVHILSPQDKVSLTFTTSERVVLTCELSRVDFPATWYKDGQKVEESELLVVKMDGRKHRLILPEAKVQDSGEFECRTEGVSAFFGVTVQDPPVHIVDPREHVFVHAITSECVMLACEVDREDAPVRWYKDGQEVEESDFVVLENEGPHRRLVLPATQPSDGGEFQCVAGDECAYFTVTITDVSSWIVYPSGKVYVAAVRLERVVLTCELCRPWAEVRWTKDGEEVVESPALLLQKEDTVRRLVLPAVQLEDSGEYLCEIDDESASFTVTVTESYQSQDSSNNNPELCVLLKKPKTRRLWSRFPPWRRTAGTE

SEQ ID NO: 843811 - protein, 138 aa, Homo sapiens
YSHYYVGDRDFMLPNGSREADGELVTGCGCPHPAEPPVRIIYPRDEVTLIAVTLECVVLMCELSREDAPVRWYKDGLEVEESEALVLERDGPRCRLVLPAAQPEDGGEFVCDAGDDSAFFTVTVTGGQSLQHREEVER

SEQ ID NO: 843812 - protein, 900 aa, Homo sapiens
GWEERLLRAGSQAAGRGGCGATAGEANRKDCPLSARLRARESPPPPPQSCSSGPRPGRAEDGPGASLALRILAARLPDSGVYVCHARNAHGHAQAGALLQVHQPPESPPADPDEAPAPVVEPLKCAPKTFWVNEGKHAKFRCYVMGKPEPEIEWHWEGRPLLPDRRRLMYRDRDGGFVLKVLYCQAKDRGLYVCAARNSAGQTLSAVQLHVKEPRLRFTRPLQDVEGREHGIAVLECKVPNSRIPTAWFREDQRLLPCRKYEQIEEGTVRRLIIHRLKADDDGIYLCEMRGRVRTVANVTVKGPILKRLPRKLDVLEGENAVLLVETLEAGVEGRWSRDGEELPVICQSSSGHMHALVLPGVTREDAGEVTFSLGNSRTTTLLRVKCVKHSPPGPPILAEMFKGHKNTVLLTWKPPEPAPETPFIYRLERQEVGSEDWIQCFSIEKAGAVEVPGDCVPSEGDYRFRICTVSGHGRSPHVVFHGSAHLVPTARLVAGLEDVQVYDGEDAVFSLDLSTIIQGTWFLNGEELKSNEPEGQVEPGALRYRIEQKGLQHRLILHAVKHQDSGALVGFSCPGVQDSAALTIQESPVHILSPQDKVSLTFTTSERVVLTCELSRVDFPATWYKDGQKVEESELLVVKMDGRKHRLILPEAKVQDSGEFECRTEGVSAFFGVTVQDPPVHIVDPREHVFVHAITSECVMLACEVDREDAPVRWYKDGQEVEESDFVVLENEGPHRRLVLPATQPSDGGEFQCVAGDECAYFTVTITDVSSWIVYPSGKVYVAAVRLERVVLTCELCRPWAEVRWTKDGEEVVESPALLLQKEDTVRRLVLPAVQLEDSGEYLCEIDDESASFTVTVTESYQSQDSSNNNPELCVLLKKPKTRRLWSRFPPWRRTAGTE

SEQ ID NO: 843813 - protein, 532 aa, Homo sapiens
MGAGVVRNFLATEGATYICVKHSPPGPPILAEMFKGHKNTVLLTWKPPEPAPETPFIYRLERQEVGSEDWIQCFSIEKAGAVEVPGDCVPSEGDYRFRICTVSGHGRSPHVVFHGSAHLVPTARLVAGLEDVQVYDGEDAVFSLDLSTIIQGTWFLNGEELKSNEPEGQVEPGALRYRIEQKGLQHRLILHAVKHQDSGALVGFSCPGVQDSAALTIQESPVHILSPQDKVSLTFTTSERVVLTCELSRVDFPATWYKDGQKVEESELLVVKMDGRKHRLILPEAKVQDSGEFECRTEGVSAFFGVTVQDPPVHIVDPREHVFVHAITSECVMLACEVDREDAPVRWYKDGQEVEESDFVVLENEGPHRRLVLPATQPSDGGEFQCVAGDECAYFTVTITDVSSWIVYPSGKVYVAAVRLERVVLTCELCRPWAEVRWTKDGEEVVESPALLLQKEDTVRRLVLPAVQLEDSGEYLCEIDDESASFTVTVTESYQSQDSSNNNPELCVLLKKPKTRRLWSRFPPWRRTAGTE

SEQ ID NO: 843814 - protein, 1852 aa, Homo sapiens
APGLGSPLRTPPCPPTVRRCRRSAAAMKASSGDQGSPPCFLRFPRPVRVVSGAEAELKCVVLGEPPPVVVWEKGGQQLAASERLSFPADGAEHGLLLTAALPTDAGVYVCRARNAAGEAYAAAAVTVLEPPASDPELQPAERPLPSPGSGEGAPVFLTGPRSQWVLRGAEVVLTCRAGGLPEPTLYWEKDGMALDEVWDSSHFALQPGRAEDGPGASLALRILAARLPDSGVYVCHARNAHGHAQAGALLQVHQPPESPPADPDEAPAPVVEPLKCAPKTFWVNEGKHAKFRCYVMGKPEPEIEWHWEGRPLLPDRRRLMYRDRDGGFVLKVLYCQAKDRGLYVCAARNSAGQTLSAVQLHVKEPRLRFTRPLQDVEGREHGIAVLECKVPNSRIPTAWFREDQRLLPCRKYEQIEEGTVRRLIIHRLKADDDGIYLCEMRGRVRTVANVTVKGPILKRLPRKLDVLEGENAVLLVETLEAGVEGRWSRDGEELPVICQSSSGHMHALVLPGVTREDAGEVTFSLGNSRTTTLLRVKCVKHSPPGPPILAEMFKGHKNTVLLTWKPPEPAPETPFIYRLERQEVGSEDWIQCFSIEKAGAVEVPGDCVPSEGDYRFRICTVSGHGRSPHVVFHGSAHLVPTARLVAGLEDVQVYDGEDAVFSLDLSTIIQGTWFLNGEELKSNEPEGQVEPGALRYRIEQKGLQHRLILHAVKHQDSGALVGFSCPGVQDSAALTIQESPVHILSPQDKVSLTFTTSERVVLTCELSRVDFPATWYKDGQKVEESELLVVKMDGRKHRLILPEAKVQDSGEFECRTEGVSAFFGVTVQDPPVHIVDPREHVFVHAITSECVMLACEVDREDAPVRWYKDGQEVEESDFVVLENEGPHRRLVLPATQPSDGGEFQCVAGDECAYFTVTITDVSSWIVYPSGKVYVAAVRLERVVLTCELCRPWAEVRWTKDGEEVVESPALLLQKEDTVRRLVLPAVQLEDSGEYLCEIDDESASFTVTVTEPPVRIIYPRDEVTLIAVTLECVVLMCELSREDAPVRWYKDGLEVEESEALVLERDGPRCRLVLPAAQPEDGGEFVCDAGDDSAFFTVTVTAPPERIVHPAARSLDLHFGAPGRVELRCEVAPAGSQVRWYKDGLEVEASDALQLGAEGPTRTLTLPHAQPEDAGEYVCETRHEAITFNVILAEPPVQFLALETTPSPLCVAPGEPVVLSCELSRAGAPVVWSHNGRPVQEGEGLELHAEGPRRVLCIQAAGPAHAGLYTCQSGAAPGAPSLSFTVQVAEPPVRVVAPEAAQTRVRSTPGGDLELVVHLSGPGGPVRWYKDGERLASQGRVQLEQAGARQVLRVQGARSGDAGEYLCDAPQDSRIFLVSVEEPLLVKLVSDLTPLTVHEGDDATFRCEVSPPDADVTWLRNGAVVTPGPQVEMAQNGSSRILTLRGCQLGDAGTVTLRAGSTATSARLHVRETELLFLRRLQDVRAEEGQDVCLEVETGRVGAAGAVRWVRGGQPLPHDSRLSMAQDGHIHRLFIHGVILADQGTYGCESHHDRTLARLSVRRRERAYAYPRLRLQALGTRRLLQLRRCGPSDAGTYSCAVGTARAGPVRLTVRGGYGVMWRLGTALGARLAELSSPDPDDLRVLLERGRGGGVTGNCPLPRPAHAPGSAPERTVAVLSELRSVSAREGDGATFECTVSEVETTGRWELGGRPLRPGARVRIQQEGKKHILVLSELRAEDAGEVRFQAGPAQSLALLEVEALPLQMCRHPPREKTVLVGRRAVLEVTVSRSGGHVCWLREGAELCPGDKYEMRSHGPTHSLVIHDVRPEDQGTYCCQAGQDSTHTRLLVEGN

SEQ ID NO: 843815 - protein, 1659 aa, Homo sapiens
APGLGSPLRTPPCPPTVRRCRRSAAAMKASSGDQGSPPCFLRFPRPVRVVSGAEAELKCVVLGEPPPVVVWEKGGQQLAASERLSFPADGAEHGLLLTAALPTDAGVYVCRARNAAGEAYAAAAVTVLEPPASDPELQPAERPLPSPGSGEGAPVFLTGPRSQWVLRGAEVVLTCRAGGLPEPTLYWEKDGMALDEVWDSSHFALQPGRAEDGPGASLALRILAARLPDSGVYVCHARNAHGHAQAGALLQVHQPPESPPADPDEAPAPVVEPLKCAPKTFWVNEGKHAKFRCYVMGKPEPEIEWHWEGRPLLPDRRRLMYRDRDGGFVLKVLYCQAKDRGLYVCAARNSAGQTLSAVQLHVKEPRLRFTRPLQDVEGREHGIAVLECKVPNSRIPTAWFREDQRLLPCRKYEQIEEGTVRRLIIHRLKADDDGIYLCEMRGRVRTVANVTVKGPILKRLPRKLDVLEGENAVLLVETLEAGVEGRWSRDGEELPVICQSSSGHMHALVLPGVTREDAGEVTFSLGNSRTTTLLRVKCVKHSPPGPPILAEMFKGHKNTVLLTWKPPEPAPETPFIYRLERQEVGSEDWIQCFSIEKAGAVEVPGDCVPSEGDYRFRICTVSGHGRSPHVVFHGSAHLVPTARLVAGLEDVQVYDGEDAVFSLDLSTIIQGTWFLNGEELKSNEPEGQVEPGALRYRIEQKGLQHRLILHAVKHQDSGALVGFSCPGVQDSAALTIQESPVHILSPQDKVSLTFTTSERVVLTCELSRVDFPATWYKDGQKVEESELLVVKMDGRKHRLILPEAKVQDSGEFECRTEGVSAFFGVTVQDPPVHIVDPREHVFVHAITSECVMLACEVDREDAPVRWYKDGQEVEESDFVVLENEGPHRRLVLPATQPSDGGEFQCVAGDECAYFTVTITDVSSWIVYPSGKVYVAAVRLERVVLTCELCRPWAEVRWTKDGEEVVESPALLLQKEDTVRRLVLPAVQLEDSGEYLCEIDDESASFTVTVTEPPVRIIYPRDEVTLIAVTLECVVLMCELSREDAPVRWYKDGLEVEESEALVLERDGPRCRLVLPAAQPEDGGEFVCDAGDDSAFFTVTVTETTPSPLCVAPGEPVVLSCELSRAGAPVVWSHNGRPVQEGEGLELHAEGPRRVLCIQAAGPAHAGLYTCQSGAAPGAPSLSFTVQVAEPLLVKLVSDLTPLTVHEGDDATFRCEVSPPDADVTWLRNGAVVTPGPQVEMAQNGSSRILTLRGCQLGDAGTVTLRAGSTATSARLHVRETELLFLRRLQDVRAEEGQDVCLEVETGRVGAAGAVRWVRGGQPLPHDSRLSMAQDGHIHRLFIHGVILADQGTYGCESHHDRTLARLSVRRRERAYAYPRLRLQALGTRRLLQLRRCGPSDAGTYSCAVGTARAGPVRLTVRGGYGVMWRLGTALGARLAELSSPDPDDLRVLLERGRGGGVTGNCPLPRPAHAPGSAPERTVAVLSELRSVSAREGDGATFECTVSEVETTGRWELGGRPLRPGARVRIQQEGKKHILVLSELRAEDAGEVRFQAGPAQSLALLEVEALPLQMCRHPPREKTVLVGRRAVLEVTVSRSGGHVCWLREGAELCPGDKYEMRSHGPTHSLVIHDVRPEDQGTYCCQAGQDSTHTRLLVEGN

SEQ ID NO: 843816 - protein, 1051 aa, Homo sapiens; identical to SEQ ID NO: 843810

SEQ ID NO: 843817 - protein, 501 aa, Homo sapiens
YSHYYVGDRDFMLPNGSREADGELVTGCGCPHPAEPPVRIIYPRDEVTLIAVTLECVVLMCELSREDAPVRWYKDGLEVEESEALVLERDGPRCRLVLPAAQPEDGGEFVCDAGDDSAFFTVTVTAPPERIVHPAARSLDLHFGAPGRVELRCEVAPAGSQVRWYKDGLEVEASDALQLGAEGPTRTLTLPHAQPEDAGEYVCETRHEAITFNVILAEPPVQFLALETTPSPLCVAPGEPVVLSCELSRAGAPVVWSHNGRPVQEGEGLELHAEGPRRVLCIQAAGPAHAGLYTCQSGAAPGAPSLSFTVQVAEPLLVKLVSDLTPLTVHEGDDATFRCEVSPPDADVTWLRNGAVVTPGPQVEMAQNGSSRILTLRGCQLGDAGTVTLRAGSTATSARLHVRETELLFLRRLQDVRAEEGQDVCLEVETGRVGAAGAVRWVRGGQPLPHDSRLSMAQDGHIHRLFIHGVILADQGTYGCESHHDRTLARLSVRRECPVLS

SEQ ID NO: 843818 - protein, 420 aa, Homo sapiens
MAQNGSSRILTLRGCQLGDAGTVTLRAGSTATSARLHVRETELLFLRRLQDVRAEEGQDVCLEVETGRVGAAGAVRWVRGGQPLPHDSRLSMAQDGHIHRLFIHGVILADQGTYGCESHHDRTLARLSVRRRERAYAYPRLRLQALGTRRLLQLRRCGPSDAGTYSCAVGTARAGPVRLTVRGGYGVMWRLGTALGARLAELSSPDPDDLRVLLERGRGGGVTGNCPLPRPAHAPGSAPERTVAVLSELRSVSAREGDGATFECTVSEVETTGRWELGGRPLRPGARVRIQQEGKKHILVLSELRAEDAGEVRFQAGPAQSLALLEVEALPLQMCRHPPREKTVLVGRRAVLEVTVSRSGGHVCWLREGAELCPGDKYEMRSHGPTHSLVIHDVRPEDQGTYCCQAGQDSTHTRLLVEGN

SEQ ID NO: 843819 - protein, 118 aa, Homo sapiens [sequence omitted]

SEQ ID NO: 843820 - protein, 632 aa, Homo sapiens [sequence omitted]

SEQ ID NO: 843821 - protein, 152 aa, Homo sapiens
MTTSALRRQVKNIVHNYSEAEIKVREATSNDPWGPPSSLMSEIADLTFNTVAFTEVMGMLWRRLNDSGKNWRHVYKALTLLDYLLKTGSERVAHQCRENLYTIQTLKDFQYIDRDGGKARAKGQGSPREEAGRTPQNGQQKGSTKKRPHKKK

SEQ ID NO: 843822 - protein, 632 aa, Homo sapiens [sequence omitted]

SEQ ID NO: 843823 - protein, 562 aa, Homo sapiens
MTTSALRRQVKNIVHNYSEAEIKVREATSNDPWGPPSSLMSEIADLTFNTVAFTEVMGMLWRRLNDSGKNWRHVYKALTLLDYLLKTGSERVAHQCRENLYTIQTLKDFQYIDRDGKDQGVNVREKVKQVMALLKDEERLRQERTHALKTKERMALEGIGIGSGQLGFSRRYGEDYSRSRGSPSSYNCPASDSGEEELQLQLALAMSREEAEKEVRSWQGDGSPMANGAGAVVHHQRDREPEREERKEEEKLKTSQVLGRTQRPVDPPGGLLQTPGLRSPQETVLSRSQPWDLTPMLSSSEPWGRTPVLPAGPPTTDPWALNSPHHKLPSTGADPWGASLETSDTPGGASTFDPFAKPPESTETKEGLEQALPSGKPSSPVELDLFGDPSPSSKQNGTKEPDALDLGILGEALTQPSKEARACRTPESFLGPSASSLVNLDSLVKAPQVAKTRNPFLTGLSAPSPTNPFGAGETGRPTLNQMRTGSPALGLAGGPVGAPLGSMTYSASLPLPLSSVPAGLTLPASVSVFPQAGAFAPQPLLPTPSSAGPRPPPPQTGTNPFL

SEQ ID NO: 843824 - protein, 69 aa, Homo sapiens
GMCLYCWDIEPSQVNPEGPRQHHPSEVTERQLANKRIQNMQHLKKEKRRLNKRFSRPSPIPEPGLLWSS

SEQ ID NO: 843825 - protein, 505 aa, Homo sapiens
SGAAGPARGARGQGRRVRGRSPPPFSAGSARGPGRGGSGGGGGGTARPSSDPRSASPPPGGGAHSLAARAGRQTRPVGDFLRTQAPRPRRKMQTFLKGKRVGYWLSEKKIKKLNFQAFAELCRKRGMEVVQLNLSRPIEEQGPLDVIIHKLTDVILEADQNDSQSLELVHRFQEYIDAHPETIVLDPLPAIRTLLDRSKSYELIRKIEAYMEDDRICSPPFMELTSLCGDDTMRLLEKNGLTFPFICKTRVAHGTNSHEMAIVFNQEGLNAIQPPCVVQNFINHNAVLYKVFVVGESYTVVQRPSLKNFSAGTSDRESIFFNSHNVSKPESSSVLTELDKIEGVFERPSDEVIRELSRALRQALGVSLFGIDIIINNQTGQHAVIDINAFPGYEGVSEFFTDLLNHIATVLQGQSTAMAATGDVALLRHSKLLAEPAGGLVGERTCSASPGCCGSMMGQDAPWKAEADAGGTAKLPHQRLGCNAGVSPSFQQHCVASLATKASSQ

SEQ ID NO: 843826 - protein, 464 aa, Homo sapiens
RGGRASAGRPRAGAASARALAAALLGGQRARTRPRRKWRRRRRAPRPRRKMQTFLKGKRVGYWLSEKKIKKLNFQAFAELCRKRGMEVVQLNLSRPIEEQGPLDVIIHKLTDVILEADQNDSQSLELVHRFQEYIDAHPETIVLDPLPAIRTLLDRSKSYELIRKIEAYMEDDRICSPPFMELTSLCGDDTMRLLEKNGLTFPFICKTRVAHGTNSHEMAIVFNQEGLNAIQPPCVVQNFINHNAVLYKVFVVGESYTVVQRPSLKNFSAGTSDRESIFFNSHNVSKPESSSVLTELDKIEGVFERPSDEVIRELSRALRQALGVSLFGIDIIINNQTGQHAVIDINAFPGYEGVSEFFTDLLNHIATVLQGQSTAMAATGDVALLRHSKLLAEPAGGLVGERTCSASPGCCGSMMGQDAPWKAEADAGGTAKLPHQRLGCNAGVSPSFQQHCVASLATKASSQ

SEQ ID NO: 843827 - protein, 416 aa, Homo sapiens
MHAHTRTHTKLSCLLVCPPEAGTCWSLRSTWSGPDVRCVYLELNLSRPIEEQGPLDVIIHKLTDVILEADQNDSQSLELVHRFQEYIDAHPETIVLDPLPAIRTLLDRSKSYELIRKIEAYMEDDRICSPPFMELTSLCGDDTMRLLEKNGLTFPFICKTRVAHGTNSHEMAIVFNQEGLNAIQPPCVVQNFINHNAVLYKVFVVGESYTVVQRPSLKNFSAGTSDRESIFFNSHNVSKPESSSVLTELDKIEGVFERPSDEVIRELSRALRQALGVSLFGIDIIINNQTGQHAVIDINAFPGYEGVSEFFTDLLNHIATVLQGQSTAMAATGDVALLRHSKLLAEPAGGLVGERTCSASPGCCGSMMGQDAPWKAEADAGGTAKLPHQRLGCNAGVSPSFQQHCVASLATKASSQ

SEQ ID NO: 843828 - protein, 511 aa, Homo sapiens
SGAAGPARGARGQGRRVRGRSPPPFSAGSARGPGRGGSGGGGGGTARPSSDPRSASPPPGGGAHSLAARAGRQTRPVGDFLRTQAPRPRRKMQTFLKGKRVGYWLSEKKIKKLNFQAFAELCRKRGMEVVQLNLSRPIEEQGPLDVIIHKLTDVILEADQNDSQSLELVHRFQEYIDAHPETIVLDPLPAIRTLLDRSKSYELIRKIEAYMEGLPSALDDRICSPPFMELTSLCGDDTMRLLEKNGLTFPFICKTRVAHGTNSHEMAIVFNQEGLNAIQPPCVVQNFINHNAVLYKVFVVGESYTVVQRPSLKNFSAGTSDRESIFFNSHNVSKPESSSVLTELDKIEGVFERPSDEVIRELSRALRQALGVSLFGIDIIINNQTGQHAVIDINAFPGYEGVSEFFTDLLNHIATVLQGQSTAMAATGDVALLRHSKLLAEPAGGLVGERTCSASPGCCGSMMGQDAPWKAEADAGGTAKLPHQRLGCNAGVSPSFQQHCVASLATKASSQ

SEQ ID NO: 843829 - protein, 273 aa, Homo sapiens
MRLLEKNGLTFPFICKTRVAHGTNSHEMAIVFNQEGLNAIQPPCVVQNFINHNAVLYKVFVVGESYTVVQRPSLKNFSAGTSDRESIFFNSHNVSKPESSSVLTELDKIEGVFERPSDEVIRELSRALRQALGVSLFGIDIIINNQTGQHAVIDINAFPGYEGVSEFFTDLLNHIATVLQGQSTAMAATGDVALLRHSKLLAEPAGGLVGERTCSASPGCCGSMMGQDAPWKAEADAGGTAKLPHQRLGCNAGVSPSFQQHCVASLATKASSQ

SEQ ID NO: 843830 - protein, 505 aa, Homo sapiens; identical to SEQ ID NO: 843825

SEQ ID NO: 843831 - protein, 405 aa, Homo sapiens
SGAAGPARGARGQGRRVRGRSPPPFSAGSARGPGRGGSGGGGGGTARPSSDPRSASPPPGGGAHSLAARAGRQTRPVGDFLRTQAPRPRRKMQTFLKGKRVGYWLSEKKIKKLNFQAFAELCRKRGMEVVQLNLSRPIEEQGPLDVIIHKLTDVILEADQNDSQSLELVHRFQEYIDAHPETIVLDPLPAIRTLLDRSKSYELIRKIEAYMEDDRICSPPFMELTSLCGDDTMRLLEKNGLTFPFICKTRVAHGTNSHEMAIVFNQEGLNAIQPPCVVQNFINHNAVLYKVFVVGESYTVVQRPSLKNFSAGTSDRESIFFNSHNVSKPESSSVLTELDKIEGVFERPSDEVIRELSRALRQALGVSLFGIDIIINNQTGQHAVIDINAFPGDCQVCFIEGWKTD

SEQ ID NO: 843832 - protein, 464 aa, Homo sapiens; identical to SEQ ID NO: 843826

SEQ ID NO: 843833 - protein, 505 aa, Homo sapiens; identical to SEQ ID NO: 843825

SEQ ID NO: 843834 - protein, 295 aa, Homo sapiens
MEDDRICSPPFMELTSLCGDDTMRLLEKNGLTFPFICKTRVAHGTNSHEMAIVFNQEGLNAIQPPCVVQNFINHNAVLYKVFVVGESYTVVQRPSLKNFSAGTSDRESIFFNSHNVSKPESSSVLTELDKIEGVFERPSDEVIRELSRALRQALGVSLFGIDIIINNQTGQHAVIDINAFPGYEGVSEFFTDLLNHIATVLQGQSTAMAATGDVALLRHSKLLAEPAGGLVGERTCSASPGCCGSMMGQDAPWKAEADAGGTAKLPHQRLGCNAGVSPSFQQHCVASLATKASSQ

SEQ ID NO: 843835 - protein, 505 aa, Homo sapiens; identical to SEQ ID NO: 843825

SEQ ID NO: 843836 - protein, 243 aa, Homo sapiens
MASGADSKGDDLSTAILKQKNRPNRLIVDEAINEDNSVVSLSQPKMDELQLFRGDTVLLKGKKRREAVCIVLSDDTCSDEKIRMNRVVRNNLRVRLGDVISIQPCPDVKYGKRIHVLPIDDTVEGITGNLFEVYLKPYFLEAYRPIRKTGPFPGRGGIRAVGVHRGGTIPSLCDVGQNQGVPGRGPSHAVGALKAVTLAGTSPIRWAPDPPRGPPALASAWLQALQPPYRPALLPRACSIVHT

SEQ ID NO: 843837 - protein, 198 aa, Homo sapiens
MASGADSKGDDLSTAILKQKNRPNRLIVDEAINEDNSVVSLSQPKMDELQLFRGDTVLLKGKKRREAVCIVLSDDTCSDEKIRMNRVVRNNLRVRLGDVISIQPCPDVKYGKRIHVLPIDDTVEGITGNLFEVYLKPYFLEAYRPIRKGDIFLVRGGMRAVEFKVVETDPSPYCIVAPDTVIHCEGEPIKREDKVLMK

SEQ ID NO: 843838 - protein, 806 aa, Homo sapiens
MASGADSKGDDLSTAILKQKNRPNRLIVDEAINEDNSVVSLSQPKMDELQLFRGDTVLLKGKKRREAVCIVLSDDTCSDEKIRMNRVVRNNLRVRLGDVISIQPCPDVKYGKRIHVLPIDDTVEGITGNLFEVYLKPYFLEAYRPIRKGDIFLVRGGMRAVEFKVVETDPSPYCIVAPDTVIHCEGEPIKREDEEESLNEVGYDDIGGCRKQLAQIKEMVELPLRHPALFKAIGVKPPRGILLYGPPGTGKTLIARAVANETGAFFFLINGPEIMSKLAGESESNLRKAFEEAEKNAPAIIFIDELDAIAPKREKTHGEVERRIVSQLLTLMDGLKQRAHVIVMAATNRPNSIDPALRRFGRFDREVDIGIPDATGRLEILQIHTKNMKLADDVDLEQVANETHGHVGADLAALCSEAALQAIRKKMDLIDLEDETIDAEVMNSLAVTMDDFRWALSQSNPSALRETVVEVPQVTWEDIGGLEDVKRELQELVQYPVEHPDKFLKFGMTPSKGVLFYGPPGCGKTLLAKAIANECQANFISIKGPELLTMWFGESEANVREIFDKARQAAPCVLFFDELDSIAKARGGNIGDGGGAADRVINQILTEMDGMSTKKNVFIIGATNRPDIIDPAILRPGRLDQLIYIPLPDEKSRVAILKANLRKSPVAKDVDLEFLAKMTNGFSGADLTEICQRACKLAIRESIESEIRRERERQTNPSAMEVEEDDPVPEIRRDHFEEAMRFARRSVSDNDIRKYEMFAQTLQQSRGFGSFRFPSGNQGGAGPSQGSGGGTGGSVYTEDNDDDLYG

SEQ ID NO: 843839 - protein, 105 aa, Homo sapiens
VVSEVPHSFGLTCAFPVAKDVDLEFLAKMTNGFSGADLTEICQRACKLAIRESIESEIRRERERQTNPSAMVSLHPFPRCANHGEPGSSHHHALELRVEAVGKII

SEQ ID NO: 843840 - protein, 104 aa, Homo sapiens
YLCCCFKDVDLEFLAKMTNGFSGADLTEICQRACKLAIRESIESEIRRERERQTNPSAMEVEERVCDEKLNEESFELQVSEEEEEFGLDEEDEDEDEDEEEEEG

SEQ ID NO: 843841 - protein, 108 aa, Homo sapiens
LWSPERAGPASPRPQPGPVGVDFAPCEGLRSSATEAEPGVGEGPPSSGKLTAAFLEPGRRGRRWASSVCDLSREGLLGRGRALPFASGLLTLGLLFILESLSQFSLML

SEQ ID NO: 843842 - protein, 806 aa, Homo sapiens; identical to SEQ ID NO: 843838

SEQ ID NO: 843843 - protein, 806 aa, Homo sapiens; identical to SEQ ID NO: 843838

SEQ ID NO: 843844 - protein, 806 aa, Homo sapiens; identical to SEQ ID NO: 843838

SEQ ID NO: 843845 - protein, 806 aa, Homo sapiens; identical to SEQ ID NO: 843838

SEQ ID NO: 843846 - protein, 806 aa, Homo sapiens; identical to SEQ ID NO: 843838

SEQ ID NO: 843847 - protein, 806 aa, Homo sapiens; identical to SEQ ID NO: 843838

SEQ ID NO: 843848 - protein, 863 aa, Homo sapiens
LHTTTHLRLGTRLGVANRRLSRRCRCRCHCHCHLADQEPALFARRLAAGGRKREGSRLRVCRRSKGDDLSTAILKQKNRPNRLIVDEAINEDNSVVSLSQPKMDELQLFRGDTVLLKGKKRREAVCIVLSDDTCSDEKIRMNRVVRNNLRVRLGDVISIQPCPDVKYGKRIHVLPIDDTVEGITGNLFEVYLKPYFLEAYRPIRKGDIFLVRGGMRAVEFKVVETDPSPYCIVAPDTVIHCEGEPIKREDEEESLNEVGYDDIGGCRKQLAQIKEMVELPLRHPALFKAIGVKPPRGILLYGPPGTGKTLIARAVANETGAFFFLINGPEIMSKLAGESESNLRKAFEEAEKNAPAIIFIDELDAIAPKREKTHGEVERRIVSQLLTLMDGLKQRAHVIVMAATNRPNSIDPALRRFGRFDREVDIGIPDATGRLEILQIHTKNMKLADDVDLEQVANETHGHVGADLAALCSEAALQAIRKKMDLIDLEDETIDAEVMNSLAVTMDDFRWALSQSNPSALRETVVEVPQVTWEDIGGLEDVKRELQELVQYPVEHPDKFLKFGMTPSKGVLFYGPPGCGKTLLAKAIANECQANFISIKGPELLTMWFGESEANVREIFDKARQAAPCVLFFDELDSIAKARGGNIGDGGGAADRVINQILTEMDGMSTKKNVFIIGATNRPDIIDPAILRPGRLDQLIYIPLPDEKSRVAILKANLRKSPVAKDVDLEFLAKMTNGFSGADLTEICQRACKLAIRESIESEIRRERERQTNPSAMEVEEDDPVPEIRRDHFEEAMRFARRSVSDNDIRKYEMFAQTLQQSRGFGSFRFPSGNQGGAGPSQGSGGGTGGSVYTEDNDDDLYG

SEQ ID NO: 843849 - protein, 792 aa, Homo sapiens
MASGADSKGDDLSTAILKQKNRPNRLIVDEAINEDNSVVSLSQPKMDELQLFRGDTVLLKGKKRREAVCIVLSDDTCSDEKIRMNRVVRNNLRVRLGDVISIQPCPDVKYGKRIHVLPIDDTVEGITGNLFEVYLKPYFLEAYRPIRKGDIFLVRGGMRAVEFKVVVIHCEGEPIKREDEEESLNEVGYDDIGGCRKQLAQIKEMVELPLRHPALFKAIGVKPPRGILLYGPPGTGKTLIARAVANETGAFFFLINGPEIMSKLAGESESNLRKAFEEAEKNAPAIIFIDELDAIAPKREKTHGEVERRIVSQLLTLMDGLKQRAHVIVMAATNRPNSIDPALRRFGRFDREVDIGIPDATGRLEILQIHTKNMKLADDVDLEQVANETHGHVGADLAALCSEAALQAIRKKMDLIDLEDETIDAEVMNSLAVTMDDFRWALSQSNPSALRETVVEVPQVTWEDIGGLEDVKRELQELVQYPVEHPDKFLKFGMTPSKGVLFYGPPGCGKTLLAKAIANECQANFISIKGPELLTMWFGESEANVREIFDKARQAAPCVLFFDELDSIAKARGGNIGDGGGAADRVINQILTEMDGMSTKKNVFIIGATNRPDIIDPAILRPGRLDQLIYIPLPDEKSRVAILKANLRKSPVAKDVDLEFLAKMTNGFSGADLTEICQRACKLAIRESIESEIRRERERQTNPSAMEVEEDDPVPEIRRDHFEEAMRFARRSVSDNDIRKYEMFAQTLQQSRGFGSFRFPSGNQGGAGPSQGSGGGTGGSVYTEDNDDDLYG

SEQ ID NO: 843850 - protein, 797 aa, Homo sapiens
MPLYNRARLRILRPNRLIVDEAINEDNSVVSLSQPKMDELQLFRGDTVLLKGKKRREAVCIVLSDDTCSDEKIRMNRVVRNNLRVRLGDVISIQPCPDVKYGKRIHVLPIDDTVEGITGNLFEVYLKPYFLEAYRPIRKGDIFLVRGGMRAVEFKVVETDPSPYCIVAPDTVIHCEGEPIKREDEEESLNEVGYDDIGGCRKQLAQIKEMVELPLRHPALFKAIGVKPPRGILLYGPPGTGKTLIARAVANETGAFFFLINGPEIMSKLAGESESNLRKAFEEAEKNAPAIIFIDELDAIAPKREKTHGEVERRIVSQLLTLMDGLKQRAHVIVMAATNRPNSIDPALRRFGRFDREVDIGIPDATGRLEILQIHTKNMKLADDVDLEQVANETHGHVGADLAALCSEAALQAIRKKMDLIDLEDETIDAEVMNSLAVTMDDFRWALSQSNPSALRETVVEVPQVTWEDIGGLEDVKRELQELVQYPVEHPDKFLKFGMTPSKGVLFYGPPGCGKTLLAKAIANECQANFISIKGPELLTMWFGESEANVREIFDKARQAAPCVLFFDELDSIAKARGGNIGDGGGAADRVINQILTEMDGMSTKKNVFIIGATNRPDIIDPAILRPGRLDQLIYIPLPDEKSRVAILKANLRKSPVAKDVDLEFLAKMTNGFSGADLTEICQRACKLAIRESIESEIRRERERQTNPSAMEVEEDDPVPEIRRDHFEEAMRFARRSVSDNDIRKYEMFAQTLQQSRGFGSFRFPSGNQGGAGPSQGSGGGTGGSVYTEDNDDDLYG

SEQ ID NO: 843851 - protein, 683 aa, Homo sapiens
RDWVLKVVTLTWPVVFTIYNDLIRKGDIFLVRGGMRAVEFKVVETDPSPYCIVAPDTVIHCEGEPIKREDEEESLNEVGYDDIGGCRKQLAQIKEMVELPLRHPALFKAIGVKPPRGILLYGPPGTGKTLIARAVANETGAFFFLINGPEIMSKLAGESESNLRKAFEEAEKNAPAIIFIDELDAIAPKREKTHGEVERRIVSQLLTLMDGLKQRAHVIVMAATNRPNSIDPALRRFGRFDREVDIGIPDATGRLEILQIHTKNMKLADDVDLEQVANETHGHVGADLAALCSEAALQAIRKKMDLIDLEDETIDAEVMNSLAVTMDDFRWALSQSNPSALRETVVEVPQVTWEDIGGLEDVKRELQELVQYPVEHPDKFLKFGMTPSKGVLFYGPPGCGKTLLAKAIANECQANFISIKGPELLTMWFGESEANVREIFDKARQAAPCVLFFDELDSIAKARGGNIGDGGGAADRVINQILTEMDGMSTKKNVFIIGATNRPDIIDPAILRPGRLDQLIYIPLPDEKSRVAILKANLRKSPVAKDVDLEFLAKMTNGFSGADLTEICQRACKLAIRESIESEIRRERERQTNPSAMEVEEDDPVPEIRRDHFEEAMRFARRSVSDNDIRKYEMFAQTLQQSRGFGSFRFPSGNQGGAGPSQGSGGGTGGSVYTEDNDDDLYG

SEQ ID NO: 843852 - protein, 797 aa, Homo sapiens
MASGADSKGDDLSTAILKQKNRPNRLIVDEAINEDNSVVSLSQPKMDELQLFRGDTVLLKGKKRREAVCIVLSDDTCSDEKIRMNRVVRNNLRVRLGDVISIQPCPDVKYGKRIHVLPIDDTVEGITGNLFEVYLKPYFLEAYRPIRKGDIFLVRGGMRAVEFKVVETDPSPYCIVAPDTVIHCEGEPIKREDEEESLNEVGYDDIGGCRKQLAQIKEMVELPLRHPALFKAIGVKPPRGILLYGPPGTGKTLIARAVANETGAFFFLINGPEIMSKLAGESESNLRKAFEEAEKNAPAIIFIDELDAIAPKREKTHGEVERRIVSQLLTLMDGLKQRAHVIVMAATNRPNSIDPALRRFGRFDREVDIGIPDATGRLEILQIHTKNMKLADDVDLEQVANETHGHVGADLAALCSEAALQAIRKKMDLIDLEDETIDAEVMNSLAVTMDDFRWALSQSNPSALRETVVEVPQVTWEDIGGLEDVKRELQELVQYPVEHPDKFLKFGMTPSKGVLFYGPPGCGKTLLAKAIANECQANFISIKGPELLTMWFGESEANVREIFDKARQAAPCVLFFDELDSIAKARGGNIGDGGGAADRVINQILTEMDGMSTKKNVFIIGATNRPDIIDPAILRPGRLDQLIYIPLPDEKSRVAILKANLRKSPVAKDVDLEFLAKMTNGFSGADLTEICQRACKLAIRESIESEIRRERERQTNPSAMEVEEDDPVPEIRRDHFEEAMRFARRSVSDNDIRKYEMFAQTLQQSRGFGSFRFPSGTSVELAPVGLVGGYQLDSIMY

SEQ ID NO: 843853 - protein, 733 aa, Homo sapiens [sequence omitted]

SEQ ID NO: 843854 - protein, 520 aa, Homo sapiens
LGVYSDEGKNAPAIIFIDELDAIAPKREKTHGEVERRIVSQLLTLMDGLKQRAHVIVMAATNRPNSIDPALRRFGRFDREVDIGIPDATGRLEILQIHTKNMKLADDVDLEQVANETHGHVGADLAALCSEAALQAIRKKMDLIDLEDETIDAEVMNSLAVTMDDFRWALSQSNPSALRETVVEVPQVTWEDIGGLEDVKRELQELVQYPVEHPDKFLKFGMTPSKGVLFYGPPGCGKTLLAKAIANECQANFISIKGPELLTMWFGESEANVREIFDKARQAAPCVLFFDELDSIAKARGGNIGDGGGAADRVINQILTEMDGMSTKKNVFIIGATNRPDIIDPAILRPGRLDQLIYIPLPDEKSRVAILKANLRKSPVAKDVDLEFLAKMTNGFSGADLTEICQRACKLAIRESIESEIRRERERQTNPSAMEVEEDDPVPEIRRDHFEEAMRFARRSVSDNDIRKYEMFAQTLQQSRGFGSFRFPSGNQGGAGPSQGSGGGTGGSVYTEDNDDDLYG

SEQ ID NO: 843855 - protein, 585 aa, Homo sapiens
MASGADSKGDDLSTAILKQKNRPNRLIVDEAINEDNSVVSLSQPKMDELQLFRGDTVLLKGKKRREAVCIVLSDDTCSDEKIRMNRVVRNNLRVRLGDVISIQPCPDVKYGKRIHVLPIDDTVEGITGNLFEVYLKPYFLEAYRPIRKGDIFLVRGGMRAVEFKVVETDPSPYCIVAPDTVIHCEGEPIKREDEEESLNEVGYDDIGGCRKQLAQIKEMVELPLRHPALFKAIGVKPPRGILLYGPPGTGKTLIARAVANETGAFFFLINGPEIMSKLAGESESNLRKAFEEAEKNAPAIIFIDELDAIAPKREKTHGEVERRIVSQLLTLMDGLKQRAHVIVMAATNRPNSIDPALRRFGRFDREVDIGIPDATGRLEILQIHTKNMKLADDVDLEQVANETHGHVGADLAALCSEAALQAIRKKMDLIDLEDETIDAEVMNSLAVTMDDFRWALSQSNPSALRETVVEVPQVTWEDIGGLEDVKRELQELVQYPVEHPDKFLKFGMTPSKGVLFYGPPGCGKTLLAKAIANECQANFISIKGPELLTMWLMTRSAAPPPSPMLPPRALAIESSSSKNSTQGAA

SEQ ID NO: 843856 - protein, 198 aa, Homo sapiens; identical to SEQ ID NO: 843837

SEQ ID NO: 843857 - protein, 135 aa, Homo sapiens
KGPGGVRKFRARNGSKNFWPMRACKLAIRESIESEIRRERERQTNPSAMEVEEDDPVPEIRRDHFEEAMRFARRSVSDNDIRKYEMFAQTLQQSRGFGSFRFPSGNQGGAGPSQGSGGGTGGSVYTEDNDDDLYG

SEQ ID NO: 843858 - protein, 243 aa, Homo sapiens; identical to SEQ ID NO: 843836

SEQ ID NO: 843859 - protein, 217 aa, Homo sapiens
MASGADSKGDDLSTAILKQKNRPNRLIVDEAINEDNSVVSLSQPKMDELQLFRGDTVLLKGKKRREAVCIVLSDDTCSDEKIRMNRVVRNNLRVRLGDVISIQPCPDVKYGKRIHVLPIDDTVEGITGNLFEVYLKPYFLEAYRPIRKGDIFLVRGGMRAVEFKVVETDPSPYCIVAPDTVIHCEGEPIKRERKVCKNGITTGAGTYSKDMESPKGL

SEQ ID NO: 843860 - protein, 118 aa, Homo sapiens
MASGADSKGDDLSTAILKQKNRPNRLIVDEAINEDNSVVSLSQPKMDELQLFRGDTVLLKGKKRREAVCIVLSDDTCSDEKIRMNRVVRNNLRVRLGDVISIQQLCEVRQTIRDTVFV

SEQ ID NO: 843861 - protein, 166 aa, Homo sapiens
LEYPPLHLPVRLGDVISIQPCPDVKYGKRIHVLPIDDTVEGITGNLFEVYLKPYFLEAYRPIRKGDIFLVRGGMRAVEFKVVETDPSPYCIVAPDTVIHCEGEPIKREDEEESLNEVGYDDIGGCRKHGGTIWWRKLWSRRQWRKWGLWWEEPILSFFLFAMGFTV

SEQ ID NO: 843862 - protein, 92 aa, Homo sapiens
GSRVKLHFILDFLMELVRLRMEPDLTEICQRACKLAIRESIESEIRRERERQTNPSAMVSLHPFPRCANHGEPGSSHHHALELRVEAVGKII

SEQ ID NO: 843863 - protein, 806 aa, Homo sapiens; identical to SEQ ID NO: 843838

SEQ ID NO: 843864 - protein, 806 aa, Homo sapiens; identical to SEQ ID NO: 843838

SEQ ID NO: 843865 - protein, 806 aa, Homo sapiens; identical to SEQ ID NO: 843838

SEQ ID NO: 843866 - protein, 806 aa, Homo sapiens; identical to SEQ ID NO: 843838

SEQ ID NO: 843867 - protein, 806 aa, Homo sapiens; identical to SEQ ID NO: 843838

SEQ ID NO: 843868 - protein, 806 aa, Homo sapiens; identical to SEQ ID NO: 843838

SEQ ID NO: 843869 - protein, 770 aa, Homo sapiens
MASGADSKGDDLSTAILKQKNRPNRLIVDEAINEDNSVVSLSQPKMDELQLFRGDTVLLKGKKRREAVCIVLSDDTCSDEKIRMNRVVRNNLRVRLGDVISIQPCPDVKYGKRIHVLPIDDTVEGITGNLFEVYLKPYFLEAYRPIRKGDIFLVRGGMRAVEFKVVETDPSPYCIVAPDTVIHCEGEPIKREDEEESLNEPPRGILLYGPPGTGKTLIARAVANETGAFFFLINGPEIMSKLAGESESNLRKAFEEAEKNAPAIIFIDELDAIAPKREKTHGEVERRIVSQLLTLMDGLKQRAHVIVMAATNRPNSIDPALRRFGRFDREVDIGIPDATGRLEILQIHTKNMKLADDVDLEQVANETHGHVGADLAALCSEAALQAIRKKMDLIDLEDETIDAEVMNSLAVTMDDFRWALSQSNPSALRETVVEVPQVTWEDIGGLEDVKRELQELVQYPVEHPDKFLKFGMTPSKGVLFYGPPGCGKTLLAKAIANECQANFISIKGPELLTMWFGESEANVREIFDKARQAAPCVLFFDELDSIAKARGGNIGDGGGAADRVINQILTEMDGMSTKKNVFIIGATNRPDIIDPAILRPGRLDQLIYIPLPDEKSRVAILKANLRKSPVAKDVDLEFLAKMTNGFSGADLTEICQRACKLAIRESIESEIRRERERQTNPSAMEVEEDDPVPEIRRDHFEEAMRFARRSVSDNDIRKYEMFAQTLQQSRGFGSFRFPSGNQGGAGPSQGSGGGTGGSVYTEDNDDDLYG

SEQ ID NO: 843870 - protein, 762 aa, Homo sapiens
MASGADSKGDDLSTAILKQKNRPNRLIVDEAINEDNSVVSLSQPKMDELQLFRGDTVLLKGKKRREAVCIVLSDDTCSDEKIRMNRVVRNNLRVRLGDVISIQPCPDVKYGKRIHVLPIDDTVEGITGNLFEVYLKPYFLEAYRPIRKGDIFLVRGGMRAVEFKVVETDPSPYCIVAPDTVIHCEGEPIKREPPRGILLYGPPGTGKTLIARAVANETGAFFFLINGPEIMSKLAGESESNLRKAFEEAEKNAPAIIFIDELDAIAPKREKTHGEVERRIVSQLLTLMDGLKQRAHVIVMAATNRPNSIDPALRRFGRFDREVDIGIPDATGRLEILQIHTKNMKLADDVDLEQVANETHGHVGADLAALCSEAALQAIRKKMDLIDLEDETIDAEVMNSLAVTMDDFRWALSQSNPSALRETVVEVPQVTWEDIGGLEDVKRELQELVQYPVEHPDKFLKFGMTPSKGVLFYGPPGCGKTLLAKAIANECQANFISIKGPELLTMWFGESEANVREIFDKARQAAPCVLFFDELDSIAKARGGNIGDGGGAADRVINQILTEMDGMSTKKNVFIIGATNRPDIIDPAILRPGRLDQLIYIPLPDEKSRVAILKANLRKSPVAKDVDLEFLAKMTNGFSGADLTEICQRACKLAIRESIESEIRRERERQTNPSAMEVEEDDPVPEIRRDHFEEAMRFARRSVSDNDIRKYEMFAQTLQQSRGFGSFRFPSGNQGGAGPSQGSGGGTGGSVYTEDNDDDLYG

SEQ ID NO: 843871 - protein, 925 aa, Homo sapiens
THHHPLTARYEAGCCEPSFESSLPLPLPLPLPPRGSGASVVRPTPRCRWEEARGKPLAGLSPLLAHRLEEPSPGPVGRLPPLVAVTRGPPQPPAGRGARHGFWSRVSVRAPFAAAAARTGTSRAGSKGDDLSTAILKQKNRPNRLIVDEAINEDNSVVSLSQPKMDELQLFRGDTVLLKGKKRREAVCIVLSDDTCSDEKIRMNRVVRNNLRVRLGDVISIQPCPDVKYGKRIHVLPIDDTVEGITGNLFEVYLKPYFLEAYRPIRKGDIFLVRGGMRAVEFKVVETDPSPYCIVAPDTVIHCEGEPIKREDEEESLNEVGYDDIGGCRKQLAQIKEMVELPLRHPALFKAIGVKPPRGILLYGPPGTGKTLIARAVANETGAFFFLINGPEIMSKLAGESESNLRKAFEEAEKNAPAIIFIDELDAIAPKREKTHGEVERRIVSQLLTLMDGLKQRAHVIVMAATNRPNSIDPALRRFGRFDREVDIGIPDATGRLEILQIHTKNMKLADDVDLEQVANETHGHVGADLAALCSEAALQAIRKKMDLIDLEDETIDAEVMNSLAVTMDDFRWALSQSNPSALRETVVEVPQVTWEDIGGLEDVKRELQELVQYPVEHPDKFLKFGMTPSKGVLFYGPPGCGKTLLAKAIANECQANFISIKGPELLTMWFGESEANVREIFDKARQAAPCVLFFDELDSIAKARGGNIGDGGGAADRVINQILTEMDGMSTKKNVFIIGATNRPDIIDPAILRPGRLDQLIYIPLPDEKSRVAILKANLRKSPVAKDVDLEFLAKMTNGFSGADLTEICQRACKLAIRESIESEIRRERERQTNPSAMEVEEDDPVPEIRRDHFEEAMRFARRSVSDNDIRKYEMFAQTLQQSRGFGSFRFPSGNQGGAGPSQGSGGGTGGSVYTEDNDDDLYG

SEQ ID NO: 843872 - protein, 806 aa, Homo sapiens; identical to SEQ ID NO: 843838

SEQ ID NO: 843873 - protein, 733 aa, Homo sapiens [sequence omitted]

SEQ ID NO: 843874 - protein, 728 aa, Homo sapiens
MASGADSKGDDLSTAILKQKNRPNRLIVDEAINEDNSVVSLSQPKMDELQLFRGDTVLLKGKKRREAVCIVLSDDTCSDEKIRMNRVVRNNLRVRLGDVISIQPCPDVKYGKRIHVLPIDDTVEGITGNLFEVYLKPYFLEAYRPIRKGDIFLVRGGMRAVEFKVVETDPSPYCIVAPDTVIHCEGEPIKREDEEESLNEVGYDDIGGCRKQLAQIKEMVELPLRHPALFKAIGVKPPRGILLYGPPGTGKTLIARAVANETGAFFFLINGPEIMSKLAGESESNLRKAFEEAEKNAPAIIFIDELDAIAPKREKTHGEVERRIVSQLLTLMDGLKQRAHVIVMAATNRPNSIDPALRRFGRFDREVDIGIPDATGRLEILQIHTKNMKLADDVDLEQVANETHGHVGADLAALCSEAALQAIRKKMDLIDLEDETIDAEVMNSLAVTMDDFRWALSQSNPSALRETVVEVPQVTWEDIGGLEDVKRELQELVQYPVEHPDKFLKFGMTPSKGVLFYGPPGCGKTLLAKAIANECQANFISIKGPELLTMWFGESEANVREIFDKARQAAPCVLFFDELDSIAKARGGNIGDGGGAADRVINQILTEMDGMSTKKNVFIIGATNRPDIIDPAILRPGRLDQLIYIPLPDEKSRVAILKANLRKSPVAKDVDLEFLAKMTNGFSGADLTEICQRACKLAIRESIENHFEEAMRFARRSVSDNDIRNICT

SEQ ID NO: 843875 - protein, 639 aa, Homo sapiens
MASGADSKGDDLSTAILKQKNRPNRLIVDEAINEDNSVVSLSQPKMDELQLFRGDTVLLKGKKRREAVCIVLSDDTCSDEKIRMNRVVRNNLRVRLGDVISIQPCPDVKYGKRIHVLPIDDTVEGITGNLFEVYLKPYFLEAYRPIRKGDIFLVRGGMRAVEFKVVETDPSPYCIVAPDTVIHCEGEPIKREDEEESLNEVGYDDIGGCRKQLAQIKEMVELPLRHPALFKAIGVKPPRGILLYGPPGTGKTLIARAVANETGAFFFLINGPEIMSKLAGESESNLRKAFEEAEKNAPAIIFIDELDAIAPKREKTHGEVERRIVSQLLTLMDGLKQRAHVIVMAATNRPNSIDPALRRFGRFDREVDIGIPDATGRLEILQIHTKNMKLADDVDLEQVANETHGHVGADLAALCSEAALQAIRKKMDLIDLEDETIDAEVMNSLAVTMDDFRWALSQSNPSALRETVVEVPQVTWEDIGGLEDVKRELQELVQYPVEHPDKFLKFGMTPSKGVLFYGPPGCGKTLLAKAIANECQANFISIKGPELLTMWFGESEANVREIFDKARQAAPCVLFFDELDSIAKARGGNIGDGGGAADRVINQILTEMDGRINDVRPVGSANDEHIFFLWTCHPFLVGC

SEQ ID NO: 843876 - protein, 513 aa, Homo sapiens
MASGADSKGDDLSTAILKQKNRPNRLIVDEAINEDNSVVSLSQPKMDELQLFRGDTVLLKGKKRREAVCIVLSDDTCSDEKIRMNRVVRNNLRVRLGDVISIQPCPDVKYGKRIHVLPIDDTVEGITGNLFEVYLKPYFLEAYRPIRKGDIFLVRGGMRAVEFKVVETDPSPYCIVAPDTVIHCEGEPIKREDEEESLNEVGYDDIGGCRKQLAQIKEMVELPLRHPALFKAIGVKPPRGILLYGPPGTGKTLIARAVANETGAFFFLINGPEIMSKLAGESESNLRKAFEEAEKNAPAIIFIDELDAIAPKREKTHGEVERRIVSQLLTLMDGLKQRAHVIVMAATNRPNSIDPALRRFGRFDREVDIGIPDATGRLEILQIHTKNMKLADDVDLEQVANETHGHVGADLAALCSEAALQAIRKKMDLIDLEDETIDAEVMNSLAVTMDDFRGHEQINHQNAGTGVSARYLGDSGAEESGEQAAFCGPESEWDAWGNCRFVAALGGVGQMPV

SEQ ID NO: 843877 - protein, 168 aa, Homo sapiens
MASGADSKGDDLSTAILKQKNRPNRLIVDEAINEDNSVVSLSQPKMDELQLFRGDTVLLKGKKRREAVCIVLSDDTCSDEKIRMNRVVRNNLRVRLGDVISIQPCPDVKYGKRIHVLPIDDTVEGITGNLFEVYLKPYFLEAYRPIRKGLLAGGRRGASRGHDLTLLC

SEQ ID NO: 843878 - protein, 130 aa, Homo sapiens
  misc_feature (2)..(3): Xaa can be any naturally occurring amino acid
GXXRTTARYEAWVVASVLPASGRRAGAALGSVGWAADVMWPVFWTVVRTYAPYVTFPVAFVVGAVGYHLEWFIRGKDPQPVEEEKSISERREDRKLDELLGKDHTQVVSLKDKLEFAPKAVLNRNRPEKN

SEQ ID NO: 843879 - protein, 187 aa, Homo sapiens
MVLLWVVTCPATMLTEPQNPHLIGFVAYSGPSHTTQPHKYWLLLDGQADPAAAEGPVKRKAASVVWWPQALRHLSLLVHCWEESYEMNIGCQSLWAGGLASSGNGWDLGVAFRRDTCMSSSSLHWKEFKYAPGSLHYFALSFVLILTEICLVSSGMGFPQEGKHFSVLGSPDCSLWGRDEHVPREFA

SEQ ID NO: 843880 - protein, 187 aa, Homo sapiens; identical to SEQ ID NO: 843879

SEQ ID NO: 843881 - protein, 187 aa, Homo sapiens; identical to SEQ ID NO: 843879

SEQ ID NO: 843882 - protein, 160 aa, Homo sapiens
MEDTGPYGPTVGGDLSCYHVDRAPEPTSNWLCCLFWPFPHPQALRHLSLLVHCWEESYEMNIGCQSLWAGGLASSGNGWDLGVAFRRDTCMSSSSLHWKEFKYAPGSLHYFALSFVLILTEICLVSSGMGFPQEGKHFSVLGSPDCSLWGRDEHVPREFA

SEQ ID NO: 843883 - protein, 187 aa, Homo sapiens; identical to SEQ ID NO: 843879

SEQ ID NO: 843884 - protein, 187 aa, Homo sapiens; identical to SEQ ID NO: 843879

SEQ ID NO: 843885 - protein, 187 aa, Homo sapiens; identical to SEQ ID NO: 843879

SEQ ID NO: 843886 - protein, 187 aa, Homo sapiens; identical to SEQ ID NO: 843879

SEQ ID NO: 843887 - protein, 117 aa, Homo sapiens [sequence omitted]

SEQ ID NO: 843888 - protein, 113 aa, Homo sapiens
KKRRNNGRAKKGRGHVQPIRCTNCARCVPKDNAIKKFVIRNIVEAAAVRDISEASVFDAYVLPKLYVKLHYCVSCAIHSKVVRNRSREARKDRTPPPRFRPAGAAPRPPPKPM

SEQ ID NO: 843889 - protein, 144 aa, Homo sapiens
VQPAGSKTQRSLKKHEKRMSKDEERAVKDELLSEKPEIKQKWASRLLAKLRKDIRQEYREDFVLTVTGKKHPCCVLSNPDQKGKIRRIDCLRQADKVWRLDLVMVILFKGIPLESTDGERLMKSPHCTNPALCVQPHHITVSVK

SEQ ID NO: 843890 - protein, 118 aa, Homo sapiens
  misc_feature (11)..(11): Xaa can be any naturally occurring amino acid
MYMIMSLIMRXRPPVQGPGENKNREVTMSSYLLELGHILPLLSLDNNSRLPSLQTPGLLPSPPPFLASQAFGLELRATPSDSLILRPSGLELSHTTSLPGSPVCRRPVLGLLANFPNK

SEQ ID NO: 843891 - protein, 92 aa, Homo sapiens
DKFEHLKMIQQEEIRKLEEEKKKLEGEIIDFYKMKAASEALQTQLSTDTKKDKHPDPYEFLLLRKIKHPGFNEELTITLLIIQKHVAGLSHF

SEQ ID NO: 843892 - protein, 92 aa, Homo sapiens; identical to SEQ ID NO: 843891

SEQ ID NO: 843893 - protein, 92 aa, Homo sapiens; identical to SEQ ID NO: 843891

SEQ ID NO: 843894 - protein, 131 aa, Homo sapiens
  misc_feature (107)..(107): Xaa can be any naturally occurring amino acid
  misc_feature (124)..(124): Xaa can be any naturally occurring amino acid
MSQGVRRAGAGQGVAAAVQLLVTLSFLRSVVEAQVTGVLDDCLCDIDSIDNFNTYKIFPKIKKLQERDYFRYYKVNLKRPCPFWAEDGHCSIKDCHVEPCPESKIPXGMLGILISTWEQLTGHXVIKAAFI

SEQ ID NO: 843895 - protein, 467 aa, Homo sapiens [sequence omitted]

SEQ ID NO: 843896 - protein, 467 aa, Homo sapiens [sequence omitted]

SEQ ID NO: 843897 - protein, 448 aa, Homo sapiens [sequence omitted]

SEQ ID NO: 843898 - protein, 176 aa, Homo sapiens
MSQGVRRAGAGQGVAAAVQLLVTLSFLRSVVEAQVTGVLDDCLCDIDSIDNFNTYKIFPKIKKLQERDYFRYYKVNLKRPCPFWAEDGHCSIKDCHVEPCPESKIPVGIKAGHSNKYLKMANNTKELEVCEQANKLGAINSTLSNQSKEAFIDWARYDDSRDHFCELDGNTINYYN

SEQ ID NO: 843899 - protein, 116 aa, Homo sapiens
MSQGVRRAGAGQGVAAAVQLLVTLSFLRSVVEAQVTGVLDDCLCDIDSIDNFNTYKIFPKIKKLQERDYFRYYKVNLKRPCPFWAEDGHCSIKDCHVEPCPESKIPVGIKAGHSNK

SEQ ID NO: 843900 - protein, 467 aa, Homo sapiens [sequence omitted]

SEQ ID NO: 843901 - protein, 348 aa, Homo sapiens
MANNTKELEVCEQANKLGAINSTLSNQSKEAFIDWARYDDSRDHFCELDDERSPAAQYVDLLLNPERYTGYKGTSAWRVWNSIYEENCFKPRSVYRPLNPLAPSRGEDDGESFYTWLEGLCLEKRVFYKLISGLHASINLHLCANYLLEETWGKPSWGPNIKEFKHRFDPVETKGEGPRRLKNLYFLYLIELRALSKVAPYFERSIVDLYTGNAEEDADTKTLLLNIFQDTKSFPMHFDEKSMFAGDKKGAKSLKEEFRLHFKNISRIMDCVGCDKCRLWGKLQTQGLGTALKILFSEKEIQKLPENSPSKGFQLTRQEIVALLNAFGRLSTSIRDLQNFKVLLQQSR

SEQ ID NO: 843902 - protein, 467 aa, Homo sapiens [sequence omitted]

SEQ ID NO: 843903 - protein, 467 aa, Homo sapiens [sequence omitted]

SEQ ID NO: 843904 - protein, 276 aa, Homo sapiens
MAAVRALVASRLAAASAFTSLSPGGRTPSQRAALHLSVPRPAARVALVLSGCGVYDGTEIHEASAILVHLSRGGAEVQIFAPDVPQMHVIDHTKGQPSEGESRNVLTESARIARGKITDLANLSAANHDAAIFPGGFGAAKNLSTFAVDGKDCKVNKEVERVLKEFHQAGKPIGLCCIAPVLAAKVLRGVEVTVGHEQEEGGKWPYAGTAEAIKALGAKHCVKEVVCPELWDTSWWLSGIQVATVLPGSLCCPLLRPWLLDASAYVCLLALFSWVL

SEQ ID NO: 843905 - protein, 213 aa, Homo sapiens
MAAVRALVASRLAAASAFTSLSPGGRTPSQRAALHLSVPRPAARVALVLSGCGVYDGTEIHEASAILVHLSRGGAEVQIFAPDVPQMHVIDHTKGQPSEGESRNVLTESARIARGKITDLANLSAANHDAAIFPGGFGAAKNLSTFAVDGKDCKVNKEVERVLKEFHQAGKPIGCVQPCRPRGGREEGAWARGLCSQPGAAADPENSQLLFLF

SEQ ID NO: 843906 - protein, 118 aa, Homo sapiens
GVCALQRLLPGSHSQMCEGDPARPGSASAGVMLPRASRHLLLGGPGTRRCAVQVSAASGAGRARAALAWVNISEAHSRWPLTTEFCQPNKDEDLSESSVSPPTVTHLRTCLVTVQGGP

SEQ ID NO: 843907 - protein, 148 aa, Homo sapiens
MKAEYLEPLSSLHQEGLHLHLWAKLLNEPPGTDLLTALCQASQCFHSYLPFGTSWAACPRSESRNVLTESARIARGKITDLANLQIFAPDVPQMHVIDHTKGQPSEGESRNVLTESARIARGKITDLANLSIFAPDVPQMHVIDHTCG

SEQ ID NO: 843908 - protein, 268 aa, Homo sapiens
MAAVRALVASRLAAASAFTSLSPGGRTPSQRAALHLSVPRPAARVALVLSGCGVYDGTEIHEASAILVHLSRGGAEVQIFAPDVPQMHVIDHTKGQPSEGESRNVLTESARIARGKITDLANLSAANHDAAIFPGGFGAAKNLSTFAVDGKDCKVNKEVERVLKEFHQAGKPIGLCCIAPVLAAKVLRGVEVTVGHEQEEGGKWPYAGTAEAIKALGAKHCVKEVVEAHVDQKNKVVTTPAFMCETALHYIHDGIGAMVRKVLELTGK

SEQ ID NO: 843909 - protein, 388 aa, Homo sapiens
CAGAVPTSNAFVEGWVRTLCPCVTFRPRCPHRNGGCEGPGGLEARCGICIHVPVPRRSDAFPARSPSPLRAAPRGQGRAGEWTEGVRSAPASRDQPSLFSAQGRPLFLGPLPPPHVGSFTPSQLLRPRSAPFSRVSARGPGRPLSPQSTPAAQVGPFPPGQLPLLSQVLSGCGVYDGTEIHEASAILVHLSRGGAEVQIFAPDVPQMHVIDHTKGQPSEGESRNVLTESARIARGKITDLANLSAANHDAAIFPGGFGAAKNLSTFAVDGKDCKVNKEVERVLKEFHQAGKPIGLCCIAPVLAAKVLRGVEVTVGHEQEEGGKWPYAGTAEAIKALGAKHCVKEVVEAHVDQKNKVVTTPAFMCETALHYIHDGIGAMVRKVLELTGK

SEQ ID NO: 843910 - protein, 247 aa, Homo sapiens
MMYSRRRVYFGRAFAFRSVPRGTFALVLSGCGVYDGTEIHEASAILVHLSRGGAEVQIFAPDVPQMHVIDHTKGQPSEGESRNVLTESARIARGKITDLANLSAANHDAAIFPGGFGAAKNLSTFAVDGKDCKVNKEVERVLKEFHQAGKPIGLCCIAPVLAAKVLRGVEVTVGHEQEEGGKWPYAGTAEAIKALGAKHCVKEVVEAHVDQKNKVVTTPAFMCETALHYIHDGIGAMVRKVLELTGK

SEQ ID NO: 843911 - protein, 275 aa, Homo sapiens
MAAVRALVASRLAAASAFTSLSPGGRTPSQRAALHLSVPRPAARVALVLSGCGVYDGTEIHEASAILVHLSRGGAEVQIFAPDVPQMHVIDHTKGQPSEGESRNVLTESARIARGKITDLANLSAANHDAAIFPGGFGAAKNLSTFAVDGKDCKVNKEVERVLKEFHQAGKPIGLCCIAPVLAAKVLRGVEVTVGHEQEEGGKWPYAGTAEAIKALGAKHCVKEVVEAHVDQKNKVVTTPAFMCETALHYIHDGIGAMEEREIAAPQPPGLTSGE

SEQ ID NO: 843912 - protein, 371 aa, Homo sapiens
CAGAVPTSNAFVEGWVRTLCPCVTFRPRCPHRNGGCEGPGGLEARCGICIHVPVPRRSDAFPARSPSPLRAAPRGQGRAGEWTEGVRSAPASRDQPSLFSAQGRPLFLGPLPPPHVGSFTPSQLLRPRSAPFSRVSARGPGRPLSPQSTPAAQVGPFPPGQLPLLSQVLSGCGVYDGTEIHEASAILVHLSRGGAEVQIFAPDVPQMHVIDHTKGQPSEGESRNVLTESARIARGKITDLANLSAANHDAAIFPGGFGAAKNLSTFAVDGKDCKVNKEVERVLKEFHQAGKPIGHSLKDLPGHCPGRPLKWSLRKRCRLRAPEGGPCCSRVTAGVKVSPMVSTSGSRPCQRSVPWMSAQREEPMALSSVTD

SEQ ID NO: 843913 - protein, 197 aa, Homo sapiens
MAAVRALVASRLAAASAFTSLSPGGRTPSQRAALHLSVPRPAARVALVLSGCGVYDGTEIHEASAILVHLSRGGAEVQIFAPDVPQMHVIDHTKGQPSEGESRNVLTESARIARGKITDLANLSAANHDAAIFPGGFGAAKNLCVFELQGLPLSMWSRWEGGAPVCCPMWSVERRWEGVVIGAVSGFRVWAGHVPAL

SEQ ID NO: 843914 - protein, 268 aa, Homo sapiens; identical to SEQ ID NO: 843908

SEQ ID NO: 843915 - protein, 217 aa, Homo sapiens
MAAVRALVASRLAAASAFTSLSPGGRTPSQRAALHLSVPRPAARVALVLSGCGVYDGTEIHEASAILVHLSRGGAEVQIFAPDVPQMHVIDHTKGQPSEGESRNVLTESARIARGKITDLANLSAANHDAAIFPGGFGAAKNLSTFAVDGKDCKVNKEVERVLKEFHQAGKPIGCDASTSLPAPAPWWSWNAALCCPGLSCVWCWQGESRTCVGEHQ

SEQ ID NO: 843916 - protein, 244 aa, Homo sapiens
MAAVRALVASRLAAASAFTSLSPGGRTPSQRAALHLSVPRPAARVALVLSGCGVYDGTEIHEASAILVHLSRGGAEVQIFAPDVPQMHVIDHTKGQPSEGESRNVLTESARIARGKITDLANLSAANHDAAIFPGGFGAAKNLLCCIAPVLAAKVLRGVEVTVGHEQEEGGKWPYAGTAEAIKALGAKHCVKEVVEAHVDQKNKVVTTPAFMCETALHYIHDGIGAMEEREIAAPQPPGLTSGE

SEQ ID NO: 843917 - protein, 268 aa, Homo sapiens; identical to SEQ ID NO: 843908

SEQ ID NO: 843918 - protein, 182 aa, Homo sapiens
MHVIDHTKGQPSEGESRNVLTESARIARGKITDLANLSAANHDAAIFPGGFGAAKNLSTFAVDGKDCKVNKEVERVLKEFHQAGKPIGLCCIAPVLAAKVLRGVEVTVGHEQEEGGKWPYAGTAEAIKALGAKHCVKEVVEAHVDQKNKVVTTPAFMCETALHYIHDGIGAMVRKVLELTGK

SEQ ID NO: 843919 - protein, 275 aa, Homo sapiens
CAGAVPTSNAFVEGWVRTLCPCVTFRPRCPHRNGGCEGPGGLEARCGICIHVPVPRRSDAFPARSPSPLRAAPRGQGRAGAVWMRSLRWDRDPRGLGEVLRGSWSSTPGANVLTESARIARGKITDLANLSAANHDAAIFPGGFGAAKNLSTFAVDGKDCKVNKEVERVLKEFHQAGKPIGLCCIAPVLAAKVLRGVEVTVGHEQEEGGKWPYAGTAEAIKALGAKHCVKEVVEAHVDQKNKVVTTPAFMCETALHYIHDGIGAMVRKVLELTGK

SEQ ID NO: 843920 - protein, 237 aa, Homo sapiens
MAAVRALVASRLAAASAFTSLSPGGRTPSQRAALHLSVPRPAARVALVLSGCGVYDGTEIHEASAILVHLSRGGAEVQIFAPDVPQMHVIDHTKGQPSEGESRNVLTESARIARGKITDLANLSAANHDAAIFPGGFGAAKNLLCCIAPVLAAKVLRGVEVTVGHEQEEGGKWPYAGTAEAIKALGAKHCVKEVVEAHVDQKNKVVTTPAFMCETALHYIHDGIGAMVRKVLELTGK

SEQ ID NO: 843921 - protein, 135 aa, Homo sapiens
SEEAFLSPGRSTFAVDGKDCKVNKEVERVLKEFHQAGKPIGLCCIAPVLAAKVLRGVEVTVGHEQEEGGKWPYAGTAEAIKALGAKHCVKEVVEAHVDQKNKVVTTPAFMCETALHYIHDGIGAMVRKVLELTGK

SEQ ID NO: 843922 - protein, 69 aa, Homo sapiens
IGARVLGGVEAWPVVTCMVLGRLRSVAGRPQLCHLLPCCLLPCPMRTGSFTASSSSEKRRCCHCLPWWL

SEQ ID NO: 843923 - protein, 268 aa, Homo sapiens; identical to SEQ ID NO: 843908

SEQ ID NO: 843924 - protein, 251 aa, Homo sapiens
MAAVRALVASRLAAASAFTSLSPGGRTPSQRAALHLSVPRPAARVALVLSGCGVYDGTEIHEASAILVHLSRGGAEVQIFAPDVPQMHVIDHTKGQPSEGESRNVLTESARIARGKITDLANLSAANHDAAIFPGGFGAAKNLSTFAVDGKDCKVNKEVERVLKEFHQAGKPIGHSLKDLPGHCPGRPLKWSLRKRCRLRAPEGGPCCSRVTAGVKVSPMVSTSGSRPCQRSVPWMSAQREEPMALSSVTD

SEQ ID NO: 843925 - protein, 275 aa, Homo sapiens; identical to SEQ ID NO: 843919

SEQ ID NO: 843926 - protein, 2548 aa, Homo sapiens
MNINDGGRRRFEDNEHTLRIYPGAISEGTIYCPIPARKNSTAAEVIESLINKLHLDKTKCYVLAEVKEFGGEEWILNPTDCPVQRMMLWPRMALENRLSGEDYRFLLREKNLDGSIHYGSLQSWLRVTEERRRMMERGFLPQPQQKDFDDLCSLPDLNEKTLLENLRNRFKHEKIYTYVGSILIVINPFKFLPIYNPKYVKMYDNHQLGKLEPHIYAVADVAYHAMLQRKKNQCIVISGESGSGKTQSTNFLIHHLTALSQKGFASGVEQIILGAGPVLEAFGNAKTAHNNNSSRFGKFIQVNYQETGTVLGAYVEKYLLEKSRLVYQEHNERNYHVFYYLLAGASEDERSAFHLKQPEEYHYLNQITKKPLRQSWDDYCYDSEPDCFTVEGEDLRHDFERLQLAMEMVGFLPKTRRQIFSLLSAILHLGNICYKKKTYRDDSIDICNPEVLPIVSELLEVKEEMLFEALVTRKTVTVGEKLILPYKLAEAVTVRNSMAKSLYSALFDWIVFRINHALLNSKDLEHNTKTLSIGVLDIFGFEDYENNSFEQFCINFANERLQHYFNQHIFKLEQEEYRTEGISWHNIDYIDNTCCINLISKKPTGLLHLLDEESNFPQATNQTLLDKFKHQHEDNSYIEFPAVMEPAFIIKHYAGKVKYGVKDFREKNTDHMRPDIVALLRSSKNAFISGMIGIDPVAVFRWAILRAFFRAMVAFREAGKRNIHRKTGHDDTAPCAILKSMDSFSFLQHPVHQRSLEILQRCKEEKYSITRKNPRTPLSDLQGMNALNEKNQHDTFDIAWNGRTGIRQSRLSSGTSLLDKDGIFANSTSSKLLERAHGILTRNKNFKSKPALPKHLLEVNSLKHLTRLTLQDRITKSLLHLHKKKKPPSISAQFQASLSKLMETLGQAEPYFVKCIRSNAEKLPLRFSDVLVLRQLRYTGMLETVQIRQSGYSSKYSFQDFVSHFHVLLPRNIIPSKFNIQDFFRKINLNPDNYQVGKTMVFLKEQERQHLQDLLHQEVLRRIILLQRWFRVLLCRQHFLHLRQASVIIQRFWRNYLNQKQVRDAAVQKDAFVMASAAALLQASWRAHLERQRYLELRAAAIVIQQKWRDYYRRRHMAAICIQARWKAYRESKRYQEQRKKIILLQSTCRGFRARQRFKALKEQRLRETKPEVGLVNIKGYGSLEIQGSDPSEWEDCSFDNRIKAIEECKSVIESNRISRESSVDCLKESPNKQQERAQSQSGVDLQEDVLVRERPRSLEDLHQKKVGRAKRESRRMRELEQAIFSLELLKVRSLGGISPSEDRRWSTELVPEGLQSPRGTPDSESSQGSLELLSYEESQKSKLESVISDEGDLQFPSPKISSSPKFDSRDNALSASNETSSAEHLKDGTMKEMVVCSSESITCKPQLKDSFISNSLPTFFYIPQQDPLKTNSQLDTSIQRNKLLENEDTAGEALTLDINRETRRYHCSGKDQIVPSLNTESSNPVLKKLEKLNTEKEERQKQLQQQNEKEMMEQIRQQTDILEKERKAFKTIEKPRIGECLVAPSSYQSKQRVERPSSLLSLNTSNKGELNVLGSLSLKDAALAQKDSSSAHLPPKDRPVTVFFERKGSPCQSSTVKELSKTDRMGTQLNVACKLSNNRISKREHFRPTQSYSHNSDDLSREGNARPIFFTPKDNMSIPLVSKEALNSKNPQLHKEDEPAWKPVKLAGPGQRETSQRFSSVDEQAKLHKTMSQGEITKLAVRQKASDSDIRPQRAKMRFWAKGKQGEKKTTRVKPTTQSEVSPLFAGTDVIPAHQFPDELAAYHPTPPLSPELPGSCRKEFKENKEPSPKAKRKRSVKISNVALDSMHWQNDSVQIIASVSDLKSMDEFLLKKVNDLDNEDSKKDTLVDVVFKKALKEFRQNIFSFYSSALAMDDGKSIRYKDLYALFEQILEKTMRLEQRDSLGESPVRVWVNTFKVFLDEYMNEFKTSDCTATKVPKTERKKRRKKETDLVEEHNGHIFKATQYSIPTYCEYCSSLIWIMDRASVCKLCKYACHKKCCLKTTAKCSKKYDPELSSRQFGVELSRLTSEDRTVPLVVEKLINYIEMHGLYTEGIYRKSGSTNKIKELRQGLDTDAESVNLDDYNIHVIASVFKQWLRDLPNPLMTFELYEEFLRAMGLQERKETIRGVYSVIDQLSRTHLNTLERLIFHLVRIALQEDTNRMSANALAIVFAPCILRCPDTTDPLQSVQDISKTTTCVELIVVEQMNKYKARLKDISSLEFAENKAKTRLSLIRRSMGKGRIRRGNYPGPSSPVVVRLPSVSDVSEETLTSEAAMETDITEQQQAAMQQEERVLTEQIENLQKEKEELTFEMLVLEPRASDDETLESEASIGTADSSENLNMESEYAISEKSERSLALSSLKTAGKSEPSSKLRKQLKKQQDSLDVVDSSVSSLCLSNTASSHGTRKLFQIYSKSPFYRAASGNEALGMEGPLGQTKFLEDKPQFISRGTFNPEKGKQKLKNVKNSPQKTKETPEGTVMSGRRKTVDPDCTSNQQLALFGNNEFMV

SEQ ID NO: 843927 - protein, 2620 aa, Homo sapiens
MNINDGGRRRFEDNEHTLRIYPGAISEGTIYCPIPARKNSTAAEVIESLINKLHLDKTKCYVLAEVKEFGGEEWILNPTDCPVQRMMLWPRMALENRLSGEDYRFLLREKNLDGSIHYGSLQSWLRVTEERRRMMERGFLPQPQQKDFDDLCSLPDLNEKTLLENLRNRFKHEKIYTYVGSILIVINPFKFLPIYNPKYVKMYDNHQLGKLEPHIYAVADVAYHAMLQRKKNQCIVISGESGSGKTQSTNFLIHHLTALSQKGFASGVEQIILGAGPVLEAFGNAKTAHNNNSSRFGKFIQVNYQETGTVLGAYVEKYLLEKSRLVYQEHNERNYHVFYYLLAGASEDERSAFHLKQPEEYHYLNQITKKPLRQSWDDYCYDSEPDCFTVEGEDLRHDFERLQLAMEMVGFLPKTRRQIFSLLSAILHLGNICYKKKTYRDDSIDICNPEVLPIVSELLEVKEEMLFEALVTRKTVTVGEKLILPYKLAEAVTVRNSMAKSLYSALFDWIVFRINHALLNSKDLEHNTKTLSIGVLDIFGFEDYENNSFEQFCINFANERLQHYFNQHIFKLEQEEYRTEGISWHNIDYIDNTCCINLISKKPTGLLHLLDEESNFPQATNQTLLDKFKHQHEDNSYIEFPAVMEPAFIIKHYAGKVKYGVKDFREKNTDHMRPDIVALLRSSKNAFISGMIGIDPVAVFRWAILRAFFRAMVAFREAGKRNIHRKTGHDDTAPCAILKSMDSFSFLQHPVHQRSLEILQRCKEEKYSITRKNPRTPLSDLQGMNALNEKNQHDTFDIAWNGRTGIRQSRLSSGTSLLDKDGIFANSTSSKLLERAHGILTRNKNFKSKPALPKHLLEVNSLKHLTRLTLQDRITKSLLHLHKKKKPPSISAQFQASLSKLMETLGQAEPYFVKCIRSNAEKLPLRFSDVLVLRQLRYTGMLETVQIRQSGYSSKYSFQDFVSHFHVLLPRNIIPSKFNIQDFFRKINLNPDNYQVGKTMVFLKEQERQHLQDLLHQEVLRRIILLQRWFRVLLCRQHFLHLRQASVIIQRFWRNYLNQKQVRDAAVQKDAFVMASAAALLQASWRAHLERQRYLELRAAAIVIQQKWRDYYRRRHMAAICIQARWKAYRESKRYQEQRKKIILLQSTCRGFRARQRFKALKEQRLRETKPEVGLVNIKGYGSLEIQGSDPSEWEDCSFDNRIKAIEECKSVIESNRISRESSVDCLKESPNKQQERAQSQSGVDLQEDVLVRERPRSLEDLHQKKVGRAKRESRRMRELEQAIFSLELLKVRSLGGISPSEDRRWSTELVPEGLQSPRGTPDSESSQGSLELLSYEESQKSKLESVISDEGDLQFPSPKISSSPKFDSRDNALSASNETSSAEHLKDGTMKEMVVCSSESITCKPQLKDSFISNSLPTFFYIPQQDPLKTNSQLDTSIQRNKLLENEDTAGEALTLDINRETRRYHCSGKDQIVPSLNTESSNPVLKKLEKLNTEKEERQKQLQQQNEKEMMEQIRQQTDILEKERKAFKTIEKPRIGECLVAPSSYQSKQRVERPSSLLSLNTSNKGELNVLGSLSLKDAALAQKDSSSAHLPPKDRPVTVFFERKGSPCQSSTVKELSKTDRMGTQLNVACKLSNNRISKREHFRPTQSYSHNSDDLSREGNARPIFFTPKDNMSIPLVSKEALNSKNPQLHKEDEPAWKPVKLAGPGQREQVARPAHKKKARMARTRSDFLTRGTFADGEGDTEEDDYDDIIEPLLSLDQASHCELGPAPSLGQASHSDSEMTSQRFSSVDEQAKLHKTMSQGEITKLAVRQKASDSDIRPQRAKMRFWAKGKQGEKKTTRVKPTTQSEVSPLFAGTDVIPAHQFPDELAAYHPTPPLSPELPGSCRKEFKENKEPSPKAKRKRSVKISNVALDSMHWQNDSVQIIASVSDLKSMDEFLLKKVNDLDNEDSKKDTLVDVVFKKALKEFRQNIFSFYSSALAMDDGKSIRYKDLYALFEQILEKTMRLEQRDSLGESPVRVWVNTFKVFLDEYMNEFKTSDCTATKVPKTERKKRRKKETDLVEEHNGHIFKATQYSIPTYCEYCSSLIWIMDRASVCKLCKYACHKKCCLKTTAKCSKKYDPELSSRQFGVELSRLTSEDRTVPLVVEKLINYIEMHGLYTEGIYRKSGSTNKIKELRQGLDTDAESVNLDDYNIHVIASVFKQWLRDLPNPLMTFELYEEFLRAMGLQERKETIRGVYSVIDQLSRTHLNTLERLIFHLVRIALQEDTNRMSANALAIVFAPCILRCPDTTDPLQSVQDISKTTTCVELIVVEQMNKYKARLKDISSLEFAENKAKTRLSLIRRSMGKGRIRRGNYPGPSSPVVVRLPSVSDVSEETLTSEAAMETDITEQQQAAMQQEERVLTEQIENLQKEKEELTFEMLVLEPRASDDETLESEASIGTADSSENLNMESEYAISEKSERSLALSSLKTAGKSEPSSKLRKQLKKQQDSLDVVDSSVSSLCLSNTASSHGTRKLFQIYSKSPFYRAASGNEALGMEGPLGQTKFLEDKPQFISRGTFNPEKGKQKLKNVKNSPQKTKETPEGTVMSGRRKTVDPDCTSNQQLALFGNNEFMV

SEQ ID NO: 843928 - protein, 2620 aa, Homo sapiens; identical to SEQ ID NO: 843927

SEQ ID NO: 843929 - protein, 2580 aa, Homo sapiens
MNINDGGRRRFEDNEHTLRIYPGAISEGTIYCPIPARKNSTAAEVIESLINKLHLDKTKCYVLAEVKEFGGEEWILNPTDCPVQRMMLWPRMALENRLSGEDYRFLLREKNLDGSIHYGSLQSWLRVTEERRRMMERGFLPQPQQKDFDDLCSLPDLNEKTLLENLRNRFKHEKIYTYVGSILIVINPFKFLPIYNPKYVKMYDNHQLGKLEPHIYAVADVAYHAMLQRKKNQCIVISGESGSGKTQSTNFLIHHLTALSQKGFASGVEQIILGAGPVLEAFGNAKTAHNNNSSRFGKFIQVNYQETGTVLGAYVEKYLLEKSRLVYQEHNERNYHVFYYLLAGASEDERSAFHLKQPEEYHYLNQITKKPLRQSWDDYCYDSEPDCFTVEGEDLRHDFERLQLAMEMVGFLPKTRRQIFSLLSAILHLGNICYKKKTYRDDSIDICNPEVLPIVSELLEVKEEMLFEALVTRKTVTVGEKLILPYKLAEAVTVRNSMAKSLYSALFDWIVFRINHALLNSKDLEHNTKTLSIGVLDIFGFEDYENNSFEQFCINFANERLQHYFNQHIFKLEQEEYRTEGISWHNIDYIDNTCCINLISKKPTGLLHLLDEESNFPQATNQTLLDKFKHQHEDNSYIEFPAVMEPAFIIKHYAGKVKYGVKDFREKNTDHMRPDIVALLRSSKNAFISGMIGIDPVAVFRWAILRAFFRAMVAFREAGKRNIHRKTGITRKNPRTPLSDLQGMNALNEKNQHDTFDIAWNGRTGIRQSRLSSGTSLLDKDGIFANSTSSKLLERAHGILTRNKNFKSKPALPKHLLEVNSLKHLTRLTLQDRITKSLLHLHKKKKPPSISAQFQASLSKLMETLGQAEPYFVKCIRSNAEKLPLRFSDVLVLRQLRYTGMLETVQIRQSGYSSKYSFQDFVSHFHVLLPRNIIPSKFNIQDFFRKINLNPDNYQVGKTMVFLKEQERQHLQDLLHQEVLRRIILLQRWFRVLLCRQHFLHLRQASVIIQRFWRNYLNQKQVRDAAVQKDAFVMASAAALLQASWRAHLERQRYLELRAAAIVIQQKWRDYYRRRHMAAICIQARWKAYRESKRYQEQRKKIILLQSTCRGFRARQRFKALKEQRLRETKPEVGLVNIKGYGSLEIQGSDPSEWEDCSFDNRIKAIEECKSVIESNRISRESSVDCLKESPNKQQERAQSQSGVDLQEDVLVRERPRSLEDLHQKKVGRAKRESRRMRELEQAIFSLELLKVRSLGGISPSEDRRWSTELVPEGLQSPRGTPDSESSQGSLELLSYEESQKSKLESVISDEGDLQFPSPKISSSPKFDSRDNALSASNETSSAEHLKDGTMKEMVVCSSESITCKPQLKDSFISNSLPTFFYIPQQDPLKTNSQLDTSIQRNKLLENEDTAGEALTLDINRETRRYHCSGKDQIVPSLNTESSNPVLKKLEKLNTEKEERQKQLQQQNEKEMMEQIRQQTDILEKERKAFKTIEKPRIGECLVAPSSYQSKQRVERPSSLLSLNTSNKGELNVLGSLSLKDAALAQKDSSSAHLPPKDRPVTVFFERKGSPCQSSTVKELSKTDRMGTQLNVACKLSNNRISKREHFRPTQSYSHNSDDLSREGNARPIFFTPKDNMSIPLVSKEALNSKNPQLHKEDEPAWKPVKLAGPGQREQVARPAHKKKARMARTRSDFLTRGTFADGEGDTEEDDYDDIIEPLLSLDQASHCELGPAPSLGQASHSDSEMTSQRFSSVDEQAKLHKTMSQGEITKLAVRQKASDSDIRPQRAKMRFWAKGKQGEKKTTRVKPTTQSEVSPLFAGTDVIPAHQFPDELAAYHPTPPLSPELPGSCRKEFKENKEPSPKAKRKRSVKISNVALDSMHWQNDSVQIIASVSDLKSMDEFLLKKVNDLDNEDSKKDTLVDVVFKKALKEFRQNIFSFYSSALAMDDGKSIRYKDLYALFEQILEKTMRLEQRDSLGESPVRVWVNTFKVFLDEYMNEFKTSDCTATKVPKTERKKRRKKETDLVEEHNGHIFKATQYSIPTYCEYCSSLIWIMDRASVCKLCKYACHKKCCLKTTAKCSKKYDPELSSRQFGVELSRLTSEDRTVPLVVEKLINYIEMHGLYTEGIYRKSGSTNKIKELRQGLDTDAESVNLDDYNIHVIASVFKQWLRDLPNPLMTFELYEEFLRAMGLQERKETIRGVYSVIDQLSRTHLNTLERLIFHLVRIALQEDTNRMSANALAIVFAPCILRCPDTTDPLQSVQDISKTTTCVELIVVEQMNKYKARLKDISSLEFAENKAKTRLSLIRRSMGKGRIRRGNYPGPSSPVVVRLPSVSDVSEETLTSEAAMETDITEQQQAAMQQEERVLTEQIENLQKEKEELTFEMLVLEPRASDDETLESEASIGTADSSENLNMESEYAISEKSERSLALSSLKTAGKSEPSSKLRKQLKKQQDSLDVVDSSVSSLCLSNTASSHGTRKLFQIYSKSPFYRAASGNEALGMEGPLGQTKFLEDKPQFISRGTFNPEKGKQKLKNVKNSPQKTKETPEGTVMSGRRKTVDPDCTSNQQLALFGNNEFMV

SEQ ID NO: 843930 - protein, 2620 aa, Homo sapiens; identical to SEQ ID NO: 843927

SEQ ID NO: 843931 - protein, 2562 aa, Homo sapiens
MNINDGGRRRFEDNEHTLRIYPGAISEGTIYCPIPARKNSTAAEVIESLINKLHLDKTKCYVLAEVKEFGGEEWILNPTDCPVQRMMLWPRMALENRLSGEDYRFLLREKNLDGSIHYGSLQSWLRVTEERRRMMERGFLPQPQQKDFDDLCSLPDLNEKTLLENLRNRFKHEKIYTYVGSILIVINPFKFLPIYNPKYVKMYDNHQLGKLEPHIYAVADVAYHAMLQRKKNQCIVISGESGSGKTQSTNFLIHHLTALSQKGFASGVEQIILGAGPVLEAFGNAKTAHNNNSSRFGKFIQVNYQETGTVLGAYVEKYLLEKSRLVYQEHNERNYHVFYYLLAGASEDERSAFHLKQPEEYHYLNQITKKPLRQSWDDYCYDSEPDCFTVEGEDLRHDFERLQLAMEMVGFLPKTRRQIFSLLSAILHLGNICYKKKTYRDDSIDICNPEVLPIVSELLEVKEEMLFEALVTRKTVTVGEKLILPYKLAEAVTVRNSMAKSLYSALFDWIVFRINHALLNSKDLEHNTKTLSIGVLDIFGFEDYENNSFEQFCINFANERLQHYFNQHIFKLEQEEYRTEGISWHNIDYIDNTCCINLISKKPTGLLHLLDEESNFPQATNQTLLDKFKHQHEDNSYIEFPAVMEPAFIIKHYAGKVKYGVKDFREKNTDHMRPDIVALLRSSKNAFISGMIGIDPVAVFRWAILRAFFRAMVAFREAGKRNIHRKTGHDDTAPCAILKSMDSFSFLQHPVHQRSLEILQRCKEEKYSITRKNPRTPLSDLQGMNALNEKNQHDTFDIAWNGRTGIRQSRLSSGTSLLDKDGIFANSTSSKLLERAHGILTRNKNFKSKPALPKHLLEVNSLKHLTRLTLQDRITKSLLHLHKKKKPPSISAQFQASLSKLMETLGQAEPYFVKCIRSNAEKLPLRFSDVLVLRQLRYTGMLETVQIRQSGYSSKYSFQDFVSHFHVLLPRNIIPSKFNIQDFFRKINLNPDNYQVGKTMVFLKEQERQHLQDLLHQEVLRRIILLQRWFRVLLCRQHFLHLRQASVIIQRFWRNYLNQKQVRDAAVQKDAFVMASAAALLQASWRAHLERQRYLELRAAAIVIQQKWRDYYRRRHMAAICIQARWKAYRESKRYQEQRKKIILLQSTCRGFRARQRFKALKEQRLRETKPEVGLVNIKGYGSLEIQGSDPSEWEDCSFDNRIKAIEECKSVIESNRISRESSVDCLKESPNKQQERAQSQSGVDLQEDVLVRERPRSLEDLHQKKVGRAKRESRRMRELEQAIFSLELLKVRSLGGISPSEDRRWSTELVPEGLQSPRGTPDSESSQGSLELLSYEESQKSKLESVISDEGDLQFPSPKISSSPKFDSRDNALSASNETSSAEHLKDGTMKEMVVCSSESITCKPQLKDSFISNSLPTFFYIPQQDPLKTNSQLDTSIQRNKLLENEDTAGEALTLDINRETRRYHCSGKDQIVPSLNTESSNPVLKKLEKLNTEKEERQKQLQQQNEKEMMEQIRQQTDILEKERKAFKTIEKPRIGECLVAPSSYQSKQRVERPSSLLSLNTSNKGELNVLGSLSLKDAALAQKDSSSAHLPPKDRPVTVFFERKGSPCQSSTVKELSKTDRMGTQLNVACKLSNNRISKREHFRPTQSYSHNSDDLSREGNARPIFFTPKDNMSIPLVSKEALNSKNPQLHKEDEPAWKPVKLAGPGQREQVARPAHKKKARMARTRSDFLTRGTFADGEGDTEEDDYDDIIEPLLSLDQASHCELGPAPSLGQASHSDSEMTSQRFSSVDEQAKLHKTMSQGEITKLAVRQKASDSDIRPQRAKMRFWAKGKQGEKKTTRVKPTTQSEVSPLFAGTDVIPAHQFPDELAAYHPTPPLSPELPGSCRKEFKENKEPSPKAKRKRSVKISNVALDSMHWQNDSVQIIASVSDLKSMDEFLLKKVNDLDNEDSKKDTLVDVVFKKALKEFRQNIFSFYSSALAMDDGKSIRYKDLYALFEQILEKTMRLEQRDSLGESPVRVWVNTFKVFLDEYMNEFKTSDCTATKVPKTERKKRRKKETDLYDPELSSRQFGVELSRLTSEDRTVPLVVEKLINYIEMHGLYTEGIYRKSGSTNKIKELRQGLDTDAESVNLDDYNIHVIASVFKQWLRDLPNPLMTFELYEEFLRAMGLQERKETIRGVYSVIDQLSRTHLNTLERLIFHLVRIALQEDTNRMSANALAIVFAPCILRCPDTTDPLQSVQDISKTTTCVELIVVEQMNKYKARLKDISSLEFAENKAKTRLSLIRRSMGKGRIRRGNYPGPSSPVVVRLPSVSDVSEETLTSEAAMETDITEQQQAAMQQEERVLTEQIENLQKEKEELTFEMLVLEPRASDDETLESEASIGTADSSENLNMESEYAISEKSERSLALSSLKTAGKSEPSSKLRKQLKKQQDSLDVVDSSVSSLCLSNTASSHGTRKLFQIYSKSPFYRAASGNEALGMEGPLGQTKFLEDKPQFISRGTFNPEKGKQKLKNVKNSPQKTKETPEGTVMSGRRKTVDPDCTSNQQLALFGNNEFMV

SEQ ID NO: 843932 - protein, 275 aa, Homo sapiens
MNFSLQGKGRIRRGNYPGPSSPVVVRLPSVSDVSEETLTSEAAMETDITEQQQAAMQQEERVLTEQIENLQKEKEELTFEMLVLEPRASDDETLESEASIGTADSSENLNMESEYAISEKSERSLALSSLKTAGKSEPSSKLRKQLKKQQDSLDVVDSSVSSLCLSNTASSHGTRKLFQIYSKSPFYRAASGNEALGMEGPLGQTKFLEDKPQFISRGTFNPEKGKQKLKNVKNSPQKTKETPEGTVMSGRRKTVDPDCTSNQQLALFGNNEFMV

SEQ ID NO: 843933 - protein, 795 aa, Homo sapiens
MNINDGGRRRFEDNEHTLRIYPGAISEGTIYCPIPARKNSTAAEVIESLINKLHLDKTKCYVLAEVKEFGGEEWILNPTDCPVQRMMLWPRMALENRLSGEDYRFLLREKNLDGSIHYGSLQSWLRVTEERRRMMERGFLPQPQQKDFDDLCSLPDLNEKTLLENLRNRFKHEKIYTYVGSILIVINPFKFLPIYNPKYVKMYDNHQLGKLEPHIYAVADVAYHAMLQRKKNQCIVISGESGSGKTQSTNFLIHHLTALSQKGFASGVEQIILGAGPVLEAFGNAKTAHNNNSSRFGKFIQVNYQETGTVLGAYVEKYLLEKSRLVYQEHNERNYHVFYYLLAGASEDERSAFHLKQPEEYHYLNQITKKPLRQSWDDYCYDSEPDCFTVEGEDLRHDFERLQLAMEMVGFLPKTRRQIFSLLSAILHLGNICYKKKTYRDDSIDICNPEVLPIVSELLEVKEEMLFEALVTRKTVTVGEKLILPYKLAEAVTVRNSMAKSLYSALFDWIVFRINHALLNSKDLEHNTKTLSIGVLDIFGFEDYENNSFEQFCINFANERLQHYFNQHIFKLEQEEYRTEGISWHNIDYIDNTCCINLISKKPTGLLHLLDEESNFPQATNQTLLDKFKHQHEDNSYIEFPAVMEPAFIIKHYAGKVKYGVKDFREKNTDHMRPDIVALLRSSKNAFISGMIGIDPVAVFRWAILRAFFRAMVAFREAGKRNIHRKTGHDDTAPCAILKSMDSFSFLQHPVHQRSLEILQRCKEEKYSKATNPDKLLSHIHLEMETRSILHQGGI

SEQ ID NO: 843934 - protein, 2368 aa, Homo sapiens
MNINDGGRRRFEDNEHTLRIYPGAISEGTIYCPIPARKNSTAAEVIESLINKLHLDKTKCYVLAEVKEFGGEEWILNPTDCPVQRMMLWPRMALENRLSGEDYRFLLREKNLDGSIHYGSLQSWLRVTEERRRMMERGFLPQPQQKDFDDLCSLPDLNEKTLLENLRNRFKHEKIYTYVGSILIVINPFKFLPIYNPKYVKMYDNHQLGKLEPHIYAVADVAYHAMLQRKKNQCIVISGESGSGKTQSTNFLIHHLTALSQKGFASGVEQIILGAGPVLEAFGNAKTAHNNNSSRFGKFIQVNYQETGTVLGAYVEKYLLEKSRLVYQEHNERNYHVFYYLLAGASEDERSAFHLKQPEEYHYLNQITKKPLRQSWDDYCYDSEPDCFTVEGEDLRHDFERLQLAMEMVGFLPKTRRQIFSLLSAILHLGNICYKKKTYRDDSIDICNPEVLPIVSELLEVKEEMLFEALVTRKTVTVGEKLILPYKLAEAVTVRNSMAKSLYSALFDWIVFRINHALLNSKDLEHNTKTLSIGVLDIFGFEDYENNSFEQFCINFANERLQHYFNQHIFKLEQEEYRTEGISWHNIDYIDNTCCINLISKKPTGLLHLLDEESNFPQATNQTLLDKFKHQHEDNSYIEFPAVMEPAFIIKHYAGKVKYGVKDFREKNTDHMRPDIVALLRSSKNAFISGMIGIDPVAVFRWAILRAFFRAMVAFREAGKRNIHRKTGHDDTAPCAILKSMDSFSFLQHPVHQRSLEILQRCKEEKYSITRKNPRTPLSDLQGMNALNEKNQHDTFDIAWNGRTGIRQSRLSSGTSLLDKDGIFANSTSSKLLERAHGILTRNKNFKSKPALPKHLLEVNSLKHLTRLTLQDRITKSLLHLHKKKKPPSISAQFQASLSKLMETLGQAEPYFVKCIRSNAEKLPLRFSDVLVLRQLRYTGMLETVQIRQSGYSSKYSFQDFVSHFHVLLPRNIIPSKFNIQDFFRKINLNPDNYQVGKTMVFLKEQERQHLQDLLHQEVLRRIILLQRWFRVLLCRQHFLHLRQASVIIQRFWRNYLNQKQVRDAAVQKDAFVMASAAALLQASWRAHLERQRYLELRAAAIVIQQKWRDYYRRRHMAAICIQARWKAYRESKRYQEQRKKIILLQSTCRGFRARQRFKALKEQRLRETKPEVGLVNIKGYGSLEIQGSDPSEWEDCSFDNRIKAIEECKSVIESNRISRESSVDCLKESPNKQQERAQSQSGVDLQEDVLVRERPRSLEDLHQKKVGRAKRESRRMRELEQAIFSLELLKVRSLGGISPSEDRRWSTELVPEGLQSPRGTPDSESSQGSLELLSYEESQKSKLESVISDEGDLQFPSPKISSSPKFDSRDNALSASNETSSAEHLKDGTMKEMVVCSSESITCKPQLKDSFISNSLPTFFYIPQQDPLKTNSQLDTSIQRNKLLENEDTAGEALTLDINRETRRYHCSGKDQIVPSLNTESSNPVLKKLEKLNTEKEERQKQLQQQNEKEMMEQIRQQTDILEKERKAFKTIEKPRIGECLVAPSSYQSKQRVERPSSLLSLNTSNKGELNVLGSLSLKDAALAQKDSSSAHLPPKDRPVTVFFERKGSPCQSSTVKELSKTDRMGTQLNVACKLSNNRISKREHFRPTQSYSHNSDDLSREGNARPIFFTPKDNMSIPLVSKEALNSKNPQLHKEDEPAWKPVKLAGPGQREQVARPAHKKKARMARTRSDFLTRGTFADGEGDTEEDDYDDIIEPLLSLDQASHCELGPAPSLGQASHSDSEMTSQRFSSVDEQAKLHKTMSQGEITKLAVRQKASDSDIRPQRAKMRFWAKGKQGEKKTTRVKPTTQSEVSPLFAGTDVIPAHQFPDELAAYHPTPPLSPELPGSCRKEFKENKEPSPKAKRKRSVKISNVALDSMHWQNDSVQIIASVSDLKSMDEFLLKKVNDLDNEDSKKDTLVDVVFKKALKEFRQNIFSFYSSALAMDDGKSIRYKDLYALFEQILEKTMRLEQRDSLGESPVRVWVNTFKVFLDEYMNEFKTSDCTATKVPKTERKKRRKKETDLVEEHNGHIFKATQYSIPTYCEYCSSLIWIMDRASVCKLCKYACHKKCCLKTTAKCSKKYDPELSSRQFGVELSRLTSEDRTVPLVVEKLINYIEMHGLYTEGIYRKSGSTNKIKELRQGLDTDAESVNLDDYNIHVIASVFKQWLRDLPNPLMTFELYEEFLRAMGLQERKETIRGVYSVIDQLSRTHLNTLERLIFHLVRIALQEDTNRMSANALAIVFAPCILRCPDTTDPLQSVQDISKTTTCVELIVVEQMNKYKARLKDISSLEFAENKAKTRLSLIRRSMVRCNTWNSGKMGVVLGI

SEQ ID NO: 843935 - protein, 376 aa, Homo sapiens [sequence omitted]

SEQ ID NO: 843936 - protein, 103 aa, Homo sapiens
RELCHAESAACLGHKHVACLLQLGGESQRKGLRGMQRWRGPHNMEQRQLCITLLMEKPRITAHVFCDLGLWRNRRMSILPATPSPVGSTSLPPNLPGHLEFRY

SEQ ID NO: 843937 - protein, 139 aa, Homo sapiens [sequence omitted]

SEQ ID NO: 843938 - protein, 131 aa, Homo sapiens
YSTAPKKKCIQIKDLILLGRINPGNNILEFKTQETTHKASILLNGKLKVESGQIYKNPVTWLKDLLGGNSYVTWNYAWSKVTYLGKELLRYVSEDAPILPEPNSVPQQYQPCLPEVACLDDPVQEPKQINV

SEQ ID NO: 843939 - protein, 131 aa, Homo sapiens; identical to SEQ ID NO: 843938

SEQ ID NO: 843940 - protein, 131 aa, Homo sapiens; identical to SEQ ID NO: 843938

SEQ ID NO: 843941 - protein, 128 aa, Homo sapiens
KTLSLVLWRCGFWSGVAVWSAISQVLMSNTEVTSPGTGRATPLTHKSHVQSHVMDVVGGFIPNHQYPAPWLPQVQPLRGCFTRSPHSCEHCRMSHCETTNSLALVKMTKVIGKLVTGNLPVLCICSSL

SEQ ID NO: 843942 - protein, 520 aa, Homo sapiens
MSIPLKSSFLLSYLCTLPPALLSREILMADSEALPSLAGDPVAVEALLRAVFGVVVDEAIQKGTSVSQKVCEWKEPEELKQLLDLELRSQGESQKQILERCRAVIRYSVKTGHPRFFNQLFSGLDPHALAGRIITESLNTSQYTYEIAPVFVLMEEEVLRKLRALVGWSSGDGIFCPGGSISNMYAVNLARYQRYPDCKQRGLRTLPPLALFTSKECHYSIQKGAAFLGLGTDSVRVVKADERGKMVPEDLERQIGMAEAEGAVPFLVSATSGTTVLGAFDPLEAIADVCQRHGLWLHVDAAWGGSVLLSQTHRHLLDGIQRADSVAWNPHKLLAAGLQCSALLLQDTSNLLKRCHGSQASYLFQQDKFYDVALDTGDKVVQCGRRVDCLKLWLMWKAQGDQGLERRIDQAFVLARYLVEEMKKREGFELVMEPEFVNVCFWFVPPSLRGKQESPDYHERLSKVAPVLKERMVKEGSMMIGYQPHGTRGNFFRVVVANSALTCADMDFLLNELERLGQDL

SEQ ID NO: 843943 - protein, 260 aa, Homo sapiens
MGAVPFLVSATSGTTVLGAFDPLEAIADVCQRHGLWLHVDAAWGGSVLLSQTHRHLLDGIQRADSVAWNPHKLLAAGLQCSALLLQDTSNLLKRCHGSQASYLFQQDKFYDVALDTGDKVVQCGRRVDCLKLWLMWKAQGDQGLERRIDQAFVLARYLVEEMKKREGFELVMEPEFVNVCFWFVPPSLRGKQESPDYHERLSKVAPVLKERMVKEGSMMIGYQPHGTRGNFFRVVVANSALTCADMDFLLNELERLGQDL

SEQ ID NO: 843944 - protein, 267 aa, Homo sapiens
MADSEALPSLAGDPVAVEALLRAVFGVVVDEAIQKGTSVSQKVCEWKEPEELKQLLDLELRSQGESQKQILERCRAVIRYSVKTGHPRFFNQLFSGLDPHALAGRIITESLNTSQYTYEIAPVFVLMEEEVLRKLRALVGWSSGDGIFCPGGSISNMYAVNLARYQRYPDCKQRGLRTLPPLALFTSKEVGKRHRPNPGLLILISSHVTTPSRRELRFWDLAPTVSEWSRLMREGKWSPRIWRGRLVWPRLRVLCRSWSVPPLAPLC

SEQ ID NO: 843945 - protein, 301 aa, Homo sapiens
MSIPLKSSFLLSYLCTLPPALLSREILMADSEALPSLAGDPVAVEALLRAVFGVVVDEAIQKGTSVSQKVCEWKEPEELKQLLDLELRSQGESQKQILERCRAVIRYSVKTGHPRFFNQLFSGLDPHALAGRIITESLNTSQYTYEIAPVFVLMEEEVLRKLRALVGWSSGDGIFCPGGSISNMYAVNLARYQRYPDCKQRGLRTLPPLALFTSKECHYSIQKGAAFLGLGTDSVRVVKADERGKMVPEDLERQIGMAEAEGAVPFLVSATSGTTVLGAFDPLEAIADVCQRHGLWLHVDG

SEQ ID NO: 843946 - protein, 301 aa, Homo sapiens
VEQARTTSYGRSCLHTLPPALLSREILMADSEALPSLAGDPVAVEALLRAVFGVVVDEAIQKGTSVSQKVCEWKEPEELKQLLDLELRSQGESQKQILERCRAVIRYSVKTGHPRFFNQLFSGLDPHALAGRIITESLNTSQYTYEIAPVFVLMEEEVLRKLRALVGWSSGDGIFCPGGSISNMYAVNLARYQRYPDCKQRGLRTLPPLALFTSKECHYSIQKGAAFLGLGTDSVRVVKADERGKMVPEDLERQIGMAEAEGAVPFLVSATSGTTVLGAFDPLEAIADVCQRHGLWLHVDG

SEQ ID NO: 843947 - protein, 115 aa, Homo sapiens
PLPGSAARLAGAASERVSLGTHGEVQLGEWAAPCAEGMEEGALRPARAPWPGRAPAAIETEGRTLGPSMIVRWVLDGRRVCWVSWFRLLEKSSSLFLPRGRPAHRSEPAPQVEPE

SEQ ID NO: 843948 - protein, 326 aa, Homo sapiens
MSIPLKSSFLLSYLCTLPPALLSREILMADSEALPSLAGDPVAVEALLRAVFGVVVDEAIQKGTSVSQKVCEWKEPEELKQLLDLELRSQGESQKQILERCRAVIRYSVKTGHPRFFNQLFSGLDPHALAGRIITESLNTSQYTYEIAPVFVLMEEEVLRKLRALVGWSSGDGIFCPGGSISNMYAVNLARYQRYPDCKQRGLRTLPPLALFTSKEVGKRHRPNPGLLILISSQLSRDLPGLLPALPTSSKASLPPGGCASFQSRRSSNCSCSHCLLFGGRGGAVSAVDTVHTLPTQECGLWTSSIGMTWGLLEMQNLAGHGDSRL

SEQ ID NO: 843949 - protein, 380 aa, Homo sapiens
LGTHGEVQLGWLTPVVPARWEAERGNDSALPQILMADSEALPSLAGDPVAVEALLRAVFGVVVDEAIQKGTSVSQKCHYSIQKGAAFLGLGTDSVRVVKADERGKMVPEDLERQIGMAEAEGAVPFLVSATSGTTVLGAFDPLEAIADVCQRHGLWLHVDAAWGGSVLLSQTHRHLLDGIQRADSVAWNPHKLLAAGLQCSALLLQDTSNLLKRCHGSQASYLFQQDKFYDVALDTGDKVVQCGRRVDCLKLWLMWKAQGDQGLERRIDQAFVLARYLVEEMKKREGFELVMEPEFVNVCFWFVPPSLRGKQESPDYHERLSKVAPVLKERMVKEGSMMIGYQPHGTRGNFFRVVVANSALTCADMDFLLNELERLGQDL

SEQ ID NO: 843950 - protein, 493 aa, Homo sapiens
MADSEALPSLAGDPVAVEALLRAVFGVVVDEAIQKGTSVSQKVCEWKEPEELKQLLDLELRSQGESQKQILERCRAVIRYSVKTGHPRFFNQLFSGLDPHALAGRIITESLNTSQYTYEIAPVFVLMEEEVLRKLRALVGWSSGDGIFCPGGSISNMYAVNLARYQRYPDCKQRGLRTLPPLALFTSKECHYSIQKGAAFLGLGTDSVRVVKADERGKMVPEDLERQIGMAEAEGAVPFLVSATSGTTVLGAFDPLEAIADVCQRHGLWLHVDAAWGGSVLLSQTHRHLLDGIQRADSVAWNPHKLLAAGLQCSALLLQDTSNLLKRCHGSQASYLFQQDKFYDVALDTGDKVVQCGRRVDCLKLWLMWKAQGDQGLERRIDQAFVLARYLVEEMKKREGFELVMEPEFVNVCFWFVPPSLRGKQESPDYHERLSKVAPVLKERMVKEGSMMIGYQPHGTRGNFFRVVVANSALTCADMDFLLNELERLGQDL

SEQ ID NO: 843951 - protein, 446 aa, Homo sapiens
MSIPLKSSFLLSYLCTLPPALLSREILMADSEALPSLAGDPVAVEALLRAVFGVVVDEAIQKGTSVSQKVCEWKEPEELKQLLDLELRSQGESQKQILERCRAVIRYSVKTGHPRFFNQLFSGLDPHALAGRIITESLNTKPCHYSIQKGAAFLGLGTDSVRVVKADERGKMVPEDLERQIGMAEAEGAVPFLVSATSGTTVLGAFDPLEAIADVCQRHGLWLHVDAAWGGSVLLSQTHRHLLDGIQRADSVAWNPHKLLAAGLQCSALLLQDTSNLLKRCHGSQASYLFQQDKFYDVALDTGDKVVQCGRRVDCLKLWLMWKAQGDQGLERRIDQAFVLARYLVEEMKKREGFELVMEPEFVNVCFWFVPPSLRGKQESPDYHERLSKVAPVLKERMVKEGSMMIGYQPHGTRGNFFRVVVANSALTCADMDFLLNELERLGQDL

SEQ ID NO: 843952 - protein, 301 aa, Homo sapiens; identical to SEQ ID NO: 843945

SEQ ID NO: 843953 - protein, 264 aa, Homo sapiens
MSIPLKSSFLLSYLCTLPPALLSREILMADSEALPSLAGDPVAVEALLRAVFGVVVDEAIQKGTSVSQKVCEWKEPEELKQLLDLELRSQGESQKQILERCRAVIRYSVKTGHPRFFNQLFSGLDPHALAGRIITESLNTSQYTYEIAPVFVLMEEEVLRKLRALVGWSSGDGIFCPGGSISNMYAVNLARYQRYPDCKQRGLRTLPPLALFTSKECHYSIQKGAAFLGLGTDSVRVVKADERGKMVPEDLERQIGMAEAEVSQ

SEQ ID NO: 843954 - protein, 174 aa, Homo sapiens
GGGSGGKGKGGCPAVRLKARYQTMSILPMELYKEFAEYVTNHYRMLCAVLEPALNVKGKEEVASALVHILQSTGKAKDFLSDMAMSEVDRFMEREHLIFRENTLATKAIEEYMRLIGQKYLKDAIGEFIRALYESEENCEVDPIKCTASSLAEHQANLRMCCELALCKVVNSHW

SEQ ID NO: 843955 - protein, 253 aa, Homo sapiens
GGGSGGKGKGGCPAVRLKARYQTMSILPMELYKEFAEYVTNHYRMLCAVLEPALNVKGKEEVASALVHILQSTGKAKDFLSDMAMSEVDRFMEREHLIFRENTLATKAIEEYMRLIGQKYLKDAIGEFIRALYESEENCEVDPIKCTASSLAEHQANLRMCCELALCKVVNSHCVFPRELKEVFASWRLRCAERGREDIADRLISASLFLRFLCPAIMSPSLFGLMQEYPDEQTSRTLTLIAKVIQNLANFSK

SEQ ID NO: 843956 - protein, 181 aa, Homo sapiens
GGGSGGKGKGGCPAVRLKARYQTMSILPMELYKEFAEYVTNHYRMLCAVLEPALNVKGKEEVASALVHILQSTGKAKDFLSDMAMSEVDRFMEREHLIFRENTLATKAIEEYMRLIGQKYLKDAIGEFIRALYESEENCEVDPIKCTASSLAEHQANLRMCCELALCKVVNSHCLPSCSCG

SEQ ID NO: 843957 - protein, 119 aa, Homo sapiens
MVSHCGILRRSSCLSAASPGPAPPASQWPLSAQPSSCLPAAFPSPAFDFRWPLQASTRPSLLPPEGLHRPSLCLTADSPRPASCCFTAASRVQSSCLSAASAGPAPACQWPLQAHGAHS

SEQ ID NO: 843958 - protein, 144 aa, Homo sapiens
VGLKSCERLRGLQTQAGAEPKELVGWEVEMQPGGTAPVSLYSPNVCLTADSSGPASASLWTPQAKLPTFQQLLHTHSRLPVASSGPWGSFLTTAFPGPVFPFRRPLRAQNLLKSASPDPLAPSGHSLRAQLFFLVGSPGPIPAS

SEQ ID NO: 843959 - protein, 137 aa, Homo sapiens
VGLKSCERLRGLQTQAGAEPKELVGWEVEMQPGGTAPVSLYSPNVCLTADSSGPASASLWTPQAKLPTFQQLLHTQLLPPSGLFRPSSCFTRAFPGPTFVSWQPSLARFLPVSQQPRQAQVLPHTGLSTSSLCLTVA

SEQ ID NO: 843960 - protein, 77 aa, Homo sapiens
RAWRMFATLSSLAWVLFTSPLEILLSLDLDRKWGIVFPQRQAVNLLVKCLFKKQVKIIASQLEVLPRYDLQEGPEDK

SEQ ID NO: 843961 - protein, 582 aa, Homo sapiens
MSESWQQPPQTQPQQPQPPQPQHHAEPPPALAEHTLPPGTAENPLGCAVYGILLQPDPGLQPPQHAPLQAAGEPGPKCGVCGHDLAHLSSPHEHQCLAGHDRSFQCTQCLKIFHQATDLLEHQCVQAEQKPFVCGVCKMGFSLLTSLAQHHSSHSGLVKCSICEKTYKPAEAAEPATTAAPSLPAAPAPSTVTPAEQADKPYSCPICQKPFKHLSELSRHERIHTGEKPYKCTLCDKSFSQSSHLVHHKRTHSSERPYKCAVCEKTFKHRSHLVRHMYAHSGEHHLFRCNVCELHFKESSELLQHPCTPSGERPFRCGECQKAFKRPSDLRQHERTHSAERPFKCDLCPMGFKQQYALMRHRRTHKTEEPFKCGLCEKGFGQPSHLLYHQHVHTLETLFKCPVCQKGFDQSAELLRHKCLPGAAERPFKCPVCNKAYKRASALQKHQLAHCAAAEKPLRCTLCERRFFSSSEFVQHRCDPAREKPLKCPDCEKRFKYASDLQRHRRVHTGEKPYKCPNCDKAFKQREHLNKHQGVHAREQQFKCVWCGERFLDVALLQEHSAQHSAAAAAAEGAYQVAACLP

SEQ ID NO: 843962 - protein, 582 aa, Homo sapiens; identical to SEQ ID NO: 843961

SEQ ID NO: 843963 - protein, 640 aa, Homo sapiens
MSERKEGRGKGKGKKKERGSGKKPESAAGSQSPALPPQLKEMKSQESAAGSKLVLRCETSSEYSSLRFKWFKNGNELNRKNKPQNIKIQKKPGKSELRINKASLADSGEYMCKVISKLGNDSASANITIVESNEIITGMPASTEGAYVSSESPIRISVSTEGANTSSSTSTSTTGTSHLVKCAEKEKTFCVNGGECFMVKDLSNPSRYLCKCQPGFTGARCTENVPMKVQNQEKAEELYQKRVLTITGICIALLVVGIMCVVAYCKTKKQRKKLHDRLRQSLRSERNNMMNIANGPHHPNPPPENVQLVNQYVSKNVISSEHIVEREAETSFSTSHYTSTAHHSTTVTQTPSHSWSNGHTESILSESHSVIVMSSVENSRHSSPTGGPRGRLNGTGGPRECNSFLRHARETPDSYRDSPHSERYVSAMTTPARMSPVDFHTPSSPKSPPSEMSPPVSSMTVSMPSMAVSPFMEEERPLLLVTPPRLREKKFDHHPQQFSSFHHNPAHDSNSLPASPLRIVEDEEYETTQEYEPAQEPVKKLANSRRAKRTKPNGHIANRLEVDSNTSSQSSNSESETEDERVGEDTPFLGIQNPLAASLEATPAFRLADSRTNPAGRFSTQEEIQARLSSVIANQDPIAV

SEQ ID NO: 843964 - protein, 640 aa, Homo sapiens; identical to SEQ ID NO: 843963

SEQ ID NO: 843965 - protein, 645 aa, Homo sapiens
MSERKEGRGKGKGKKKERGSGKKPESAAGSQSPALPPQLKEMKSQESAAGSKLVLRCETSSEYSSLRFKWFKNGNELNRKNKPQNIKIQKKPGKSELRINKASLADSGEYMCKVISKLGNDSASANITIVESNEIITGMPASTEGAYVSSESPIRISVSTEGANTSSSTSTSTTGTSHLVKCAEKEKTFCVNGGECFMVKDLSNPSRYLCKCPNEFTGDRCQNYVMASFYKHLGIEFMEAEELYQKRVLTITGICIALLVVGIMCVVAYCKTKKQRKKLHDRLRQSLRSERNNMMNIANGPHHPNPPPENVQLVNQYVSKNVISSEHIVEREAETSFSTSHYTSTAHHSTTVTQTPSHSWSNGHTESILSESHSVIVMSSVENSRHSSPTGGPRGRLNGTGGPRECNSFLRHARETPDSYRDSPHSERYVSAMTTPARMSPVDFHTPSSPKSPPSEMSPPVSSMTVSMPSMAVSPFMEEERPLLLVTPPRLREKKFDHHPQQFSSFHHNPAHDSNSLPASPLRIVEDEEYETTQEYEPAQEPVKKLANSRRAKRTKPNGHIANRLEVDSNTSSQSSNSESETEDERVGEDTPFLGIQNPLAASLEATPAFRLADSRTNPAGRFSTQEEIQARLSSVIANQDPIAV

SEQ ID NO: 843966 - protein, 462 aa, Homo sapiens
MSERKEGRGKGKGKKKERGSGKKPESAAGSQSPALPPQLKEMKSQESAAGSKLVLRCETSSEYSSLRFKWFKNGNELNRKNKPQNIKIQKKPGKSELRINKASLADSGEYMCKVISKLGNDSASANITIVESNEIITGMPASTEGAYVSSESPIRISVSTEGANTSSSTSTSTTGTSHLVKCAEKEKTFCVNGGECFMVKDLSNPSRYLCKCQPGFTGARCTENVPMKVQNQEKAEELYQKRVLTITGICIALLVVGIMCVVAYCKTKKQRKKLHDRLRQSLRSERNNMMNIANGPHHPNPPPENVQLVNQYVSKNVISSEHIVEREAETSFSTSHYTSTAHHSTTVTQTPSHSWSNGHTESILSESHSVIVMSSVENSRHSSPTGGPRGRLNGTGGPRECNSFLRHARETPDSYRDSPHSERHNLIAELRRNKAHRSKCMQIQLSATHLRSSSIPHLGFIL

SEQ ID NO: 843967 - protein, 241 aa, Homo sapiens
MSERKEGRGKGKGKKKERGSGKKPESAAGSQSPALPPQLKEMKSQESAAGSKLVLRCETSSEYSSLRFKWFKNGNELNRKNKPQNIKIQKKPGKSELRINKASLADSGEYMCKVISKLGNDSASANITIVESNEIITGMPASTEGAYVSSESPIRISVSTEGANTSSSTSTSTTGTSHLVKCAEKEKTFCVNGGECFMVKDLSNPSRYLCKCPNEFTGDRCQNYVMASFYSTSTPFLSLPE

SEQ ID NO: 843968 - protein, 247 aa, Homo sapiens
MSERKEGRGKGKGKKKERGSGKKPESAAGSQSPALPPQLKEMKSQESAAGSKLVLRCETSSEYSSLRFKWFKNGNELNRKNKPQNIKIQKKPGKSELRINKASLADSGEYMCKVISKLGNDSASANITIVESNEIITGMPASTEGAYVSSESPIRISVSTEGANTSSSTSTSTTGTSHLVKCAEKEKTFCVNGGECFMVKDLSNPSRYLCKCQPGFTGARCTENVPMKVQNQESAQMSLLVIAAKTT

SEQ ID NO: 843969 - protein, 703 aa, Homo sapiens
MEIYSPDMSEVAAERSSSPSTQLSADPSLDGLPAAEDMPEPQTEDGRTPGLVGLAVPCCACLEAERLRGCLNSEKICIVPILACLVSLCLCIAGLKWVFVDKIFEYDSPTHLDPGGLGQDPIISLDATAASAVWVSSEAYTSPVSRAQSESEVQVTVQGDKAVVSFEPSAAPTPKNRIFAFSFLPSTAPSFPSPTRNPEVRTPKSATQPQTTETNLQTAPKLSTSTSTTGTSHLVKCAEKEKTFCVNGGECFMVKDLSNPSRYLCKCQPGFTGARCTENVPMKVQNQEKHLGIEFMEAEELYQKRVLTITGICIALLVVGIMCVVAYCKTKKQRKKLHDRLRQSLRSERNNMMNIANGPHHPNPPPENVQLVNQYVSKNVISSEHIVEREAETSFSTSHYTSTAHHSTTVTQTPSHSWSNGHTESILSESHSVIVMSSVENSRHSSPTGGPRGRLNGTGGPRECNSFLRHARETPDSYRDSPHSERYVSAMTTPARMSPVDFHTPSSPKSPPSEMSPPVSSMTVSMPSMAVSPFMEEERPLLLVTPPRLREKKFDHHPQQFSSFHHNPAHDSNSLPASPLRIVEDEEYETTQEYEPAQEPVKKLANSRRAKRTKPNGHIANRLEVDSNTSSQSSNSESETEDERVGEDTPFLGIQNPLAASLEATPAFRLADSRTNPAGRFSTQEEIQARLSSVIANQDPIAV

SEQ ID NO: 843970 - protein, 439 aa, Homo sapiens
MRWRRAPRRSGRPGPRAQRPGSAARSSPPLPLLPLLLLLGTAALAPGAAAGNEAAPAGASVCYSSPPSVGSVQELAQRAAVVIEGKVHPQRRQQGALDRKAAAAAGEAGAWGGDREPPAAGPRALGPPAEEPLLAANGTVPSWPTAPVPSAGEPGEEAPYLVKVHQVWAVKAGGLKKDSLLTVRLGTWGHPAFPSCGRLKEDSRYIFFMEPDANSTSRAPAAFRASFPPLETGRNLKKEVSRVLCKRCALPPQLKEMKSQESAAGSKLVLRCETSSEYSSLRFKWFKNGNELNRKNKPQNIKIQKKPGKSELRINKASLADSGEYMCKVISKLGNDSASANITIVESNEIITGMPASTEGAYVSSATSTSTTGTSHLVKCAEKEKTFCVNGGECFMVKDLSNPSRYLCKCPNEFTGDRCQNYVMASFYSTSTPFLSLPE

SEQ ID NO: 843971 - protein, 161 aa, Homo sapiens
KPDPSPWTKLACAESRPRRALRLRRDVRAQRRQRQREGQEEGARLRQEAGVRGGQPEPRWVRSAARAPRSSSCSSYSSSSSDAVASPSPSPSPVLFALRSERPLSRAVLPLLGAAAHLGAESYRAPTPRAQGKGQQSRPHPPRVPGALRSLARPLPSALAA

SEQ ID NO: 843972 - protein, 241 aa, Homo sapiens; identical to SEQ ID NO: 843967

SEQ ID NO: 843973 - protein, 296 aa, Homo sapiens
MEIYSPDMSEVAAERSSSPSTQLSADPSLDGLPAAEDMPEPQTEDGRTPGLVGLAVPCCACLEAERLRGCLNSEKICIVPILACLVSLCLCIAGLKWVFVDKIFEYDSPTHLDPGGLGQDPIISLDATAASAVWVSSEAYTSPVSRAQSESEVQVTVQGDKAVVSFEPSAAPTPKNRIFAFSFLPSTAPSFPSPTRNPEVRTPKSATQPQTTETNLQTAPKLSTSTSTTGTSHLVKCAEKEKTFCVNGGECFMVKDLSNPSRYLCKCPNEFTGDRCQNYVMASFYSTSTPFLSLPE

SEQ ID NO: 843974 - protein, 422 aa, Homo sapiens
MRWRRAPRRSGRPGPRAQRPGSAARSSPPLPLLPLLLLLGTAALAPGAAAGNEAAPAGASVCYSSPPSVGSVQELAQRAAVVIEGKVHPQRRQQGALDRKAAAAAGEAGAWGGDREPPAAGPRALGPPAEEPLLAANGTVPSWPTAPVPSAGEPGEEAPYLVKVHQVWAVKAGGLKKDSLLTVRLGTWGHPAFPSCGRLKEDSRYIFFMEPDANSTSRAPAAFRASFPPLETGRNLKKEVSRVLCKRCALPPQLKEMKSQESAAGSKLVLRCETSSEYSSLRFKWFKNGNELNRKNKPQNIKIQKKPGKSELRINKASLADSGEYMCKVISKLGNDSASANITIVESNATSTSTTGTSHLVKCAEKEKTFCVNGGECFMVKDLSNPSRYLCKCPNEFTGDRCQNYVMASFYSTSTPFLSLPE

SEQ ID NO: 843975 - protein, 211 aa, Homo sapiens
MSERKEGRGKGKGKKKERGSGKKPESAAGSQSPALPPQLKEMKSQESAAGSKLVLRCETSSEYSSLRFKWFKNGNELNRKNKPQNIKIQKKPGKSELRINKASLADSGEYMCKVISKLGNDSASANITIVESNEIITGMPASTEGAYVSSESPIRISVSTEGANTSSSTSTSTTGTSHLVKCAEKEKTFCVNGGECFMVKDLSNPSRYLCK

SEQ ID NO: 843976 - protein, 645 aa, Homo sapiens; identical to SEQ ID NO: 843965

SEQ ID NO: 843977 - protein, 236 aa, Homo sapiens
MEIYSPDMSEVAAERSSSPSTQLSADPSLDGLPAAEDMPEPQTEDGRTPGLVGLAVPCCACLEAERLRGCLNSEKICIVPILACLVSLCLCIAGLKWVFVDKIFEYDSPTHLDPGGLGQDPIISLDATAASAVWVSSEAYTSPVSRAQSESEVQVTVQGDKAVVSFEPSAAPTPKNRIFAFSFLPSTAPSFPSPTRNPEVRTPKSATQPQTTETNLQTAPKLCAQMSLLVIAAKTT

SEQ ID NO: 843978 - protein, 512 aa, Homo sapiens
MSYHLFFSEIITGMPASTEGAYVSSESPIRISVSTEGANTSSSTSTSTTGTSHLVKCAEKEKTFCVNGGECFMVKDLSNPSRYLCKCPNEFTGDRCQNYVMASFYKAEELYQKRVLTITGICIALLVVGIMCVVAYCKTKKQRKKLHDRLRQSLRSERNNMMNIANGPHHPNPPPENVQLVNQYVSKNVISSEHIVEREAETSFSTSHYTSTAHHSTTVTQTPSHSWSNGHTESILSESHSVIVMSSVENSRHSSPTGGPRGRLNGTGGPRECNSFLRHARETPDSYRDSPHSERYVSAMTTPARMSPVDFHTPSSPKSPPSEMSPPVSSMTVSMPSMAVSPFMEEERPLLLVTPPRLREKKFDHHPQQFSSFHHNPAHDSNSLPASPLRIVEDEEYETTQEYEPAQEPVKKLANSRRAKRTKPNGHIANRLEVDSNTSSQSSNSESETEDERVGEDTPFLGIQNPLAASLEATPAFRLADSRTNPAGRFSTQEEIQARLSSVIANQDPIAV

SEQ ID NO: 843979 - protein, 116 aa, Homo sapiens
ALRIYRLEWWRQVLEGSFSPGERNRKGGLKSLRLNTHTHTHTPPTHTHHTHTHTHTHTHTHTHTSSGPSCDSLQPQASLLTSLCFLVYSYEMGISSTCCIYVTGMKFTWKRGQSII

SEQ ID NO: 843980 - protein, 167 aa, Homo sapiens
  misc_feature (27)..(27): Xaa can be any naturally occurring amino acid
MTPVQRGGPGALVALGWGTAVASAEGXFSPGAPGGKRRAFFGSGIRGRGRGRGRGRGRGRGARGGKAEDKEWMPVTKLGRLVKDMKIKSLEEIYLFSLPIKESEIIDFFLFFPPFGGAGGGGPPFSFRAKGGICRFLEDYASAEADPCRPAHQVQGIVCLKFRGRNL

SEQ ID NO: 843981 - protein, 292 aa, Homo sapiens
MTPVQRGGPGGPGGPGMGNRGGFRGGFGSGIRGRGRGRGRGRGRGRGARGGKAEDKEWMPVTKLGRLVKDMKIKSLEEIYLFSLPIKESEIIDFFLGASLKDEVLKIMPVQKQTRAGQRTRFKAFVAIGDYNGHVAGLGVKCSKEVATAICGAIILAKLSIVPVRRGYWGNKIGKPHTVPCKVTGRCGSVLVRLIPAPRGTGIVSAPVPKKLLMMAGIDDCYTSARGCTATLGNFAKATFDAIFKTYSYLTPDLWKETVFTKSPYQEFTDHLVKTHTRVSVQRTQAPAVATT

SEQ ID NO: 843982 - protein, 82 aa, Homo sapiens
KDYKTSESQLATNPPPAPSTTSWRHWKMLLLFSDHRLPPKPILPAALPEKLNPRDRKDHLHSLYWAFPSANVWHERGCIPLP

SEQ ID NO: 843983 - protein, 121 aa, Homo sapiens
MKGTQLTPGTRPNFPMAGSQQWHSSLTQAFCQQPEDHSTPPIMTLHHCGGLSASFPSPALPGFDLAEKQCRIQVTRGFHNQTHYLKHSETPEYFSQGTEVRDNTLPVPPQLPHACKYHLTG

SEQ ID NO: 843984 - protein, 85 aa, Homo sapiens
PGIRDTALLLSSGCGCSFSISLAALHPSFLNAAPPSLPWAFWSRSPSGPHPGRAHLFSGFDYHMLLGPSHRASALMSAQKSSDPQ

SEQ ID NO: 843985 - protein, 97 aa, Homo sapiens
MEDIVILTLLDAAPEGGGRGRALGATILAGEAARGSLLWMQQGLLKNSQSRDFQAHMHLASSSHLLFLSVSNVPLPSLPGSSAEKSEEEPCDPKHVL

SEQ ID NO: 843986 - protein, 291 aa, Homo sapiens
AECACALVELVAALRRGSAVFRAAGAAMAQLGKLLKEQKYDRQLRLWGDHGQEALESAHVCLINATATGTEILKNLVLPGIGSFTIIDGNQVSGEDAGNNFFLQRSSIGKNRAEAAMEFLQELNSDVSGSFVEESPENLLDNDPSFFCRFTVVVATQLPESTSLRLADVLWNSQIPLLICRTYGLVGYMRIIIKEHPVIESHPDNALEDLRLDKPFPELREHFQSYDLDHMEKKDHRHNPWIRDSSGYILYPSGTRGTSLCRIPLPVQRHACLSRFGSHRDSPLAPAPLTY

SEQ ID NO: 843987 - protein, 561 aa, Homo sapiens
AECACALVELVAALRRGSAVFRAAGAAMAQLGKLLKEQKYDRQLRLWGDHGQEALESAHVCLINATATGTEILKNLVLPGIGSFTIIDGNQVSGEDAGNNFFLQRSSIGKNRAEAAMEFLQELNSDVSGSFVEESPENLLDNDPSFFCRFTVVVATQLPESTSLRLADVLWNSQIPLLICRTYGLVGYMRIIIKEHPVIESHPDNALEDLRLDKPFPELREHFQSYDLDHMEKKDHSHTPWIVIIAKYLAQWYSETNGRIPKTYKEKEDFRDLIRQGILKNENGAPEDEENFEEAIKNVNTALNTTQIPSSIEDIFNDDRCINITKQTPSFWILARALKEFVAKEGQGNLPVRGTIPDMIADSGKYIKLQNVYREKAKKDAAAVGNHVAKLLQSIGQAPESISEKELKLLCSNSAFLRVVRCRSLAEEYGLDTINKDEIISSMDNPDNEIVLYLMLRAVDRFHKQQGRYPGVSNYQVEEDIGKLKSCLTGFLQEYGLSVMVKDDYVHEFCRYGAAEPHTIAAFLGGAAAQEVIKIITKQFVIFNNTYIYSGMSQTSATFQL

SEQ ID NO: 843988 - protein, 509 aa, Homo sapiens
AECACALVELVAALRRGSAVFRAAGAAMAQLGKLLKEQKYDRQLRLWGDHGQEALESAHVCLINATATGTEILKNLVLPGIGSFTIIDGNQVSGEDAGNNFFLQRSSIGKNRAEAAMEFLQELNSDVSGSFVEESPENLLDNDPSFFCRFTVVVATQLPESTSLRLADVLWNSQIPLLICRTYGLVGYMRIIIKEHPVIESHPDNALEDLRLDKPFPELREHFQSYDLDHMEKKDHSHTPWIVIIAKYLAQWYSETNGRIPKTYKEKEDFRDLIRQGILKNENGAPEDEENFEEAIKNVNTALNTTQIPSSIEDIFNDDRCINITKQTPSFWILARALKEFVAKEGQGNLPVRGTIPDMIADSGKYIKLQNVYREKAKKDAAAVGNHVAKLLQSIGQAPESISEKELKLLCSNSAFLRVVRCRSLAEEYGLDTINKDEIISSMDNPDNEIVLYLMLRAVDRFHKQQGRYPGVSNYQVEEDIGKLKSCLTGFLQEYGLSVMVKDDYVHEL

SEQ ID NO: 843989 - protein, 528 aa, Homo sapiens
MDAQQTKTNEARLWGDHGQEALESAHVCLINATATGTEILKNLVLPGIGSFTIIDGNQVSGEDAGNNFFLQRSSIGKNRAEAAMEFLQELNSDVSGSFVEESPENLLDNDPSFFCRFTVVVATQLPESTSLRLADVLWNSQIPLLICRTYGLVGYMRIIIKEHPVIESHPDNALEDLRLDKPFPELREHFQSYDLDHMEKKDHSHTPWIVIIAKYLAQWYSETNGRIPKTYKEKEDFRDLIRQGILKNENGAPEDEENFEEAIKNVNTALNTTQIPSSIEDIFNDDRCINITKQTPSFWILARALKEFVAKEGQGNLPVRGTIPDMIADSGKYIKLQNVYREKAKKDAAAVGNHVAKLLQSIGQAPESISEKELKLLCSNSAFLRVVRCRSLAEEYGLDTINKDEIISSMDNPDNEIVLYLMLRAVDRFHKQQGRYPGVSNYQVEEDIGKLKSCLTGFLQEYGLSVMVKDDYVHEFCRYGAAEPHTIAAFLGGAAAQEVIKIITKQFVIFNNTYIYSGMSQTSATFQL

SEQ ID NO: 843990 - protein, 445 aa, Homo sapiens
MEFLQELNSDVSGSFVEESPENLLDNDPSFFCRFTVVVATQLPESTSLRLADVLWNSQIPLLICRTYGLVGYMRIIIKEHPVIESHPDNALEDLRLDKPFPELREHFQSYDLDHMEKKDHSHTPWIVIIAKYLAQWYSETNGRIPKTYKEKEDFRDLIRQGILKNENGAPEDEENFEEAIKNVNTALNTTQIPSSIEDIFNDDRCINITKQTPSFWILARALKEFVAKEGQGNLPVRGTIPDMIADSGKYIKLQNVYREKAKKDAAAVGNHVAKLLQSIGQAPESISEKELKLLCSNSAFLRVVRCRSLAEEYGLDTINKDEIISSMDNPDNEIVLYLMLRAVDRFHKQQGRYPGVSNYQVEEDIGKLKSCLTGFLQEYGLSVMVKDDYVHEFCRYGAAEPHTIAAFLGGAAAQEVIKIITKQFVIFNNTYIYSGMSQTSATFQL

SEQ ID NO: 843991 - protein, 528 aa, Homo sapiens; identical to SEQ ID NO: 843989

SEQ ID NO: 843992 - protein, 392 aa, Homo sapiens
AECACALVELVAALRRGSAVFRAAGAAMAQLGKLLKEQKYDRQLRLWGDHGQEALESAHVCLINATATGTEILKNLVLPGIGSFTIIDGNQVSGEDAGNNFFLQRSSIGKNRAEAAMEFLQELNSDVSGSFVEESPENLLDNDPSFFCRFTVVVATQLPESTSLRLADVLWNSQIPLLICRTYGLVGYMRIIIKEHPVIESHPDNALEDLRLDKPFPELREHFQSYDLDHMEKKDHSHTPWIVIIAKYLAQWYSETNGRIPKTYKEKEDFRDLIRQGILKNENGAPEDEENFEEAIKNVNTALNTTQIPSSIEDIFNDDRCINITKQIPSLWISSVLKGLWGQEVQESTCSREIRICWRIRAIFTWKRFRESKERGCAGENWANVWHVRASL

SEQ ID NO: 843993 - protein, 472 aa, Homo sapiens
SGVRLRACGAGGGAPQGLGCFPRGRRGHGAAGKAAQGAEVRPAAESPENLLDNDPSFFCRFTVVVATQLPESTSLRLADVLWNSQIPLLICRTYGLVGYMRIIIKEHPVIESHPDNALEDLRLDKPFPELREHFQSYDLDHMEKKDHSHTPWIVIIAKYLAQWYSETNGRIPKTYKEKEDFRDLIRQGILKNENGAPEDEENFEEAIKNVNTALNTTQIPSSIEDIFNDDRCINITKQTPSFWILARALKEFVAKEGQGNLPVRGTIPDMIADSGKYIKLQNVYREKAKKDAAAVGNHVAKLLQSIGQAPESISEKELKLLCSNSAFLRVVRCRSLAEEYGLDTINKDEIISSMDNPDNEIVLYLMLRAVDRFHKQQGRYPGVSNYQVEEDIGKLKSCLTGFLQEYGLSVMVKDDYVHEFCRYGAAEPHTIAAFLGGAAAQEVIKIITKQFVIFNNTYIYSGMSQTSATFQL

SEQ ID NO: 843994 - protein, 588 aa, Homo sapiens
AECACALVELVAALRRGSAVFRAAGAAMAQLGKLLKEQKYDRQLRLWGDHGQEALESAHVCLINATATGTEILKNLVLPGIGSFTIIDGNQVSGEDAGNNFFLQRSSIGKNRAEAAMEFLQELNSDVSGSFVEESPENLLDNDPSFFCRFTVVVATQLPESTSLRLADVLWNSQIPLLICRTYGLVGYMRIIIKEHPVIESHPDNALEDLRLDKPFPELREHFHFLEFLVYIKSLKSSFSLYVLGIRPFVSLYHCAKYFSYDHNPWSMTVVIAKYLAQWYSETNGRIPKTYKEKEDFRDLIRQGILKNENGAPEDEENFEEAIKNVNTALNTTQIPSSIEDIFNDDRCINITKQTPSFWILARALKEFVAKEGQGNLPVRGTIPDMIADSGKYIKLQNVYREKAKKDAAAVGNHVAKLLQSIGQAPESISEKELKLLCSNSAFLRVVRCRSLAEEYGLDTINKDEIISSMDNPDNEIVLYLMLRAVDRFHKQQGRYPGVSNYQVEEDIGKLKSCLTGFLQEYGLSVMVKDDYVHEFCRYGAAEPHTIAAFLGGAAAQEVIKIITKQFVIFNNTYIYSGMSQTSATFQL

SEQ ID NO: 843995 - protein, 261 aa, Homo sapiens
MTSYSINKLFNTPTPAPLRLVLISAIKTPSFWILARALKEFVAKEGQGNLPVRGTIPDMIADSGKYIKLQNVYREKAKKDAAAVGNHVAKLLQSIGQAPESISEKELKLLCSNSAFLRVVRCRSLAEEYGLDTINKDEIISSMDNPDNEIVLYLMLRAVDRFHKQQGRYPGVSNYQVEEDIGKLKSCLTGFLQEYGLSVMVKDDYVHEFCRYGAAEPHTIAAFLGGAAAQEVIKIITKQFVIFNNTYIYSGMSQTSATFQL

SEQ ID NO: 843996 - protein, 119 aa, Homo sapiens
MDNPDNEIVLYLMLRAVDRFHKQQGRYPGVSNYQVEEDIGKLKSCLTGFLQEYGLSVMVKDDYVHEFCRYGAAEPHTIAAFLGGAAAQEVIKIITKQFVIFNNTYIYSGMSQTSATFQL

SEQ ID NO: 843997 - protein, 561 aa, Homo sapiens; identical to SEQ ID NO: 843987

SEQ ID NO: 843998 - protein, 561 aa, Homo sapiens; identical to SEQ ID NO: 843987

SEQ ID NO: 843999 - protein, 573 aa, Homo sapiens
AECACALVELVAALRRGSAVFRAAGAAMAQLGKLLKEQKYDRQLRLWGDHGQEALESAHVCLINATATGTEILKNLVLPGIGSFTIIDGNQVSGEDAGNNFFLQRSSIGKNRAEAAMEFLQELNSDVSGSFVEESPENLLDNDPSFFCRFTVVVATQLPESTSLRLADVLWNSQIPLLICRTYGLVGYMRIIIKEHPVIESHPDNALEDLRLDKPFPELREHFQSYDLDHMEKKDHSHTPWIVIIAKYLAQWYSETNGRIPKTYKEKEDFRDLIRQGILKNENGAPEDEENFEEAIKNVNTALNTTQIPSSIEDIFNDDRCINITKQTPSFWILARALKEFVAKEGQGNLPVRGTIPDMIADSGKYIKLQNVYREKAKKDAAAVGNHVAKLLQSIGQAPESISEKELKLLCSNSAFLRVVRCRSLAEEYGLDTINKDEIISSMDNPDNEIVLYLMLRAVDRFHKQQGRYPGVSNYQVEEDIGKLKSCLTGFLQEYGLSVMVKDDYVHELLIKIHVSVVSFSCRYGAAEPHTIAAFLGGAAAQEVIKIITKQFVIFNNTYIYSGMSQTSATFQL

SEQ ID NO: 844000 - protein, 426 aa, Homo sapiens
AECACALVELVAALRRGSAVFRAAGAAMAQLGKLLKEQKYDRQLRLWGDHGQEALESAHVCLINATATGTEILKNLVLPGIGSFTIIDGNQVSGEDAGNNFFLQRSSIGKNRAEAAMEFLQELNSDVSGSFVEESPENLLDNDPSFFCRFTVVVATQLPESTSLRLADVLWNSQIPLLICRTYGLVGYMRIIIKEHPVIESHPDNALEDLRLDKPFPELREHFQSYDLDHMEKKDHSHTPWIVIIAKYLAQWYSETNGRIPKTYKEKEDFRDLIRQGILKNENGAPEDEENFEEAIKNVNTALNTTQIPSSIEDIFNDDRCINITKQTPSFWILARALKEFVAKEGQGNLPVRGTIPDMIADSGKYIKLQNVYREKAKKDAAAVGNHVAKLLQSIGQAPESISEYRTFTTLQLFRFLRVVRVTLPC

SEQ ID NO: 844001 - protein, 445 aa, Homo sapiens; identical to SEQ ID NO: 843990

SEQ ID NO: 844002 - protein, 445 aa, Homo sapiens; identical to SEQ ID NO: 843990

SEQ ID NO: 844003 - protein, 419 aa, Homo sapiens
RAGFRPTRRGSPQFLLLESTSLRLADVLWNSQIPLLICRTYGLVGYMRIIIKEHPVIESHPDNALEDLRLDKPFPELREHFQSYDLDHMEKKDHSHTPWIVIIAKYLAQWYSETNGRIPKTYKEKEDFRDLIRQGILKNENGAPEDEENFEEAIKNVNTALNTTQIPSSIEDIFNDDRCINITKQTPSFWILARALKEFVAKEGQGNLPVRGTIPDMIADSGKYIKLQNVYREKAKKDAAAVGNHVAKLLQSIGQAPESISEKELKLLCSNSAFLRVVRCRSLAEEYGLDTINKDEIISSMDNPDNEIVLYLMLRAVDRFHKQQGRYPGVSNYQVEEDIGKLKSCLTGFLQEYGLSVMVKDDYVHEFCRYGAAEPHTIAAFLGGAAAQEVIKIITKQFVIFNNTYIYSGMSQTSATFQL

SEQ ID NO: 844004 - protein, 373 aa, Homo sapiens
AECACALVELVAALRRGSAVFRAAGAAMAQLGKLLKEQKYDRQLRLWGDHGQEALESAHVCLINATATGTEILKNLVLPGIGSFTIIDGNQVSGEDAGNNFFLQRSSIGKNRAEAAMEFLQELNSDVSGSFVEESPENLLDNDPSFFCRFTVVVATQLPESTSLRLADVLWNSQIPLLICRTYGLVGYMRIIIKEHPVIESHPDNALEDLRLDKPFPELREHFQSYDLDHMEKKDHSHTPWIVIIAKYLAQWYSETNGRIPKTYKEKEDFRDLIRQGILRKCTLGLQKMTADSAPPLLSHVNTATNIHLQIPSRSEDILADDRCINLPNRLHHFGFELVPSGLCGREGSGTFPVRANPVDAFRPFRRPGSGTP

SEQ ID NO: 844005 - protein, 228 aa, Homo sapiens
AECACALVELVAALRRGSAVFRAAGAAMAQLGKLLKEQKYDRQLRLWGDHGQEALESAHVCLINATATGTEILKNLVLPGIGSFTIIDGNQVSGEDAGNNFFLQRSSIGKNRAEAAMEFLQELNSDVSGSFVEESPENLLDNDPSFFCRFTVVVATQLPESTSLRLADVLWNSQIPLLICRTYGLVGYMRIIIKEHPVIESHPDNALEDVLFQMIAHVPSTSSSRHLF

SEQ ID NO: 844006 - protein, 404 aa, Homo sapiens
MLHPETSPGRGHLLAVLLALLGTAWAEVWPPQLQEQAPMAGALNRKESFLLLSLHNRLRSWVQPPAADMRRLDWSDSLAQLAQARAALCGIPTPSLASGLWRTLQVGWNMQLLPAGLASFVEVVSLWFAEGQRYSHAAGECARNATCTHYTQLVWATSSQLGCGRHLCSAGQAAIEAFVCAYSPRGNWEVNGKTIVPYKKGAWCSLCTASVSGCFKAWDHAGGLCEVPRNPCRMSCQNHGRLNISTCHCHCPPGYTGRYCQVRCSLQCVHGRFREEECSCVCDIGYGGAQCATKVHFPFHTCDLRIDGDCFMVSSEADTYYRARMKCQRKGGVLAQIKSQKVQDILAFYLGRLETTNEVIDSDFETRNFWIGLTYKTAKDSFRWATGEHQAFTSFAFGQPDNHG

SEQ ID NO: 844007 - protein, 72 aa, Homo sapiens
DIVDHLLWVVVVVLQAGQDEAPTLSQLDRNLREMKPDPTPLLTSRHNVFQNDEFDVFSRDSVDLSRVHKGKR

SEQ ID NO: 844008 - protein, 870 aa, Homo sapiens
GPGRDFLSAPAESQFDPGSAGAQGAVTVVGGGGGGGGTEPVVEPPRPPRVCRDHVCLICWDPRAGTGGSRSTMPALPLDQLQITHKDPKTGKLRTSPALICTCNSMIQIGFKWEGVLQTHMRGGLEESLWYPRLYSLETRHPEQKADRYFVLYKPPPKDNIPALVEEYLERATFVANDLDWLLALPHDKFWCQVIFDETLQKCLDSYLRYVPRKFDEGVASAPEVVDMQKRLHRSVFLTFLRMSTHKESKDHFISPSAFGEILYNNFLFDIPKILDLCVLFGKGNSPLLQKMIGNIFTQQPSYYSDLDETLPTILQVFSNILQHCGLQGDGANTTPQKLEERGRLTPSDMPLLELKDIVLYLCDTCTTLWAFLDIFPLACQTFQKHDFCYRLASFYEAAIPEMESAIKKRRLEDSKLLGDLWQRLSHSRKKLMEIFHIILNQICLLPILESSCDNIQGFIEEFLQIFSSLLQEKRFLRDYDALFPVAEDISLLQQASSVLDETRTAYILQAVESAWEGVDRRKATDAKDPSVIEEPNGEPNGVTVTAEAVSQASSHPENSEEEECMGAAAAVGPAMCGVELDSLISQVKDLLPDLGEGFILACLEYYHYDPEQVINNILEERLAPTLSQLDRNLDREMKPDPTPLLTSRHNVFQNDEFDVFSRDSVDLSRVHKGKSTRKEENTRSLLNDKRAVAAQRQRYEQYSVVVEEVPLQPGESLPYHSVYYEDEYDDTYDGNQVGANDADSDDELISRRPFTIPQVLRTKVPREGQEEDDDDEEDDADEEAPKPDHFVQDPAVLREKAEARRMAFLAKKGYRHDSSTAVAGSPRGHGQSRETTQERRKKEANKATRANHNRRTMADRKRSKGMIPS

SEQ ID NO: 844009 - protein, 755 aa, Homo sapiens
GQAETSCLLLRNRSLTPEVRALRELSPWSAAAAAAAAQSRWWSRRGGSRSTMPALPLDQLQITHKDPKTGKLRTSPALVIFDETLQKCLDSYLRYVPRKFDEGVASAPEVVDMQKRLHRSVFLTFLRMSTHKESKDHFISPSAFGEILYNNFLFDIPKILDLCVLFGKGNSPLLQKMIGNIFTQQPSYYSDLDETLPTILQVFSNILQHCGLQGDGANTTPQKLEERGRLTPSDMPLLELKDIVLYLCDTCTTLWAFLDIFPLACQTFQKHDFCYRLASFYEAAIPEMESAIKKRRLEDSKLLGDLWQRLSHSRKKLMEIFHIILNQICLLPILESSCDNIQGFIEEFLQIFSSLLQEKRFLRDYDALFPVAEDISLLQQASSVLDETRTAYILQAVESAWEGVDRRKATDAKDPSVIEEPNGEPNGVTVTAEAVSQASSHPENSEEEECMGAAAAVGPAMCGVELDSLISQVKDLLPDLGEGFILACLEYYHYDPEQVINNILEERLAPTLSQLDRNLDREMKPDPTPLLTSRHNVFQNDEFDVFSRDSVDLSRVHKGKSTRKEENTRSLLNDKRAVAAQRQRYEQYSVVVEEVPLQPGESLPYHSVYYEDEYDDTYDGNQVGANDADSDDELISRRPFTIPQVLRTKVPREGQEEDDDDEEDDADEEAPKPDHFVQDPAVLREKAEARRMAFLAKKGYRHDSSTAVAGSPRGHGQSRETTQERRKKEANKATRANHNRRTMADRKRSKGMIPS

SEQ ID NO: 844010 - protein, 643 aa, Homo sapiens
MQKRLHRSVFLTFLRMSTHKESKDHFISPSAFGEILYNNFLFDIPKILDLCVLFGKGNSPLLQKMIGNIFTQQPSYYSDLDETLPTILQVFSNILQHCGLQGDGANTTPQKLEERGRLTPSDMPLLELKDIVLYLCDTCTTLWAFLDIFPLACQTFQKHDFCYRLASFYEAAIPEMESAIKKRRLEDSKLLGDLWQRLSHSRKKLMEIFHIILNQICLLPILESSCDNIQGFIEEFLQIFSSLLQEKRFLRDYDALFPVAEDISLLQQASSVLDETRTAYILQAVESAWEGVDRRKATDAKDPSVIEEPNGEPNGVTVTAEAVSQASSHPENSEEEECMGAAAAVGPAMCGVELDSLISQVKDLLPDLGEGFILACLEYYHYDPEQVINNILEERLAPTLSQLDRNLDREMKPDPTPLLTSRHNVFQNDEFDVFSRDSVDLSRVHKGKSTRKEENTRSLLNDKRAVAAQRQRYEQYSVVVEEVPLQPGESLPYHSVYYEDEYDDTYDGNQVGANDADSDDELISRRPFTIPQVLRTKVPREGQEEDDDDEEDDADEEAPKPDHFVQDPAVLREKAEARRMAFLAKKGYRHDSSTAVAGSPRGHGQSRETTQERRKKEANKATRANHNRRTMADRKRSKGMIPS

SEQ ID NO: 844011 - protein, 521 aa, Homo sapiens
MPLLELKDIVLYLCDTCTTLWAFLDIFPLACQTFQKHDFCYRLASFYEAAIPEMESAIKKRRLEDSKLLGDLWQRLSHSRKKLMEIFHIILNQICLLPILESSCDNIQGFIEEFLQIFSSLLQEKRFLRDYDALFPVAEDISLLQQASSVLDETRTAYILQAVESAWEGVDRRKATDAKDPSVIEEPNGEPNGVTVTAEAVSQASSHPENSEEEECMGAAAAVGPAMCGVELDSLISQVKDLLPDLGEGFILACLEYYHYDPEQVINNILEERLAPTLSQLDRNLDREMKPDPTPLLTSRHNVFQNDEFDVFSRDSVDLSRVHKGKSTRKEENTRSLLNDKRAVAAQRQRYEQYSVVVEEVPLQPGESLPYHSVYYEDEYDDTYDGNQVGANDADSDDELISRRPFTIPQVLRTKVPREGQEEDDDDEEDDADEEAPKPDHFVQDPAVLREKAEARRMAFLAKKGYRHDSSTAVAGSPRGHGQSRETTQERRKKEANKATRANHNRRTMADRKRSKGMIPS

SEQ ID NO: 844012 - protein, 827 aa, Homo sapiens
GPGRDFLSAPAESQFDPGSAGAQGAVTVVGGGGGGGGTEPVVEPPRPPRVCRDHVCLICWDPRAGTGGSRSTMPALPLDQLQITHKDPKTGKLRTSPALICTCNSMIQIGFKWEGVLQTHMRGGLEESLWYPRLYSLETRHPEQKADRYFVLYKPPPKDNIPALVEEYLERATFVANDLDWLLALPHDKFWCQVIFDETLQKCLDSYLRYVPRKFDEGVASAPEVVDMQKRLHRSVFLTFLRMSTHKESKDHFISPSAFGEILYNNFLFDIPKILDLCVLFGKGNSPLLQKMIGNIFTQQPSYYSDLDETLPTILQVFSNILQHCGLQGDGANTTPQKLEERGRLTPSDMPLLELKDIVLYLCDTCTTLWAFLDIFPLACQTFQKHDFCYRLASFYEAAIPEMESAIKKRRLEDSKLLGDLWQRLSHSRKKLMEIFHIILNQICLLPILESSCDNIQGFIEEFLQIFSSLLQEKRFLRDYDALFPVAEDISLLQQASSVLDETRTAYILQAVESAWEGVDRRKATDAKDPSVIEEPNGEPNGVTVTAEAVSQASSHPENSEEEECMGAAAAVGPAMCGVELDSLISQVKDLLPEMKPDPTPLLTSRHNVFQNDEFDVFSRDSVDLSRVHKGKSTRKEENTRSLLNDKRAVAAQRQRYEQYSVVVEEVPLQPGESLPYHSVYYEDEYDDTYDGNQVGANDADSDDELISRRPFTIPQVLRTKVPREGQEEDDDDEEDDADEEAPKPDHFVQDPAVLREKAEARRMAFLAKKGYRHDSSTAVAGSPRGHGQSRETTQERRKKEANKATRANHNRRTMADRKRSKGMIPS

SEQ ID NO: 844013 - protein, 808 aa, Homo sapiens
GQAETSCLLLRNRSLTPEVRALRELSPWSAAAAAAAAQSRWWSRRGGSRSTMPALPLDQLQITHKDPKTGKLRTSPALHPEQKADRYFVLYKPPPKDNIPALVEEYLERATFVANDLDWLLALPHDKFWCQVIFDETLQKCLDSYLRYVPRKFDEGVASAPEVVDMQKRLHRSVFLTFLRMSTHKESKDHFISPSAFGEILYNNFLFDIPKILDLCVLFGKGNSPLLQKMIGNIFTQQPSYYSDLDETLPTILQVFSNILQHCGLQGDGANTTPQKLEERGRLTPSDMPLLELKDIVLYLCDTCTTLWAFLDIFPLACQTFQKHDFCYRLASFYEAAIPEMESAIKKRRLEDSKLLGDLWQRLSHSRKKLMEIFHIILNQICLLPILESSCDNIQGFIEEFLQIFSSLLQEKRFLRDYDALFPVAEDISLLQQASSVLDETRTAYILQAVESAWEGVDRRKATDAKDPSVIEEPNGEPNGVTVTAEAVSQASSHPENSEEEECMGAAAAVGPAMCGVELDSLISQVKDLLPDLGEGFILACLEYYHYDPEQVINNILEERLAPTLSQLDRNLDREMKPDPTPLLTSRHNVFQNDEFDVFSRDSVDLSRVHKGKSTRKEENTRSLLNDKRAVAAQRQRYEQYSVVVEEVPLQPGESLPYHSVYYEDEYDDTYDGNQVGANDADSDDELISRRPFTIPQVLRTKVPREGQEEDDDDEEDDADEEAPKPDHFVQDPAVLREKAEARRMAFLAKKGYRHDSSTAVAGSPRGHGQSRETTQERRKKEANKATRANHNRRTMADRKRSKGMIPS

SEQ ID NO: 844014 - protein, 305 aa, Homo sapiens [sequence omitted]

SEQ ID NO: 844015 - protein, 837 aa, Homo sapiens
GQAETSCLLLRNRSLTPEVRALRELSPWSAAAAAAAAQSRWWSRRGGSRSTMPALPLDQLQITHKDPKTGKLRTSPALHPEQKADRYFVLYKPPPKDNIPALVEEYLERATFVANDLDWLLALPHDKFWCQVIFDETLQKCLDSYLRYVPRKFDEGVASAPEVVDMQKRLHRSVFLTFLRMSTHKESKDHFISPSAFGEILYNNFLFDIPKILDLCVLFGKGNSPLLQKMIGNIFTQQPSYYSDLDETLPTILQVFSNILQHCGLQGDGANTTPQKLEERGRLTPSDMPLLELKDIVLYLCDTCTTLWAFLDIFPLACQTFQKHDFCYRLASFYEAAIPEMESAIKKRRLEDSKLLGDLWQRLSHSRKKLMEIFHIILNQICLLPILESSCDNIQGFIEEFLQIFSSLLQEKRFLRDYDALFPVAEDISLLQQASSVLDETRTAYILQAVESAWEGVDRRKATDAKDPSVIEEPNGEPNGVTVTAEAVSQASSHPENSEEEECMGAAAAVGPAMCGVELDSLISQVKDLLPDLGEGFILACLEYYHYDPEQVINNILEERLAPTLSQLDRNLDREMKPDPTPLLTSRHNVFQNDEFDVFSRDSVDLSRVHKGKSTRKEENTRSLLNDKRAVAAQRQRYEQYSVVVEEVGHQGQVSAGPGKPGQPLSPPDPCFMPLQVPLQPGESLPYHSVYYEDEYDDTYDGNQVGANDADSDDELISRRPFTIPQVLRTKVPREGQEEDDDDEEDDADEEAPKPDHFVQDPAVLREKAEARRMAFLAKKGYRHDSSTAVAGSPRGHGQSRETTQERRKKEANKATRANHNRRTMADRKRSKGMIPS

SEQ ID NO: 844016 - protein, 263 aa, Homo sapiens
  misc_feature (5)..(5): Xaa can be any naturally occurring amino acid
HPETXEEEECGLDSLISCACLEYYHYDPEEMKPDPTPLLTSRHNVFQNDEFDVFSRDSVDLSRVHKGKSTRKEENTRSLLNDKRAVAAQRQRYEQYSVVVEEVPLQPGESLPYHSVYYEDEYDDTYDGNQVGANDADSDDELISRRPFTIPQVLRTKVPREGQEEDDDDEEDDADEEAPKPDHFVQDPAVLREKAEARRMAFLAKKGYRHDSSTAVAGSPRGHGQSRETTQERRKKEANKATRANHNRRTMADRKRSKGMIPS

SEQ ID NO: 844017 - protein, 109 aa, Homo sapiens
GPGRDFLSAPAESQFDPGSAGAQGAVTVVGGGGGGGGTEPVVEPPRPPRVCRDHVCLICWDPRAGTGGSRSTMPALPLDQLQITHKDPKTGKLRTSPALICTCNSMIQI

SEQ ID NO: 844018 - protein, 95 aa, Homo sapiens
GPGRDFLSAPAESQFDPGSAGAQGAVTVVGGGGGGGGTEPVVEPPRRVTQHNASSAPGPTPDHPQGPEDRKAEDFTSAAPRAEGRPVFCVIQTAP

SEQ ID NO: 844019 - protein, 388 aa, Homo sapiens
GQAETSCLLLRNRSLTPEVRALRELSPWSAAAAAAAAQSRWWSRRGGSRSTMPALPLDQLQITHKDPKTGKLRTSPALHPEQKADRYFVLYKPPPKDNIPALVEEYLERATFVANDLDWLLALPHDKFWCQVIFDETLQKCLDSYLRYVPRKFDEGVASAPEVVDMQKRLHRSVFLTFLRMSTHKESKDHFISPSAFGEILYNNFLFDIPKILDLCVLFGKGNSPLLQKMIGNIFTQQPSYYSDLDETLPTILQVFSNILQHCGLQGDGANTTPQKLEERGRLTPSDMPLLELKDIVLYLCDTCTTLWAFLDIFPLACQTFQKHDFCYRLASFYEAAIPEMESAIKKRRLEDSKLLGDLWQRLSHSRKKLMQIWFRMMWKISISFFLE

SEQ ID NO: 844020 - protein, 70 aa, Homo sapiens
GPGRDFLSAPAESQFDPGSAGAQGAVTVVGGGGGGGGTEPVVEPPRPPRVCRDHVCLICWDPRAGTGVKD

SEQ ID NO: 844021 - protein, 109 aa, Homo sapiens; identical to SEQ ID NO: 844017

SEQ ID NO: 844022 - protein, 307 aa, Homo sapiens
GPGRDFLSAPAESQFDPGSAGAQGAVTVVGGGGGGGGTEPVVEPPRPPRVCRDHVCLICWDPRAGTGGSRSTMPALPLDQLQITHKDPKTGKLRTSPALHPEQKADRYFVLYKPPPKDNIPALVEEYLERATFVANDLDWLLALPHDKFWCQVIFDETLQKCLDSYLRYVPRKFDEGVASAPEVVDMQKRLHRSVFLTFLRMSTHKESKDHFISPSAFGEILYNNFLFDIPKILDLCVLFGKGNSPLLQKMIGNIFTQQPSYYSDLDETLPTILQLQQYPSALVVGRGGGKTTPEWGRAVAPEMPPE

SEQ ID NO: 844023 - protein, 808 aa, Homo sapiens; identical to SEQ ID NO: 844013

SEQ ID NO: 844024 - protein, 757 aa, Homo sapiens
MPALPLDQLQITHKDPKTGKLRTSPALHPEQKADRYFVLYKPPPKDNIPALVEEYLERATFVANDLDWLLALPHDKFWCQVIFDETLQKCLDSYLRYVPRKFDEGVASAPEVVDMQKRLHRSVFLTFLRMSTHKESKDHFISPSAFGEILYNNFLFDIPKILDLCVLFGKGNSPLLQKMIGNIFTQQPSYYSDLDETLPTILQVFSNILQHCGLQGDGANTTPQKLEERGRLTPSDMPLLELKDIVLYLCDTCTTLWAFLDIFPLACQTFQKHDFCYRLASFYEAAIPEMESAIKKRRLEDSKLLGDLWQRLSHSRKKLMEIFHIILNQICLLPILESSCDNIQGFIEEFLQIFSSLLQEKRFLRDYDALFPVAEDISLLQQASSVLDETRTAYILQAVESAWEGVDRRKATDAKDPSVIEEPNGEPNGVTVTAEAVSQASSHPENSEEEECMGAAAAVGPAMCGVELDSLISQVKDLLPDLGEGFILACLEYYHYDPEQVINNILEERLAPTLSQLDRNLDREMKPDPTPLLTSRHNVFQNDEFDVFSRDSVDLSRVHKGKSTRKEENTRSLLNDKRAVAAQRQRYEQYSVVVEEVPLQPGESLPYHSVYYEDEYDDTYDGNQVGANDADSDDELISRRPFTIPQVLRTKVPREGQEEDDDDEEDDADEEAPKPDHFVQDPAVLREKAEARRMAFLAKKGYRHDSSTAVAGSPRGHGQSRETTQERRKKEANKATRANHNRRTMADRKRSKGMIPS

SEQ ID NO: 844025 - protein, 776 aa, Homo sapiens
GPGRDFLSAPAESQFDPRKCGRSGSCHRGRRRRRRRRHRAGGGAAEHPEQKADRYFVLYKPPPKDNIPALVEEYLERATFVANDLDWLLALPHDKFWCQVIFDETLQKCLDSYLRYVPRKFDEGVASAPEVVDMQKRLHRSVFLTFLRMSTHKESKDHFISPSAFGEILYNNFLFDIPKILDLCVLFGKGNSPLLQKMIGNIFTQQPSYYSDLDETLPTILQVFSNILQHCGLQGDGANTTPQKLEERGRLTPSDMPLLELKDIVLYLCDTCTTLWAFLDIFPLACQTFQKHDFCYRLASFYEAAIPEMESAIKKRRLEDSKLLGDLWQRLSHSRKKLMEIFHIILNQICLLPILESSCDNIQGFIEEFLQIFSSLLQEKRFLRDYDALFPVAEDISLLQQASSVLDETRTAYILQAVESAWEGVDRRKATDAKDPSVIEEPNGEPNGVTVTAEAVSQASSHPENSEEEECMGAAAAVGPAMCGVELDSLISQVKDLLPDLGEGFILACLEYYHYDPEQVINNILEERLAPTLSQLDRNLDREMKPDPTPLLTSRHNVFQNDEFDVFSRDSVDLSRVHKGKSTRKEENTRSLLNDKRAVAAQRQRYEQYSVVVEEVPLQPGESLPYHSVYYEDEYDDTYDGNQVGANDADSDDELISRRPFTIPQVLRTKVPREGQEEDDDDEEDDADEEAPKPDHFVQDPAVLREKAEARRMAFLAKKGYRHDSSTAVAGSPRGHGQSRETTQERRKKEANKATRANHNRRTMADRKRSKGMIPS

SEQ ID NO: 844026 - protein, 789 aa, Homo sapiens
EIYQKSSGEVFLLQLRTALCKKSHFGWVSRCMNQVLNHNRSLLRREVEASLLTLGSAPEQALPPGVCVSALFFPSIFLSGGSRSTMPALPLDQLQITHKDPKTGKLRTSPALVIFDETLQKCLDSYLRYVPRKFDEGVASAPEVVDMQKRLHRSVFLTFLRMSTHKESKDHFISPSAFGEILYNNFLFDIPKILDLCVLFGKGNSPLLQKMIGNIFTQQPSYYSDLDETLPTILQVFSNILQHCGLQGDGANTTPQKLEERGRLTPSDMPLLELKDIVLYLCDTCTTLWAFLDIFPLACQTFQKHDFCYRLASFYEAAIPEMESAIKKRRLEDSKLLGDLWQRLSHSRKKLMEIFHIILNQICLLPILESSCDNIQGFIEEFLQIFSSLLQEKRFLRDYDALFPVAEDISLLQQASSVLDETRTAYILQAVESAWEGVDRRKATDAKDPSVIEEPNGEPNGVTVTAEAVSQASSHPENSEEEECMGAAAAVGPAMCGVELDSLISQVKDLLPDLGEGFILACLEYYHYDPEQVINNILEERLAPTLSQLDRNLDREMKPDPTPLLTSRHNVFQNDEFDVFSRDSVDLSRVHKGKSTRKEENTRSLLNDKRAVAAQRQRYEQYSVVVEEVPLQPGESLPYHSVYYEDEYDDTYDGNQVGANDADSDDELISRRPFTIPQVLRTKVPREGQEEDDDDEEDDADEEAPKPDHFVQDPAVLREKAEARRMAFLAKKGYRHDSSTAVAGSPRGHGQSRETTQERRKKEANKATRANHNRRTMADRKRSKGMIPS

SEQ ID NO: 844027 - protein, 783 aa, Homo sapiens
GQAETSCLLLRNRSLTPEVRALRELSPWSAAAAAAAAQSRWWSRRGGSRSTMPALPLDQLQITHKDPKTGKLRTSPALHPEQKADRYFVLYKPPPKDNIPALVEEYLERATFVANDLDWLLALPHDKFWCQVIFDETLQKCLDSYLRYVPRKFDEGVASAPEVVDMQKRLHRSVFLTFLRMSTHKESKDHFISPSAFGEILYNNFLFDIPKILDLCVLFGKGNSPLLQKMIGNIFTQQPSYYSDLDETLPTILQVFSNILQHCGLQGDGANTTPQKLEERGRLTPSDMPLLELKDIVLYLCDTCTTLWAFLDIFPLACQTFQKHDFCYRLLGDLWQRLSHSRKKLMEIFHIILNQICLLPILESSCDNIQGFIEEFLQIFSSLLQEKRFLRDYDALFPVAEDISLLQQASSVLDETRTAYILQAVESAWEGVDRRKATDAKDPSVIEEPNGEPNGVTVTAEAVSQASSHPENSEEEECMGAAAAVGPAMCGVELDSLISQVKDLLPDLGEGFILACLEYYHYDPEQVINNILEERLAPTLSQLDRNLDREMKPDPTPLLTSRHNVFQNDEFDVFSRDSVDLSRVHKGKSTRKEENTRSLLNDKRAVAAQRQRYEQYSVVVEEVPLQPGESLPYHSVYYEDEYDDTYDGNQVGANDADSDDELISRRPFTIPQVLRTKVPREGQEEDDDDEEDDADEEAPKPDHFVQDPAVLREKAEARRMAFLAKKGYRHDSSTAVAGSPRGHGQSRETTQERRKKEANKATRANHNRRTMADRKRSKGMIPS

SEQ ID NO: 844028 - protein, 502 aa, Homo sapiens
ARYPNDGPQLLGCQTFQKHDFVTLASFYEAAIPEMESAIKKRRLEDSKLLGDLWQRLSHSRKKLMEIFHIILNQICLLPILESSCDNIQGFIEEFLQIFSSLLQEKRFLRDYDALFPVAEDISLLQQASSVLDETRTAYILQAVESAWEGVDRRKATDAKDPSVIEEPNGEPNGVTVTAEAVSQASSHPENSEEEECMGAAAAVGPAMCGVELDSLISQVKDLLPDLGEGFILACLEYYHYDPEQVINNILEERLAPTLSQLDRNLDREMKPDPTPLLTSRHNVFQNDEFDVFSRDSVDLSRVHKGKSTRKEENTRSLLNDKRAVAAQRQRYEQYSVVVEEVPLQPGESLPYHSVYYEDEYDDTYDGNQVGANDADSDDELISRRPFTIPQVLRTKVPREGQEEDDDDEEDDADEEAPKPDHFVQDPAVLREKAEARRMAFLAKKGYRHDSSTAVAGSPRGHGQSRETTQERRKKEANKATRANHNRRTMADRKRSKGMIPS

SEQ ID NO: 844029 - protein, 837 aa, Homo sapiens; identical to SEQ ID NO: 844015

SEQ ID NO: 844030 - protein, 233 aa, Homo sapiens [sequence omitted]

SEQ ID NO: 844031 - protein, 233 aa, Homo sapiens
LFQASMALCSSSGGQGADKEVLQAGEKPGPLLQSRKPDCTRKEENTRSLLNDKRAVAAQRQRYEQYSVVVEEVPLQPGESLPYHSVYYEDEYDDTYDGNQVGANDADSDDELISRRPFTIPQVLRTKVPREGQEEDDDDEEDDADEEAPKPDHFVQDPAVLREKAEARRMAFLAKKGYRHDSSTAVAGSPRGHGQSRETTQERRKKEANKATRANHNRRTMADRKRSKGMIPS

SEQ ID NO: 844032 - protein, 154 aa, Homo sapiens
GNHELYMRRRKPDTIEVQQMKAQAREEKASEAAGAATAGNREEKERTKVPREGQEEDDDDEEDDADEEAPKPDHFVQDPAVLREKAEARRMAFLAKKGYRHDSSTAVAGSPRGHGQSRETTQERRKKEANKATRANHNRRTMADRKRSKGMIPS

SEQ ID NO: 844033 - protein, 309 aa, Homo sapiens
GQAETSCLLLRNRSLTPEVRALRELSPWSAAAAAAAAQSRWWSRRGGSRSTMPALPLDQLQITHKDPKTGKLRTSPALHPEQKADRYFVLYKPPPKDNIPALVEEYLERATFVANDLDWLLALPHDKFWCQVIFDETLQKCLDSYLRYVPRKFDEGVASAPEVVDMQKRLHRSVFLTFLRMSTHKESKDHFISPSAFGEILYNNFLFDIPKILDLCVLFGKGNSPLLQKMIGNIFTQQPSYYSDLDETLPTILQVFSNILQHCGLQGDGANTTPQKLEERGRLTPSDMPLLDKDTRHECSGTRARIVYV

SEQ ID NO: 844034 - protein, 109 aa, Homo sapiens; identical to SEQ ID NO: 844017

SEQ ID NO: 844035 - protein, 71 aa, Homo sapiens
GPGRDFLSAPAESQFDPGSAGAQGAVTVVGGGGGGGGTEPVVEPPRPPRVCRDHVCLICWDPRAGTGQVIL

SEQ ID NO: 844036 - protein, 144 aa, Homo sapiens
MICCSALSPRIYFSFHRRWPDWHCISKLITRHRTTRHVLRCSPLPLCPINRSCICHHRRLHSLISPILRLHPRPNLRQNPFRYHIHRRKSNFLPTTLSRPIRNAPTLLGLSRCIHHMKYPIICRLIHFSNSSNINNFHVVYASG

SEQ ID NO: 844037 - protein, 140 aa, Homo sapiens
MIPTCTGVHTCTGSIIHNLNNEQDIRKIGGLLKTIPLTSTSLTIGSLALAGIPFLTGFYSKDHIIETSKHIIHKRLSPYHIHRRKSNFLPTTLSRPIRNAPTLLGLSRCIHHMKYPIICRLIHFSNSSNINNFHVVYASG

SEQ ID NO: 844038 - protein, 431 aa, Homo sapiens
MSVNVNRSVSDQFYRYKMPRLIAKVEGKGNGIKTVIVNMVDVAKALNRPPTYPTKYFGCELGAQTQFDVKNDRYIVNGSHEANKLQDMLDGFIKKFVLCPECENPETDLHVNPKKQTIGNSCKACGYRGMLDTHHKLCTFILKNPPENSDSGTGKKEKEKKNRKGKDKENGSVSSSETPPPPPPPNEINPPPHTMEEEEDDDWGEDTTEEAQRRRMDEISDHAKVLTLSDDLERTIEERVNILFDFVKKKKEEGVIDSSDKEIVAEAERLDVKAMGPLVLTEVLFNEKIREQIKKYRRHFLRFCHNNKKAQRYLLHGLECVVAMHQAQLISKIPHILKEMYDADLLEEEVIISWSEKASKKYVSKELAKEIRVKAEPFIKWLKEAEEESSGGEEEDEDENIEVVYSKAASVPKVETVKSDNKDDDIDIDAI

SEQ ID NO: 844039 - protein, 71 aa, Homo sapiens
MSVNVNRSVSDQFYRYKMPRLIAKVEGKGNGIKTVIVNMVDVAKALNRPPTCKKSLEKSTGHIMDRVFKVF

SEQ ID NO: 844040 - protein, 431 aa, Homo sapiens; identical to SEQ ID NO: 844038

SEQ ID NO: 844041 - protein, 431 aa, Homo sapiens; identical to SEQ ID NO: 844038

SEQ ID NO: 844042 - protein, 431 aa, Homo sapiens; identical to SEQ ID NO: 844038

SEQ ID NO: 844043 - protein, 431 aa, Homo sapiens; identical to SEQ ID NO: 844038

SEQ ID NO: 844044 - protein, 431 aa, Homo sapiens; identical to SEQ ID NO: 844038

SEQ ID NO: 844045 - protein, 431 aa, Homo sapiens; identical to SEQ ID NO: 844038

SEQ ID NO: 844046 - protein, 431 aa, Homo sapiens; identical to SEQ ID NO: 844038

SEQ ID NO: 844047 - protein, 302 aa, Homo sapiens [sequence omitted]

SEQ ID NO: 844048 - protein, 431 aa, Homo sapiens; identical to SEQ ID NO: 844038

SEQ ID NO: 844049 - protein, 258 aa, Homo sapiens
PPGCRIRHERDKENGSVSSSETPPPPPPPNEINPPPHTMEEEEDDDWGEDTTEEAQRRRMDEISDHAKVLTLSDDLERTIEERVNILFDFVKKKKEEGVIDSSDKEIVAEAERLDVKAMGPLVLTEVLFNEKIREQIKKYRRHFLRCVVAMHQAQLISKIPHILKEMYDADLLEEEVIISWSEKASKKYVSKELAKEIRVKAEPFIKWLKEAEEESSGGEEEDEDENIEVVYSKAASVPKVETVKSDNKDDDIDIDAI

SEQ ID NO: 844050 - protein, 204 aa, Homo sapiens
MSVNVNRSVSDQFYRYKMPRLIAKVEGKGNGIKTVIVNMVDVAKALNRPPTYPTKYFGCELGAQTQFDVKNDRYIVNGSHEANKLQDMLDGFIKKFVLCPECENPETDLHVNPKKQTIGNSCKACGYRGMLDTHHKLCTFILKNPPENSDSGTGKKEKEKKNRKGKDKENGSVSSSETPPPPQPSSSSSSIVCGGGLISFGGGG

SEQ ID NO: 844051 - protein, 431 aa, Homo sapiens; identical to SEQ ID NO: 844038

SEQ ID NO: 844052 - protein, 431 aa, Homo sapiens; identical to SEQ ID NO: 844038

SEQ ID NO: 844053 - protein, 431 aa, Homo sapiens; identical to SEQ ID NO: 844038

SEQ ID NO: 844054 - protein, 431 aa, Homo sapiens; identical to SEQ ID NO: 844038

SEQ ID NO: 844055 - protein, 431 aa, Homo sapiens; identical to SEQ ID NO: 844038

SEQ ID NO: 844056 - protein, 431 aa, Homo sapiens; identical to SEQ ID NO: 844038

SEQ ID NO: 844057 - protein, 431 aa, Homo sapiens; identical to SEQ ID NO: 844038

SEQ ID NO: 844058 - protein, 431 aa, Homo sapiens; identical to SEQ ID NO: 844038

SEQ ID NO: 844059 - protein, 220 aa, Homo sapiens
PPGCRIRHERDKENGSVSSSETPPPPPPPNEINPPPHTMEEEEDDDWGEDTTEEAQRRRMDEISDHAKVLTLSDDLERTIEERVNILFDFVKKKKEEGVIDSSDKEIVAEAERLDVKAMGPLVLTEVLFNEKIREQIKKYRRHFLRFCHNNKKAQRYLLHGLECVVAMHQAQLISKIPHILKEMYDADLLEEEVIISWSEKIYKMVEGGRGRIFWWRRRR

SEQ ID NO: 844060 - protein, 431 aa, Homo sapiens; identical to SEQ ID NO: 844038

SEQ ID NO: 844061 - protein, 396 aa, Homo sapiens
MSVNVNRSVSDQFYRYKMPRLIAKVEGKGNGIKTVIVNMVDVAKALNRPPTYPTKYFGCELGAQTQFDVKNDRYIVNGSHEANKLQDMLDGFIKKFVLCPECENPETDLHVNPKKQTIGNSCKACGYRGMLDTHHKLCTFILKNPPENSDSGTGKKEKEKKNRKGKDKENGSVSSSETPPPPPPPNEINPPPHTMEEEEDDDWGEDTTEEAQRRRMDEISDHAKVLTLSDDLERTIEERVNILFDFVKKKKEEGVIDSSDKEIVAEAERLDVKAMGPLVLTEVLFNEKIREQIKKYRRHFLRFCHNNKKAQRYLLHGLECVVAMHQAQLISKIPHILKEMYDADLLEEEVIISWSEKASKKYVSKELAKEIRVKAEPKMRPCSGVFEGLQCPEVET

SEQ ID NO: 844062 - protein, 311 aa, Homo sapiens [sequence omitted]

SEQ ID NO: 844063 - protein, 162 aa, Homo sapiens
MSVNVNRSVSDQFYRYKMPRLIAKVEGKGNGIKTVIVNMVDVAKALNRPPTYPTKYFGCELGAQTQFDVKNDRYIVNGSHEANKLQDMLDGFIKKFVLCPECENPETDLHVNPKKQTIGNSCKACGYRGMLDTHHKLCTFILKNPPENSDSGTGKKKKKKKN

SEQ ID NO: 844064 - protein, 233 aa, Homo sapiens
RPPARKCAGAGKMAGGVRPLRGLRALCRVLLFLSQFCILSGGESTEIPPYVMKCPSNGLCSRLPADCIDCTTNFSCTYGKPVTFDCAVKPSVTCVDQDFKSQKNFIINMTCRFCWQLPETDYECTNSTSCMTVSCPRQRYPANCTVRDHVHCLGNRTFPKMLYCNWTGGYKWSTALALSITLGGFGADRFYLGQWREGLGKLFSFGGLGIWTLIDVLLIGVGYVGPADGSLYI

SEQ ID NO: 844065 - protein, 209 aa, Homo sapiens
RPPARKCAGAGKMAGGVRPLRGLRALCRVLLFLSQFCILSGGEQSQALAQSIKDPGPTRTFTVVPRAAESTEIPPYVMKCPSNGLCSRLPADCIDCTTNFSCTYGKPVTFDCAVKPSVTCVDQDFKSQKNFIINMTCRFCWQLPETDYECTNSTSCMTVSCPRQRYPANCTVRDHVHCLVPTFPKGFFPIDLPAPPGPRLWLYPLPLVG

SEQ ID NO: 844066 - protein, 233 aa, Homo sapiens; identical to SEQ ID NO: 844064

SEQ ID NO: 844067 - protein, 233 aa, Homo sapiens; identical to SEQ ID NO: 844064

SEQ ID NO: 844068 - protein, 134 aa, Homo sapiens
MKCPSNGLCSRLPADCIDCTTNFSCTYGKPVTFDCAVKPSVTCVDQDFKSQKNFIINMTCRFCWQLPETDYECTNSTSCMTVSCPRQRYPANCTVRDHVHCLVGQSSRTFVNKMFFSKFIEGTLTRNLRVKLLN

SEQ ID NO: 844069 - protein, 233 aa, Homo sapiens; identical to SEQ ID NO: 844064

SEQ ID NO: 844070 - protein, 185 aa, Homo sapiens
RPPARKCAGAGKMAGGVRPLRGLRALCRVLLFLSQFCILSGGESTEIPPYVMKCPSNGLCSRLPADCIDCTTNFSCTYGKPVTFDCAVKPSVTCVDQDFKSQKNFIINMTCRFCWQLPETDYECTNSTSCMTVSCPRQRYPANCTVRDHVHCLVGQSSRTFVNKMFFSKFIEGTLTRNLRVKLLN

SEQ ID NO: 844071 - protein, 164 aa, Homo sapiens
MKCPSNGLCSRLPADCIDCTTNFSCTYGKPVTFDCAVKPSVTCVDQDFKSQKNFIINMTCRFCWQLPETDYECTNSTSCMTVSCPRQRYPANCTVRDHVHCLACTVCHLSITLGGFGADRFYLGQWREGLGKLFSFGGLGIWTLIDVLLIGVGYVGPADGSLYI

SEQ ID NO: 844072 - protein, 195 aa, Homo sapiens
RPPARKCAGAGKMAGGVRPLRGLRALCRVLLFLSQFCILSGGESTEIPPYVMKCPSNGLCSRLPADCIDCTTNFSCTYGKPVTFDCAVKPSVTCVDQDFKSQKNFIINMTCRFCWQLPETDYECTNSTSCMTVSCPRQRYPANCTVRDHVHCLGNRTFPKMLYCNWTGGYKWSTALALSLQAQVGLHVQLTVGLH

SEQ ID NO: 844073 - protein, 185 aa, Homo sapiens; identical to SEQ ID NO: 844070

SEQ ID NO: 844074 - protein, 203 aa, Homo sapiens
RPPARKCAGAGKMAGGVRPLRGLRALCRVLLFLSQFCILSGGESTEIPPYVMKCPSNGLCSRLPADCIDCTTNFSCTYGKPVTFDCAVKPSVTCVDQDFKSQKNFIINMTCRFCWQLPETDYECTNSTSCMTVSCPRQRYPANCTVRDHVHCLGNRTFPKMLYCNWTGGYKWSTALALRVGLFIDTVTTPLHSSLSHRARHCL

SEQ ID NO: 844075 - protein, 259 aa, Homo sapiens
RPPARKCAGAGKMAGGVRPLRGLRALCRVLLFLSQFCILSGGEQSQALAQSIKDPGPTRTFTVVPRAAESTEIPPYVMKCPSNGLCSRLPADCIDCTTNFSCTYGKPVTFDCAVKPSVTCVDQDFKSQKNFIINMTCRFCWQLPETDYECTNSTSCMTVSCPRQRYPANCTVRDHVHCLGNRTFPKMLYCNWTGGYKWSTALALSITLGGFGADRFYLGQWREGLGKLFSFGGLGIWTLIDVLLIGVGYVGPADGSLYI

SEQ ID NO: 844076 - protein, 185 aa, Homo sapiens; identical to SEQ ID NO: 844070

SEQ ID NO: 844077 - protein, 134 aa, Homo sapiens; identical to SEQ ID NO: 844068

SEQ ID NO: 844078 - protein, 182 aa, Homo sapiens
MKCPSNGLCSRLPADCIDCTTNFSCTYGKPVTFDCAVKPSVTCVDQDFKSQKNFIINMTCRFCWQLPETDYECTNSTSCMTVSCPRQRYPANCTVRDHVHCLGNRTFPKMLYCNWTGGYKWSTALALSITLGGFGADRFYLGQWREGLGKLFSFGGLGIWTLIDVLLIGVGYVGPADGSLYI

SEQ ID NO: 844079 - protein, 164 aa, Homo sapiens; identical to SEQ ID NO: 844071

SEQ ID NO: 844080 - protein, 185 aa, Homo sapiens; identical to SEQ ID NO: 844070

SEQ ID NO: 844081 - protein, 185 aa, Homo sapiens; identical to SEQ ID NO: 844070

SEQ ID NO: 844082 - protein, 145 aa, Homo sapiens
PPGPEVRSAGKMAGGVRPLRGLRALCRVLLFLSQFCILSGGGDVKGWVQRRVGLSGSRAPGAARRPGPRADADAGRRPSAGLRAACRCIWSLAPWPPGPRPPLRSGDTEPAIAAAEPWHGDGALGGWAGEAELERDVILRSLVAG

SEQ ID NO: 844083 - protein, 1169 aa, Homo sapiens
MKDSCITVMAMALLSGFFFFAPASSYNLDVRGARSFSPPRAGRHFGYRVLQVGNGVIVGAPGEGNSTGSLYQCQSGTGHCLPVTLRGSNYTSKYLGMTLATDPTDGSILACDPGLSRTCDQNTYLSGLCYLFRQNLQGPMLQGRPGFQECIKGNVDLVFLFDGSMSLQPDEFQKILDFMKDVMKKLSNTSYQFAAVQFSTSYKTEFDFSDYVKRKDPDALLKHVKHMLLLTNTFGAINYVATEVFREELGARPDATKVLIIITDGEATDSGNIDAAKDIIRYIIGIGKHFQTKESQETLHKFASKPASEFVKILDTFEKLKDLFTELQKKIYVIEGTSKQDLTSFNMELSSSGISADLSRGHAVVGAVGAKDWAGGFLDLKADLQDDTFIGNEPLTPEVRAGYLGYTVTWLPSRQKTSLLASGAPRYQHMGRVLLFQEPQGGGHWSQVQTIHGTQIGSYFGGELCGVDVDQDGETELLLIGAPLFYGEQRGGRVFIYQRRQLGFEEVSELQGDPGYPLGRFGEAITALTDINGDGLVDVAVGAPLEEQGAVYIFNGRHGGLSPQPSQRIEGTQVLSGIQWFGRSIHGVKDLEGDGLADVAVGAESQMIVLSSRPVVDMVTLMSFSPAEIPVHEVECSYSTSNKMKEGVNITICFQIKSLIPQFQGRLVANLTYTLQLDGHRTRRRGLFPGGRHELRRNIAVTTSMSCTDFSFHFPVCVQDLISPINVSLNFSLWEEEGTPRDQRAGKDIPPILRPSLHSETWEIPFEKNCGEDKKCEANLRVSFSPARSRALRLTAFASLSVELSLSNLEEDAYWVQLDLHFPPGLSFRKVEMLKPHSQIPVSCEELPEESRLLSRALSCNVSSPIFKAGHSVALQMMFNTLVNSSWGDSVELHANVTCNNEDSDLLEDNSATTIIPILYPINILIQDQEDSTLYVSFTPKGPKIHQVKHMYQVRIQPSIHDHNIPTLEAVVGVPQPPSEGPITHQWSVQMEPPVPCHYEDLERLPDAAEPCLPGALFRCPVVFRQEILVQVIGTLELVGEIEASSMFSLCSSLSISFNSSKHFHLYGSNASLAQVVMKVDVVYEKQMLYLYVLSGIGGLLLLLLIFIVLYKVGFFKRNLKEKMEAGRGVPNGIPAEDSEQLASGQEAGDPGCLKPLHEKDSESGGGKD

SEQ ID NO: 844084 - protein, 189 aa, Homo sapiens
VRGRSKDPVFIDATQMDIWACDPGLSRTCDQNTYLSGLCYLFRQNLQGPMLQGRPGFQECIKGNVDLVFLFDGSMSLQPDEFQKILDFMKDVMKKLSNTSYQFAAVQFSTSYKTEFDFSDYVKRKDPDALLKHVKHMLLLTNTFGAINYVATEVFREELGARPDATKVLIIITDGEATDSGSINTRGID

SEQ ID NO: 844085 - protein, 1086 aa, Homo sapiens
MKDSCITVMAMALLSGFFFFAPASSYNLDVRGARSFSPPRAGRHFGYRVLQVGNGVIVGAPGEGNSTGSLYQCQSGTGHCLPVTLRGSNYTSKYLGMTLATDPTDGSILFAAVQFSTSYKTEFDFSDYVKRKDPDALLKHVKHMLLLTNTFGAINYVATEVFREELGARPDATKVLIIITDGEATDSGNIDAAKDIIRYIIGIGKHFQTKESQETLHKFASKPASEFVKILDTFEKLKDLFTELQKKIYVIEGTSKQDLTSFNMELSSSGISADLSRGHAVVGAVGAKDWAGGFLDLKADLQDDTFIGNEPLTPEVRAGYLGYTVTWLPSRQKTSLLASGAPRYQHMGRVLLFQEPQGGGHWSQVQTIHGTQIGSYFGGELCGVDVDQDGETELLLIGAPLFYGEQRGGRVFIYQRRQLGFEEVSELQGDPGYPLGRFGEAITALTDINGDGLVDVAVGAPLEEQGAVYIFNGRHGGLSPQPSQRIEGTQVLSGIQWFGRSIHGVKDLEGDGLADVAVGAESQMIVLSSRPVVDMVTLMSFSPAEIPVHEVECSYSTSNKMKEGVNITICFQIKSLIPQFQGRLVANLTYTLQLDGHRTRRRGLFPGGRHELRRNIAVTTSMSCTDFSFHFPVCVQDLISPINVSLNFSLWEEEGTPRDQRAGKDIPPILRPSLHSETWEIPFEKNCGEDKKCEANLRVSFSPARSRALRLTAFASLSVELSLSNLEEDAYWVQLDLHFPPGLSFRKVEMLKPHSQIPVSCEELPEESRLLSRALSCNVSSPIFKAGHSVALQMMFNTLVNSSWGDSVELHANVTCNNEDSDLLEDNSATTIIPILYPINILIQDQEDSTLYVSFTPKGPKIHQVKHMYQVRIQPSIHDHNIPTLEAVVGVPQPPSEGPITHQWSVQMEPPVPCHYEDLERLPDAAEPCLPGALFRCPVVFRQEILVQVIGTLELVGEIEASSMFSLCSSLSISFNSSKHFHLYGSNASLAQVVMKVDVVYEKQMLYLYVLSGIGGLLLLLLIFIVLYKVGFFKRNLKEKMEAGRGVPNGIPAEDSEQLASGQEAGDPGCLKPLHEKDSESGGGKD

SEQ ID NO: 844086 - protein, 1066 aa, Homo sapiens
MKDSCITVMAMALLSGFFFFAPASSYNLDVRGARSFSPPRAGRHFGYRVLQVGNGVIVGAPGEGNSTGSLYQCQSGTGHCLPVTLRGSNYTSKYLGMTLATDPTDGSILFAAVQFSTSYKTEFDFSDYVKRKDPDALLKHVKHMLLLTNTFGAINYVATEVFREELGARPDATKVLIIITDGEATDSGNIDAAKDIIRYIIGIGKHFQTKESQETLHKFASKPASEFVKILDTFEKLKDLFTELQKKIYVIEGTSKQDLTSFNMELSSSGISADLSRGHAVVGAVGAKDWAGGFLDLKADLQDDTFIGNEPLTPEVRAGYLGYTVTWLPSRQKTSLLASGAPRYQHMGRVLLFQEPQGGGHWSQVQTIHGTQIGSYFGGELCGVDVDQDGETELLLIGAPLFYGEQRGGRVFIYQRRQLGFEEVSELQGDPGYPLGRFGEAITALTDINGDGLVDVAVGAPLEEQGAVYIFNGRHGGLSPQPSQRIEGTQVLSGIQWFGRSIHGVKDLEGDGLADVAVGAESQMIVLSSRPVVDMVTLMSFSPAEIPVHEVECSYSTSNKMKEGVNITICFQIKSLIPQFQGRLVANLTYTLQLDGHRTRRRGLFPGGRHELRRNIAVTTSMSCTDFSFHFPVCVQDLISPINVSLNFSLWEEEGTPRDQRAGKDIPPILRPSLHSETWEIPFEKNCGEDKKCEANLRVSFSPARSRALRLTAFASLSVELSLSNLEEDAYWVQLDLHFPPGLSFRKVEMLKPHSQIPVSCEELPEESRLLSRALSCNVSSPIFKAGHSVALQMMFEYTGKQLLEDNSATTIIPILYPINILIQDQEDSTLYVSFTPKGPKIHQVKHMYQVRIQPSIHDHNIPTLEAVVGVPQPPSEGPITHQWSVQMEPPVPCHYEDLERLPDAAEPCLPGALFRCPVVFRQEILVQVIGTLELVGEIEASSMFSLCSSLSISFNSSKHFHLYGSNASLAQVVMKVDVVYEKQMLYLYVLSGIGGLLLLLLIFIVLYKVGFFKRNLKEKMEAGRGVPNGIPAEDSEQLASGQEAGDPGCLKPLHEKDSESGGGKD

SEQ ID NO: 844087 - protein, 1066 aa, Homo sapiens; identical to SEQ ID NO: 844086

SEQ ID NO: 844088 - protein, 720 aa, Homo sapiens
MNTVQVSPCQPLLSHRRFPKHCLSPQIGSYFGGELCGVDVDQDGETELLLIGAPLFYGEQRGGRVFIYQRRQLGFEEVSELQGDPGYPLGRFGEAITALTDINGDGLVDVAVGAPLEEQGAVYIFNGRHGGLSPQPSQRIEGTQVLSGIQWFGRSIHGVKDLEGDGLADVAVGAESQMIVLSSRPVVDMVTLMSFSPAEIPVHEVECSYSTSNKMKEGVNITICFQIKSLIPQFQGRLVANLTYTLQLDGHRTRRRGLFPGGRHELRRNIAVTTSMSCTDFSFHFPVCVQDLISPINVSLNFSLWEEEGTPRDQRAGKDIPPILRPSLHSETWEIPFEKNCGEDKKCEANLRVSFSPARSRALRLTAFASLSVELSLSNLEEDAYWVQLDLHFPPGLSFRKVEMLKPHSQIPVSCEELPEESRLLSRALSCNVSSPIFKAGHSVALQMMFEYTGKQLLEDNSATTIIPILYPINILIQDQEDSTLYVSFTPKGPKIHQVKHMYQVRIQPSIHDHNIPTLEAVVGVPQPPSEGPITHQWSVQMEPPVPCHYEDLERLPDAAEPCLPGALFRCPVVFRQEILVQVIGTLELVGEIEASSMFSLCSSLSISFNSSKHFHLYGSNASLAQVVMKVDVVYEKQMLYLYVLSGIGGLLLLLLIFIVLYKVGFFKRNLKEKMEAGRGVPNGIPAEDSEQLASGQEAGDPGCLKPLHEKDSESGGGKD

SEQ ID NO: 844089 - protein, 1066 aa, Homo sapiens; identical to SEQ ID NO: 844086

SEQ ID NO: 844090 - protein, 528 aa, Homo sapiens
MKDSCITVMAMALLSGFFFFAPASSYNLDVRGARSFSPPRAGRHFGYRVLQVGNGVIVGAPGEGNSTGSLYQCQSGTGHCLPVTLRGSNYTSKYLGMTLATDPTDGSILFAAVQFSTSYKTEFDFSDYVKRKDPDALLKHVKHMLLLTNTFGAINYVATEVFREELGARPDATKVLIIITDGEATDSGNIDAAKDIIRYIIGIGKHFQTKESQETLHKFASKPASEFVKILDTFEKLKDLFTELQKKIYVIEGTSKQDLTSFNMELSSSGISADLSRGHAVVGAVGAKDWAGGFLDLKADLQDDTFIGNEPLTPEVRAGYLGYTVTWLPSRQKTSLLASGAPRYQHMGRVLLFQEPQGGGHWSQVQTIHGTQIGSYFGGELCGVDVDQDGETELLLIGAPLFYGEQRGGRVFIYQRRQLGFEEVSELQGDPGYPLGRFGEAITALTDINGDGLVDVAVGAPLEEQGAVYIFNGRHGGLSPQPSQRIEGTQVLSGIQWFGRSIHGVKDLEGDGLADVAVGAESQMIVLR

SEQ ID NO: 844091 - protein, 143 aa, Homo sapiens
DVLKGEGLQLEIQAGDAVRIGGDGEWNQVHRDFQGWKRHFPALPSPCSQVVMKVDVVYEKQMLYLYVLSGIGGLLLLLLIFIVLYKVGFFKRNLKEKMEAGRGVPNGIPAEDSEQLASGQEAGDPGCLKPLHEKDSESGGGKD

SEQ ID NO: 844092 - protein, 96 aa, Homo sapiens
  misc_feature (18)..(18): Xaa can be any naturally occurring amino acid
FHFNPISHPICPHILGPXRRSLLLPFTSPGMSSPLLASQSLSLPPSPAPSFLDQQIPAHVTLGWVLTSFTLPPACTTPSKHTSCFFIRQPGCFFPV

SEQ ID NO: 844093 - protein, 1086 aa, Homo sapiens; identical to SEQ ID NO: 844085

SEQ ID NO: 844094 - protein, 1086 aa, Homo sapiens; identical to SEQ ID NO: 844085

SEQ ID NO: 844095 - protein, 1066 aa, Homo sapiens; identical to SEQ ID NO: 844086

SEQ ID NO: 844096 - protein, 1010 aa, Homo sapiens
MLQGRPGFQECIKGNVDLVFLFDGSMSLQPDEFQKILDFMKDVMKKLSNTSYQFAAVQFSTSYKTEFDFSDYVKRKDPDALLKHVKHMLLLTNTFGAINYVATEVFREELGARPDATKVLIIITDGEATDSGNIDAAKDIIRYIIGIGKHFQTKESQETLHKFASKPASEFVKILDTFEKLKDLFTELQKKIYVIEGTSKQDLTSFNMELSSSGISADLSRGHAVVGAVGAKDWAGGFLDLKADLQDDTFIGNEPLTPEVRAGYLGYTVTWLPSRQKTSLLASGAPRYQHMGRVLLFQEPQGGGHWSQVQTIHGTQIGSYFGGELCGVDVDQDGETELLLIGAPLFYGEQRGGRVFIYQRRQLGFEEVSELQGDPGYPLGRFGEAITALTDINGDGLVDVAVGAPLEEQGAVYIFNGRHGGLSPQPSQRIEGTQVLSGIQWFGRSIHGVKDLEGDGLADVAVGAESQMIVLSSRPVVDMVTLMSFSPAEIPVHEVECSYSTSNKMKEGVNITICFQIKSLIPQFQGRLVANLTYTLQLDGHRTRRRGLFPGGRHELRRNIAVTTSMSCTDFSFHFPVCVQDLISPINVSLNFSLWEEEGTPRDQRAGKDIPPILRPSLHSETWEIPFEKNCGEDKKCEANLRVSFSPARSRALRLTAFASLSVELSLSNLEEDAYWVQLDLHFPPGLSFRKVEMLKPHSQIPVSCEELPEESRLLSRALSCNVSSPIFKAGHSVALQMMFEYTGKQLLEDNSATTIIPILYPINILIQDQEDSTLYVSFTPKGPKIHQVKHMYQVRIQPSIHDHNIPTLEAVVGVPQPPSEGPITHQWSVQMEPPVPCHYEDLERLPDAAEPCLPGALFRCPVVFRQEILVQVIGTLELVGEIEASSMFSLCSSLSISFNSSKHFHLYGSNASLAQVVMKVDVVYEKQMLYLYVLSGIGGLLLLLLIFIVLYKVGFFKRNLKEKMEAGRGVPNGIPAEDSEQLASGQEAGDPGCLKPLHEKDSESGGGKD

SEQ ID NO: 844097 - protein, 667 aa, Homo sapiens
MKDSCITVMAMALLSGFFFFAPASSYNLDVRGARSFSPPRAGRHFGYRVLQVGNGVIVGAPGEGNSTGSLYQCQSGTGHCLPVTLRGSNYTSKYLGMTLATDPTDGSILFAAVQFSTSYKTEFDFSDYVKRKDPDALLKHVKHMLLLTNTFGAINYVATEVFREELGARPDATKVLIIITDGEATDSGNIDAAKDIIRYIIGIGKHFQTKESQETLHKFASKPASEFVKILDTFEKLKDLFTELQKKIYVIEGTSKQDLTSFNMELSSSGISADLSRGHAVVGAVGAKDWAGGFLDLKADLQDDTFIGNEPLTPEVRAGYLGYTVTWLPSRQKTSLLASGAPRYQHMGRVLLFQEPQGGGHWSQVQTIHGTQIGSYFGGELCGVDVDQDGETELLLIGAPLFYGEQRGGRVFIYQRRQLGFEEVSELQGDPGYPLGRFGEAITALTDINGDGLVDVAVGAPLEEQGAVYIFNGRHGGLSPQPSQRIEGTQVLSGIQWFGRSIHGVKDLEGDGLADVAVGAESQMIVLSSRPVVDMVTLMSFSPAEIPVHEVECSYSTSNKMKEGVNITICFQIKSLIPQFQGRLVANLTYTLQLDGHRTRRRGLFPGGRHELRRNIAVTTSMSCTDFSFHFPVCVQDLISPINVSLNFSLWEEEGTPRDQRAVRRDG

SEQ ID NO: 844098 - protein, 382 aa, Homo sapiens
QISQILAQPGLNHHTLYTAHLFSLILLSLQLDLHFPPGLSFRKVEMLKPHSQIPVSCEELPEESRLLSRALSCNVSSPIFKAGHSVALQMMFNTLVNSSWGDSVELHANVTCNNEDSDLLEDNSATTIIPILYPINILIQDQEDSTLYVSFTPKGPKIHQVKHMYQVRIQPSIHDHNIPTLEAVVGVPQPPSEGPITHQWSVQMEPPVPCHYEDLERLPDAAEPCLPGALFRCPVVFRQEILVQVIGTLELVGEIEASSMFSLCSSLSISFNSSKHFHLYGSNASLAQVVMKVDVVYEKQMLYLYVLSGIGGLLLLLLIFIVLYKVGFFKRNLKEKMEAGRGVPNGIPAEDSEQLASGQEAGDPGCLKPLHEKDSESGGGKD

SEQ ID NO: 844099 - protein, 76 aa, Homo sapiens
MFSLCSSLSISFNSSKHFHLYGSNASLAQVSPPPWKPQEQATEGAQEPQGRPRCGRAPGLCASQNFPLPEPSAWEK

SEQ ID NO: 844100 - protein, 315 aa, Homo sapiens
MAQVLIVGAGMTGSLCAALLRRQTSGPLYLAVWDKAEDSGGRMTTACSPHNPQCTADLGAQYITCTPHYAKKHQRFYDELLAYGVLRPLSSPIEGMVMKEGDCNFVAPQGISSIIKHYLKESGAEVYFRHRVTQINLRDDKWEVSKQTGSPEQFDLIVLTMPVPEILQLQGDITTLISECQRQQLEAVSYSSRYALGLFYEAGTKIDVPWAGQYITSNPCIRFVSIDNKKRNIESSEIGPSLVIHTTVPFGVTYLEHSIEDVQELVFQQLENILPGLPQPIATKCQKWRHSQVPSAGVILGCAKSPWMMAIGFPI

SEQ ID NO: 844101 - protein, 289 aa, Homo sapiens
MAQVLIVGAGMTGSLCAALLRRQTSGPLYLAVWDKAEDSGGRMTTACSPHNPQCTADLGAQYITCTPHYAKKHQRFYDELLAYGVLRPLSSPIEGMVMKEGDCNFVAPQGISSIIKHYLKESVISECQRQQLEAVSYSSRYALGLFYEAGTKIDVPWAGQYITSNPCIRFVSIDNKKRNIESSEIGPSLVIHTTVPFGVTYLEHSIEDVQELVFQQLENILPGLPQPIATKCQKWRHSQVTNAAANCPGQMTLHHKPFLACGGDGFTQSNFDGCITSALCVLEALKNYI

SEQ ID NO: 844102 - protein, 342 aa, Homo sapiens
MAQVLIVGAGMTGSLCAALLRRQTSGPLYLAVWDKAEDSGGRMTTACSPHNPQCTADLGAQYITCTPHYAKKHQRFYDELLAYGVLRPLSSPIEGMVMKEGDCNFVAPQGISSIIKHYLKESGAEVYFRHRVTQINLRDDKWEVSKQTGSPEQFDLIVLTMPVPEILQLQGDITTLISECQRQQLEAVSYSSRYALGLFYEAGTKIDVPWAGQYITSNPCIRFVSIDNKKRNIESSEIGPSLVIHTTVPFGVTYLEHSIEDVQELVFQQLENILPGLPQPIATKCQKWRHSQVTNAAANCPGQMTLHHKPFLACGGDGFTQSNFDGCITSALCVLEALKNYI

SEQ ID NO: 844103 - protein, 313 aa, Homo sapiens
AFSNSIDLMNQILHADDAVFTKRSSNQSVICQSNSLLIDYAKKHQRFYDELLAYGVLRPLSSPIEGMVMKEGDCNFVAPQGISSIIKHYLKESGAEVYFRHRVTQINLRDDKWEVSKQTGSPEQFDLIVLTMPVPEILQLQGDITTLISECQRQQLEAVSYSSRYALGLFYEAGTKIDVPWAGQYITSNPCIRFVSIDNKKRNIESSEIGPSLVIHTTVPFGVTYLEHSIEDVQELVFQQLENILPGLPQPIATKCQKWRHSQVTNAAANCPGQMTLHHKPFLACGGDGFTQSNFDGCITSALCVLEALKNYI

SEQ ID NO: 844104 - protein, 342 aa, Homo sapiens; identical to SEQ ID NO: 844102

SEQ ID NO: 844105 - protein, 259 aa, Homo sapiens
MAQVLIVGAGMTGSLCAALLRRQTSGPLYLAVWDKAEDSGAEVYFRHRVTQINLRDDKWEVSKQTGSPEQFDLIVLTMPVPEILQLQGDITTLISECQRQQLEAVSYSSRYALGLFYEAGTKIDVPWAGQYITSNPCIRFVSIDNKKRNIESSEIGPSLVIHTTVPFGVTYLEHSIEDVQELVFQQLENILPGLPQPIATKCQKWRHSQVTNAAANCPGQMTLHHKPFLACGGDGFTQSNFDGCITSALCVLEALKNYI

SEQ ID NO: 844106 - protein, 40 aa, Homo sapiens
MRHRTHTQKHEKDRTRSDDNARNQSKRRHNDTHHQTRRDP

SEQ ID NO: 844107 - protein, 90 aa, Homo sapiens
MLQWITQHPSLGPMPLKMDLPPGDPGVLPLSCPQECPDPHSYPGPRSPTPGLPSSAVNDDLLLLPSSLPSVTKGLPRCQLWNEGCPWEVM

SEQ ID NO: 844108 - protein, 657 aa, Homo sapiens
MGCCSSASSAAQSSKREWKPLEDRSCTDIPWLLLFILFCIGMGFICGFSIATGAAARLVSGYDSYGNICGQKNTKLEAIPNSGMDHTQRKYVFFLDPCNLDLINRKIKSVALCVAACPRQELKTLSDVQKFAEINGSALCSYNLKPSEYTTSPKSSVLCPKLPVPASAPIPFFHRCAPVNISCYAKFAEALITFVSDNSVLHRLISGVMTSKEIILGLCLLSLVLSMILMVIIRYISRVLVWILTILVILGSLGGTGVLWWLYAKQRRSPKETVTPEQLQIAEDNLRALLIYAISATVFTVILFLIMLVMRKRVALTIALFHVAGKVFIHLPLLVFQPFWTFFALVLFWVYWIMTLLFLGTTGSPVQNEQGFVEFKISGPLQYMWWYHVVGLIWISEFILACQQMTVAGAVVTYYFTRDKRNLPFTPILASVNRLIRYHLGTVAKGSFIITLVKIPRMILMYIHSQLKGKENACARCVLKSCICCLWCLEKCLNYLNQNAYTATAINSTNFCTSAKDAFVILVENALRVATINTVGDFMLFLGKVLIVCSTGLAGIMLLNYQQDYTVWVLPLIIVCLFAFLVAHCFLSIYEMVVDVLFLCFAIDTKYNDGSPGREFYMDKVLMEFVENSRKAMKEAGKGGVADSRELKPMASGASSA

SEQ ID NO: 844109 - protein, 736 aa, Homo sapiens
ANGKTILRVAGQNESPRSRTGHTTSPRRLLSTSRRCSRRRRLAVRCQAAPSPGARRLACRGAPGRSCAPGAASGLLRPRHGLLQLRLLRRQSSKREWKPLEDRSCTDIPWLLLFILFCIGMGFICGFSIATGAAARLVSGYDSYGNICGQKNTKLEAIPNSGMDHTQRKYVFFLDPCNLDLINRKIKSVALCVAACPRQELKTLSDVQKFAEINGSALCSYNLKPSEYTTSPKSSVLCPKLPVPASAPIPFFHRCAPVNISCYAKFAEALITFVSDNSVLHRLISGVMTSKEIILGLCLLSLVLSMILMVIIRYISRVLVWILTILVILGSLGGTGVLWWLYAKQRRSPKETVTPEQLQIAEDNLRALLIYAISATVFTVILFLIMLVMRKRVALTIALFHVAGKVFIHLPLLVFQPFWTFFALVLFWVYWIMTLLFLGTTGSPVQNEQGFVEFKISGPLQYMWWYHVVGLIWISEFILACQQMTVAGAVVTYYFTRDKRNLPFTPILASVNRLIRYHLGTVAKGSFIITLVKIPRMILMYIHSQLKGKENACARCVLKSCICCLWCLEKCLNYLNQNAYTATAINSTNFCTSAKDAFVILVENALRVATINTVGDFMLFLGKVLIVCSTGLAGIMLLNYQQDYTVWVLPLIIVCLFAFLVAHCFLSIYEMVVDVLFLCFAIDTKYNDGSPGREFYMDKVLMEFVENSRKAMKEAGKGGVADSRELKPMASGASSA

SEQ ID NO: 844110 - protein, 624 aa, Homo sapiens
MEEQSCWYKGFICGFSIATGAAARLVSGYDSYGNICGQKNTKLEAIPNSGMDHTQRKYVFFLDPCNLDLINRKIKSVALCVAACPRQELKTLSDVQKFAEINGSALCSYNLKPSEYTTSPKSSVLCPKLPVPASAPIPFFHRCAPVNISCYAKFAEALITFVSDNSVLHRLISGVMTSKEIILGLCLLSLVLSMILMVIIRYISRVLVWILTILVILGSLGGTGVLWWLYAKQRRSPKETVTPEQLQIAEDNLRALLIYAISATVFTVILFLIMLVMRKRVALTIALFHVAGKVFIHLPLLVFQPFWTFFALVLFWVYWIMTLLFLGTTGSPVQNEQGFVEFKISGPLQYMWWYHVVGLIWISEFILACQQMTVAGAVVTYYFTRDKRNLPFTPILASVNRLIRYHLGTVAKGSFIITLVKIPRMILMYIHSQLKGKENACARCVLKSCICCLWCLEKCLNYLNQNAYTATAINSTNFCTSAKDAFVILVENALRVATINTVGDFMLFLGKVLIVCSTGLAGIMLLNYQQDYTVWVLPLIIVCLFAFLVAHCFLSIYEMVVDVLFLCFAIDTKYNDGSPGREFYMDKVLMEFVENSRKAMKEAGKGGVADSRELKPMASGASSA

SEQ ID NO: 844111 - protein, 637 aa, Homo sapiens
MGCCSSASSAAQSSKREWKPLEDRSCTDIPWLLLFILFCIGMGFICGFSIATGAAARLVSGYDSYGNICGQKNTKLEAIPNSGMDHTQRKYVFFLDPCNLDLINRKIKSVALCVAACPRQELKTLSDVQKFAEINGSALCSYNLKPSEYTTSPKSSVLCPKLPVPASAPIPFFHRCAPVNISCYAKFAEALITFVSDNSVLHRLISGVMTSKEIILGLCLLSLVLSMILMVIIRYISRVLVWILTILVILGSLGGTGVLWWLYAKQRRSPKETVTPEQLQSDLIPDNVGYAQTCCSYHRLVPRSWQGLHSLATASLPTLLDFLCSCLVWVYWIMTLLFLGTTGSPVQNEQGFVEFKISGPLQYMWWYHVVGLIWISEFILACQQMTVAGAVVTYYFTRDKRNLPFTPILASVNRLIRYHLGTVAKGSFIITLVKIPRMILMYIHSQLKGKENACARCVLKSCICCLWCLEKCLNYLNQNAYTATAINSTNFCTSAKDAFVILVENALRVATINTVGDFMLFLGKVLIVCSTGLAGIMLLNYQQDYTVWVLPLIIVCLFAFLVAHCFLSIYEMVVDVLFLCFAIDTKYNDGSPGREFYMDKVLMEFVENSRKAMKEAGKGGVADSRELKPMASGASSA

SEQ ID NO: 844112 - protein, 449 aa, Homo sapiens
MTSKEIILGLCLLSLVLSMILMVIIRYISRVLVWILTILVILGSLGGTGVLWWLYAKQRRSPKETVTPEQLQIAEDNLRALLIYAISATVFTVILFLIMLVMRKRVALTIALFHVAGKVFIHLPLLVFQPFWTFFALVLFWVYWIMTLLFLGTTGSPVQNEQGFVEFKISGPLQYMWWYHVVGLIWISEFILACQQMTVAGAVVTYYFTRDKRNLPFTPILASVNRLIRYHLGTVAKGSFIITLVKIPRMILMYIHSQLKGKENACARCVLKSCICCLWCLEKCLNYLNQNAYTATAINSTNFCTSAKDAFVILVENALRVATINTVGDFMLFLGKVLIVCSTGLAGIMLLNYQQDYTVWVLPLIIVCLFAFLVAHCFLSIYEMVVDVLFLCFAIDTKYNDGSPGREFYMDKVLMEFVENSRKAMKEAGKGGVADSRELKPMASGASSA

SEQ ID NO: 844113 - protein, 431 aa, Homo sapiens [sequence omitted]

SEQ ID NO: 844114 - protein, 628 aa, Homo sapiens
MGCCSSASSAAQSSKREWKPLEDRSCTDIPWLLLFILFCIGMGFICGFSIATGAAARLVSGYDSYGNICGQKNTKLEAIPNSGMDHTQRKYVFFLDPCNLDLINRKIKSVALCVAACPRQELKTLSDVQKFAEINGSALCSYNLKPSEYTTSPKSSVLCPKLPVPASAPIPFFHRCAPVNISCYAKFAEALITFVSDNSVLHRLISGVMTSKEIILGLCLLSLVLSMILMVIIRYISRVLVWILTILVILGSLGGTGVLWWLYAKQRRSPKETVTPEQLQIAEDNLRALLIYAISATVFTVILFLIMLVMRKRVALTIALFHVAGKVFIHLPLLVFQPFWTFFALVLFWVYWIMTLLFLGTTGSPVQNEQGFVEFKISGPLQYMWWYHVVGLIWISEFILACQQMTVAGAVVTYYFTRDKRNLPFTPILASVNRLIRYHLGTVAKGSFIITLVKIPRMILMYIHSQLKGKENACARCVLKSCICCLWCLEKCLNYLNQNAYTATAINSTNFCTSAKDAFVILVENALRVATINTVGDFMLFLGKVLIVCSTGLAGIMLLNYQQDYTVWVLPLIIVCLFAFLVAHCFLSIYEMVVDVLFLCFAIDTKYNDGSPGREFYMDKVLMSLWES

SEQ ID NO: 844115 - protein, 657 aa, Homo sapiens; identical to SEQ ID NO: 844108

SEQ ID NO: 844116 - protein, 657 aa, Homo sapiens; identical to SEQ ID NO: 844108

SEQ ID NO: 844117 - protein, 657 aa, Homo sapiens; identical to SEQ ID NO: 844108

SEQ ID NO: 844118 - protein, 657 aa, Homo sapiens; identical to SEQ ID NO: 844108

SEQ ID NO: 844119 - protein, 657 aa, Homo sapiens; identical to SEQ ID NO: 844108

SEQ ID NO: 844120 - protein, 657 aa, Homo sapiens; identical to SEQ ID NO: 844108

SEQ ID NO: 844121 - protein, 654 aa, Homo sapiens
MGCCSSASSAAQSSKREWKPLEDRSCTDIPWLLLFILFCIGMGFICGFSIATGAAARLVSGYDSYGNICGQKNTKLEAIPNSGMDHTQRKYVFFLDPCNLDLINRKIKSVALCVAACPRQELKTLSDVQKFAEINGSALCSYNLKPSEYTTSPKSSVLCPKLPVPASAPIPFFHRCAPVNISCYAKFAEALITFVSDNSVLHRLISGVMTSKEIILGLCLLSLVLSMILMVIIRYISRVLVWILTILVILGSLGGTGVLWWLYAKQRRSPKETVTPEQLQIAEDNLRALLIYAISATVFTVILFLIMLVMRKRVALTIALFHVAGKVFIHLPLLVFQPFWTFFALVLFWVYWIMTLLFLGTTGSPVQNEQGFVEFKISGPLQYMWWYHVVGLIWISEFILACQQMTVAGAVVTYYFTRDKRNLPFTPILASVNRLIRYHLGTVAKGSFIITLVKIPRMILMYIHSQLKGKENACARCVLKSCICCLWCLEKCLNYLNQNAYTATAINSTNFCTSAKDAFVILVENALRVATINTVGDFMLFLGKVLIVCSTGLAGIMLLNYQQDYTVWVLPLIIVCLFAFLVAHCFLSIYEMVVDVLFLCFAIDTKYNDGSPGREFYMDKVLMEFVENSRKAMKEAGKGGVADSRELKPMLKKR

SEQ ID NO: 844122 - protein, 614 aa, Homo sapiens
MGCCSSASSAAQSSKREWKPLEDRSCTDIPWLLLFILFCIGMGFICGFSIATGAAARLVSGYDSYGNICGQKNTKLEAIPNSGMDHTQRKYVFFLDPCNLDLINRKIKSVALCVAACPRQELKTLSDVQKFAEINGSALCSYNLKPSEYTTSPKSSVLCPKLPVPASAPIPFFHRCAPVNISCYAKFAEALITFVSDNSVLHRLISGVMTSKEIILGLCLLSLVLSMILMVIIRYISRVLVWILTILVILGSLGGTGVLWWLYAKQRRSPKETVTPEQLQIAEDNLRALLIYAISATVFTVILFLIMLVMRKRVALTIALFHVAGKVFIHLPLLVFQPFWTFFALVLFWVYWIMTLLFLGTTGSPVQNEQGFVEFKISGPLQYMWWYHVVGLIWISEFILACQQMTVAGAVVTYYFTRDKRNLPFTPILASVNRLIRYHLGTVAKGSFIITLVKIPRMILMYIHSQLKGKENACARCVLKSCICCLWCLEKCLNYLNQNAYTATAINSTNFCTSAKDAFVILVENALRVVPLIIVCLFAFLVAHCFLSIYEMVVDVLFLCFAIDTKYNDGSPGREFYMDKVLMEFVENSRKAMKEAGKGGVADSRELKPMLKKR

SEQ ID NO: 844123 - protein, 299 aa, Homo sapiens
MGCCSSASSAAQSSKREWKPLEDRSCTDIPWLLLFILFCIGMGFICGFSIATGAAARLVSGYDSYGNICGQKNTKLEAIPNSGMDHTQRKYVFFLDPCNLDLINRKIKSVALCVAACPRQELKTLSDVQKFAEINGSALCSYNLKPSEYTTSPKSSVLCPKLPVPASAPIPFFHRCAPVNISCYAKFAEALITFVSDNSVLHRLISGVMTSKEIILGLCLLSLVLSMILMVIIRYISRVLVWILTILVILGSLGGTGVLWWLDCKATSGPSYLCHINFRGHKDLIFCIGGYAHTCCSYL

SEQ ID NO: 844124 - protein, 657 aa, Homo sapiens; identical to SEQ ID NO: 844108

SEQ ID NO: 844125 - protein, 657 aa, Homo sapiens; identical to SEQ ID NO: 844108

SEQ ID NO: 844126 - protein, 221 aa, Homo sapiens
MGCCSSASSAAQSSKREWKPLEDRSCTDIPWLLLFILFCIGMGFICGFSIATGAAARLVSGYDSYGNICGQKNTKLEAIPNSGMDHTQRKYVFFLDPCNLDLINRKIKSVALCVAACPRQELKTLSDVQKFAEINGSALCSYNLKPSEYTTSPKSSVLCPKLPVPASAPIPFFHRCAPVNISCYAKFAEALITFVSDNSVLHRLISGVMTTKKVSQRNCYS

SEQ ID NO: 844127 - protein, 657 aa, Homo sapiens; identical to SEQ ID NO: 844108

SEQ ID NO: 844128 - protein, 657 aa, Homo sapiens; identical to SEQ ID NO: 844108

SEQ ID NO: 844129 - protein, 654 aa, Homo sapiens; identical to SEQ ID NO: 844121

SEQ ID NO: 844130 - protein, 654 aa, Homo sapiens; identical to SEQ ID NO: 844121

SEQ ID NO: 844131 - protein, 103 aa, Homo sapiens
ANGKTILRVAGQNESPRSRTGHTTSPRRLLSTSRRCSRRRRLAVRCQAAPSPGARRLACRGAPGRSCAPGAASGLLRPRHGLLQLRLLRRAELQTRMEAAGGP

SEQ ID NO: 844132 - protein, 76 aa, Homo sapiens
QEEPKVVMGSGTFQFSRNIVVSLGGYISSFGTKTSEPTQHKVMRMGSRNFSSGSLKITHPGRYHQPRYETTPAVLW

SEQ ID NO: 844133 - protein, 161 aa, Homo sapiens
MLSLLNRRQEERLREQEERLHEQEERQREQEDRLHEQEERLREHEERLREQEERLCEQEERLREHEERLCEQEERLREQEERLCEQEERLREQEERLCEQEERLREQEERLCEQEKLPGQERLLEEVEKLLEQERRQEEQERLLERERLHAILFGLPRTGS

SEQ ID NO: 844134 - protein, 124 aa, Homo sapiens
MTCALNNLLHSLQLPESCSEIKHEAFKNHVFNVDNAKFVVKFDLSALTTIGNAKNSLIGMWALSPTVFALLSKNLMIVHSDLAVHFPAIQYAVLYTLYPHCTRHDHFIFSSLSSSSPSLFDGAV

SEQ ID NO: 844135 - protein, 79 aa, Homo sapiens
TCDKCHRIRPKECLRKLLKSSGVCSLVHSVVKSSGVCSLVLSVLKSSGVCSLVHSVVKSSVVCSLVLSVLKSSGVCSLV

SEQ ID NO: 844136 - protein, 69 aa, Homo sapiens
MACRAPGTSSPLCPAWDSPARREVCPGGDRLRAESSTEPRLTPVPPQRYSPVVEAGSDMVFRWTINDKQ

SEQ ID NO: 844137 - protein, 104 aa, Homo sapiens
IFMEKGAHTGHWLNPATGRFQQRRDITDLHEDRVLGTKKLRVGWKEMGYFLIIPATLEKGKVILHLMGQLIVLEAVHALAVFIPLPRCLCLLPRQQFMSRPCPC

SEQ ID NO: 844138 - protein, 201 aa, Homo sapiens [sequence omitted]

SEQ ID NO: 844139 - protein, 421 aa, Homo sapiens
MQALRHVVCALSGGVDSAVAALLLRRRGYQVTGVFMKNWDSLDEHGVCTADKDCEDAYRVCQILDIPFHQVSYVKEYWNDVFSDFLNEYEKGRTPNPDIVCNKHIKFSCFFHYAVDNLGADAIATGHYARTSLEDEEVFEQKHVKKPEGLFRNRFEVRNAVKLLQAADSFKDQTFFLSQVSQDALRRTIFPLGGLTKEFVKKIAAENRLHHVLQKKESMGMCFIGKRNFEHFLLQYLQPRPGHFISIEDNKVLGTHKGWFLYTLGQRANIGGLREPWYVVEKDSVKGDVFVAPRTDHPALYRDLLRTSRVHWIAEEPPAALVRDKMMECHFRFRHQMALVPCVLTLNQDGTVWVTAVQAVRALATGQFAVFYKGDECLGSGKILRLGPSAYTLQKGQRRAGMATESPSDSPEDGPGLSPLL

SEQ ID NO: 844140 - protein, 307 aa, Homo sapiens
MMCSGADAIATGHYARTSLEDEEVFEQKHVKKPEGLFRNRFEVRNAVKLLQAADSFKDQTFFLSQVSQDALRRTIFPLGGLTKEFVKKIAAENRLHHVLQKKESMGMCFIGKRNFEHFLLQYLQPRPGHFISIEDNKVLGTHKGWFLYTLGQRANIGGLREPWYVVEKDSVKGDVFVAPRTDHPALYRDLLRTSRVHWIAEEPPAALVRDKMMECHFRFRHQMALVPCVLTLNQDGTVWVTAVQAVRALATGQFAVFYKGDECLGSGKILRLGPSAYTLQKGQRRAGMATESPSDSPEDGPGLSPLL

SEQ ID NO: 844141 - protein, 201 aa, Homo sapiens [sequence omitted]

SEQ ID NO: 844142 - protein, 421 aa, Homo sapiens; identical to SEQ ID NO: 844139

SEQ ID NO: 844143 - protein, 153 aa, Homo sapiens
MMCSGADAIATGHYARTSLEDEEVFEQKHVKKPEGLFRNRFEVRNAVKLLQAADSFKDQTFFLSQVSQDALRRTIFPLGGLTKEFVKKIAAENRLHHVLQKKESMGMCFIGKRNFEHFLLQYLQPRPGHFISIEDNKVLGTHKGEVQTLPLVI

SEQ ID NO: 844144 - protein, 153 aa, Homo sapiens; identical to SEQ ID NO: 844143

SEQ ID NO: 844145 - protein, 103 aa, Homo sapiens
MDTVKTCSYVMGSARRAPGVTQGTQPHPGPRVRGSYSWNLHLLGHKVPSLWPPHPMSSPGLDNDEMCSGAWSGLALVVGESYLPSELHHCWACSGLPSQHLPS

SEQ ID NO: 844146 - protein, 307 aa, Homo sapiens; identical to SEQ ID NO: 844140

SEQ ID NO: 844147 - protein, 386 aa, Homo sapiens
MKNWDSLDEHGVCTADKDCEDAYRVCQILDIPFHQVSYVKEYWNDVFSDFLNEYEKGRTPNPDIVCNKHIKFSCFFHYAVDNLGADAIATGHYARTSLEDEEVFEQKHVKKPEGLFRNRFEVRNAVKLLQAADSFKDQTFFLSQVSQDALRRTIFPLGGLTKEFVKKIAAENRLHHVLQKKESMGMCFIGKRNFEHFLLQYLQPRPGHFISIEDNKVLGTHKGWFLYTLGQRANIGGLREPWYVVEKDSVKGDVFVAPRTDHPALYRDLLRTSRVHWIAEEPPAALVRDKMMECHFRFRHQMALVPCVLTLNQDGTVWVTAVQAVRALATGQFAVFYKGDECLGSGKILRLGPSAYTLQKGQRRAGMATESPSDSPEDGPGLSPLL

SEQ ID NO: 844148 - protein, 154 aa, Homo sapiens
MDHTEAGLGARCPSASPPSHSILQAPRTDHPALYRDLLRTSRVHWIAEEPPAALVRDKMMECHFRFRHQMALVPCVLTLNQDGTVWVTAVQAVRALATGQFAVFYKGDECLGSGKILRLGPSAYTLQKGQRRAGMATESPSDSPEDGPGLSPLL

SEQ ID NO: 844149 - protein, 166 aa, Homo sapiens
MQALRHVVCALSGGVDSAVAALLLRRRGYQVTGVFMKNWDSLDEHGVCTADKDCEDAYRVCQILDIPFHQVSYVKEYWNDVFSDFLNEYEKGRTPNPDIVCNKHIKFSCFFHYAVDNLGADAIATGHYARTSLEDEEVFEQKHVKKPEGLFRNRFEVRNARFPRMP

SEQ ID NO: 844150 - protein, 110 aa, Homo sapiens
MMCSGADAIATGHYARTSLEDEEVFEQKHVKKPEGLFRNRFEVRNAVKLLQAADSFKDQTFFLSQVSQDALRRTIFPLGGLTKEFVKKIAAENRLHHVLQKKEVRVSSCL

SEQ ID NO: 844151 - protein, 470 aa, Homo sapiens
GGGSGDRGLLFGAAAGGPRSGEAGGLPQLARSRPPLAGVGGRPLGRASPQAPPPRPRPAPPGLRGGTGRASPRGPATSGVAASALSAPDRRPSIAPRADAMKIKDAKKPSFPWFGMDIGGTLVKLSYFEPIDITAEEEQEEVESLKSIRKYLTSNVAYGSTGIRDVHLELKDLTLFGRRGNLHFIRFPTQDLPTFIQMGRDKNFSTLQTVLCATGGGAYKFEKDFRTIGNLHLHKLDELDCLVKGLLYIDSVSFNGQAECYYFANASEPERCQKMPFNLDDPYPLLVVNIGSGVSILAVHSKDNYKRVTGTSLGGGTFLGLCSLLTGCESFEEALEMASKGDSTQADKLVRDIYGGDYERFGLPGWAVASSFGNMIYKEKRESVSKEDLARATLVTITNNIGSVARMCAVNEKINRVVFVGNFLRVNTLSMKLLAYALDYWSKGQLKALFLEHEGYFGAVGALLGLPNFS

SEQ ID NO: 844152 - protein, 371 aa, Homo sapiens
GGGSGDRGLLFGAAAGGPRSGEAGGLPQLARSRPPLAGVGGRPLGRASPQAPPPRPRPAPPGLRGGTGRASPRGPATSGVAASALSAPDRRPSIAPRADAMKIKDAKKPSFPWFGMDIGGTLVKLSYFEPIDITAEEEQEEVESLKSIRKYLTSNVAYGSTGIRDVHLELKDLTLFGRRGNLHFIRFPTQDLPTFIQMGRDKNFSTLQTVLCATGGGAYKFEKDFRTIGNLHLHKLDELDCLVKGLLYIDSVSFNGQAECYYFANASEPERCQKMPFNLDDPYPLLVVNIGSGVSILAVHSKDNYKRVTGTSLGGGTFLGLCSLLTGCESFEEALEMASKGDSTQADKLVRDIYGGDYERFGLPGWAVASR

SEQ ID NO: 844153 - protein, 470 aa, Homo sapiens; identical to SEQ ID NO: 844151

SEQ ID NO: 844154 - protein, 837 aa, Homo sapiens
MMSEFYSITEDLKTCCQGHFEGFVGWKKCLWNPTPSSSGIFEKNSDKGHGDPGHPTSSFQFGYNIGVISAPETVIQDFLSYTLKERSEDSPSEVLLMSPWPLSVAIFPNGDMMAPFCCTLCQPLWQVQFNAYHNLLAITGCLMGFCRQAELVEMLILGQLDYWLVMRTLHKFCAHVHWRDLAYSPLGYLCALNQLDVVGILEIQIFGLEFILGSEELCPVILGFTILPAAYKVEPFHFALEVVSFCSLTERKSTNEILQQIVGDSGCVPGHLGDKSARMIQAKQVTTLALFRVPSYQQPTVISIMLQLSQQLSGINVVFYYSMRIFKDAGVEKPIYRLVQELVNIIFLTVVSLFVVERAGRTLHMIGLEAWRFVLSSWIVSLLLKDEYGGMSFVCSGAILVFVAFSEVGPDSVPWNTVATLFICNSSGWLLQLDLQLSSWIALPEQLLSSLSVLLLLGHGMLMYFCYHLTMVLCQVLLGDLNLSSRPHLREYESTGHSSQQPKIHTYFTEADLMIPLTSFLKLDFEQPISKDEKETLMHCRPLYTEKSLELLGLIFILKKSGNFFKCNHCQFAVRLGKQHKVIEFPITTTLTPREDCLLIERLVELVPFKFYTHLFQRLLVNLPCNLTWQFLAQLLYIKLEIRWSLSLGKVSTIASNIHGELKALKVVQIICQILDSIKISEVFFLLPLSVHVIAIMKYQSLKDCFYKQNDAAQSGKVFLLFQQYSCLQRVVHLALIFKVVFLDGKLNWIVIPYVLYNHSVYYKQSFFILYLFLLSTLCILVYCIGECSLEIHCLKPCEELIEDNENECHYFEFNLTVCGGCEQNIRNILSFCDNTL

SEQ ID NO: 844155 - protein, 470 aa, Homo sapiens; identical to SEQ ID NO: 844151

SEQ ID NO: 844156 - protein, 262 aa, Homo sapiens
MRQTLPLLLLTVLRPSWADPPQEKVPLFRVTQQGPWGSSGSNATDSPCEGLPAADATALTLANRNLERLPGCLPRTLRSLDASHNLLRALSTSELGHLEQLQVLTLRHNRIAALRWGPGGPAGLHTLDLSYNQLAALPPCTGPALSSLRALALAGNPLRALQPRAFACFPALQLLNLSCTALGRGAQGGIAEAAFAGEDGAPLVTLEVLDLSGTFLERVEVGSAGPCRNASIIHFVILQGEIAFVRDRSSCVGGASELSRMI

SEQ ID NO: 844157 - protein, 161 aa, Homo sapiens [sequence omitted]

SEQ ID NO: 844158 - protein, 289 aa, Homo sapiens
MRQTLPLLLLTVLRPSWADPPQEKVPLFRVTQQGPWGSSGSNATDSPCEGLPAADATALTLANRNLERLPGCLPRTLRSLDASHNLLRALSTSELGHLEQLQVLTLRHNRIAALRWGPGGPAGLHTLDLSYNQLAALPPCTGPALSSLRALALAGNPLRALQPRAFACFPALQLLNLSCTALGRGAQGGIAEAAFAGEDGAPLVTLEVLDLSGTFLERVEVESGWIRDLPKLTSLYLRKMPRLTTLEGDIFKMTPNLQQLDCQDSPALASVATHIFQDTPHLQVLLFQK

SEQ ID NO: 844159 - protein, 262 aa, Homo sapiens; identical to SEQ ID NO: 844156

SEQ ID NO: 844160 - protein, 199 aa, Homo sapiens
NFDQNKLEEEMRKRKERVEKWREEQRKKAMENIGELKKEIEEMKQGKKWSLEDDDDDEDDPAEAEKEGNEMEGEELDPLDAYMEEVKEEVKKFNMRSVKGGGGNEKKSGPTVTKVVTVVTTKKAVVDSDKKKGELMENDQDAMEYSSEEEEVDLQTALTGYQTKQRKLLEPVDHGKIEYEPFRKNFYVEVPELAKMSQE

SEQ ID NO: 844161 - protein, 224 aa, Homo sapiens
GRILTHENLHIQDPILHRVEYIQGMVPQISSDLLQIPLSTSGTVPYLAFLSRFGGIDLYINGIKRGGGNEMNCCRTLRELEIQVGEKVFKNIKTVMKAFELIDVNKTGLVRPQELRRVLETFCMKLRDEEYEKFSKHYNIHKDTAVDYNVFLKNLSINNDLNLRYCMGNQEVSLENQQAKNSKKERLLGSASSEDIWRNYSLDEIERNFCLQVRCFPKPQLPTE

SEQ ID NO: 844162 - protein, 154 aa, Homo sapiens [sequence omitted]

SEQ ID NO: 844163 - protein, 767 aa, Homo sapiens
MGRRSRGRRLQQQQRPEDAEDGAEGGGKRGEAGWEGGYPEIVKENKLFEHYYQELKIVPEGEWGQFMDALREPLPATLRITGYKSHAKEILHCLKNKYFKELEDLEVDGQKVEVPQPLSWYPEELAWHTNLSRKILRKSPHLEKFHQFLVSETESGNISRQEAVSMIPPLLLNVRPHHKILDMCAAPGSKTTQLIEMLHADMNVPFPEGFVIANDVDNKRCYLLVHQAKRLSSPCIMVVNHDASSIPRLQIDVDGRKEILFYDRILCDVPCSGDGTMRKNIDVWKKWTTLNSLQLHGLQLRIATRGAEQLAEGGRMVYSTCSLNPIEDEAVIASLLEKSEGALELADVSNELPGLKWMPGITQWKVMTKDGQWFTDWDAVPHSRHTQIRPTMFPPKDPEKLQAMHLERCLRILPHHQNTGGFFVAVLVKKSSMPWNKRQPKLQGKSAETRESTQLSPADLTEGKPTDPSKLESPSFTGTGDTEIAHATEDLENNGSKKDGVCGPPPSKKMKLFGFKEDPFVFIPEDDPLFPPIEKFYALDPSFPRMNLLTRTTEGKKRQLYMVSKELRNVLLNNSEKMKVINTGIKVWCRNNSGEEFDCAFRLAQEGIYTLYPFINSRIITVSMEDVKILLTQENPFFRKLSSETYSQAKDLAKGSIVLKYEPDSANPDALQCPIVLCGWRGKASIRTFVPKNERLHYLRMMGLEVLGEKKKEGVILTNESAASTGQPDNDVTEGQRAGEPNSPDAEEANSPDVTAGCDPAGVHPPR

SEQ ID NO: 844164 - protein, 753 aa, Homo sapiens
SPPPPHNEEKRSLSKIFVPHPLHWTEQLPPNVWFFSTLRLQPIPVSPLQPAYFIQGLAVSLPTLRITGYKSHAKEILHCLKNKYFKELEDLEVDGQKVEVPQPLSWYPEELAWHTNLSRKILRKSPHLEKFHQFLVSETESGNISRQEAVSMIPPLLLNVRPHHKILDMCAAPGSKTTQLIEMLHADMNVPFPEGFVIANDVDNKRCYLLVHQAKRLSSPCIMVVNHDASSIPRLQIDVDGRKEILFYDRILCDVPCSGDGTMRKNIDVWKKWTTLNSLQLHGLQLRIATRGAEQLAEGGRMVYSTCSLNPIEDEAVIASLLEKSEGALELADVSNELPGLKWMPGITQWKVMTKDGQWFTDWDAVPHSRHTQIRPTMFPPKDPEKLQAMHLERCLRILPHHQNTGGFFVAVLVKKSSMPWNKRQPKLQGKSAETRESTQLSPADLTEGKPTDPSKLESPSFTGTGDTEIAHATEDLENNGSKKDGVCGPPPSKKMKLFGFKEDPFVFIPEDDPLFPPIEKFYALDPSFPRMNLLTRTTEGKKRQLYMVSKELRNVLLNNSEKMKVINTGIKVWCRNNSGEEFDCAFRLAQEGIYTLYPFINSRIITVSMEDVKILLTQENPFFRKLSSETYSQAKDLAKGSIVLKYEPDSANPDALQCPIVLCGWRGKASIRTFVPKNERLHYLRMMGLEVLGEKKKEGVILTNESAASTGQPDNDVTEGQRAGEPNSPDAEEANSPDVTAGCDPAGVHPPR

SEQ ID NO: 844165 - protein, 531 aa, Homo sapiens
MVVNHDASSIPRLQIDVDGRKEILFYDRILCDVPCSGDGTMRKNIDVWKKWTTLNSLQLHGLQLRIATRGAEQLAEGGRMVYSTCSLNPIEDEAVIASLLEKSEGALELADVSNELPGLKWMPGITQWKVMTKDGQWFTDWDAVPHSRHTQIRPTMFPPKDPEKLQAMHLERCLRILPHHQNTGGFFVAVLVKKSSMPWNKRQPKLQGKSAETRESTQLSPADLTEGKPTDPSKLESPSFTGTGDTEIAHATEDLENNGSKKDGVCGPPPSKKMKLFGFKEDPFVFIPEDDPLFPPIEKFYALDPSFPRMNLLTRTTEGKKRQLYMVSKELRNVLLNNSEKMKVINTGIKVWCRNNSGEEFDCAFRLAQEGIYTLYPFINSRIITVSMEDVKILLTQENPFFRKLSSETYSQAKDLAKGSIVLKYEPDSANPDALQCPIVLCGWRGKASIRTFVPKNERLHYLRMMGLEVLGEKKKEGVILTNESAASTGQPDNDVTEGQRAGEPNSPDAEEANSPDVTAGCDPAGVHPPR

SEQ ID NO: 844166 - protein, 139 aa, Homo sapiens
QKRPTVHPKQGKLSSETYSQAKDLAKGSIVLKYEPDSANPDALQCPIVLCGWRGKASIRTFVPKNERLHYLRMMGLEVLGEKKKEGVILTNESAASTGQPDNDVTEGQRAGEPNSPDAEEANSPDVTAGCDPAGVHPPR

SEQ ID NO: 844167 - protein, 129 aa, Homo sapiens
PPQPTHNLRPHRPIRKGSIALLIEPHSANPDALQCPIVLCGWRGKASIRTFVPKNERLHYLRMMGLEVLGEKKKEGVILTNESAASTGQPDNDVTEGQRAGEPNSPDAEEANSPDVTAGCDPAGVHPPR

SEQ ID NO: 844168 - protein, 666 aa, Homo sapiens
MGRRSRGRRLQQQQRPEDAEDGAEGGGKRGEAGWEGGYPEIVKENKLFEHYYQELKIVPEGEWGQFMDALREPLPATLRITGYKSHAKEILHCLKNKYFKELEDLEVDGQKVEVPQPLSWYPEELAWHTNLSRKILRKSPHLEKFHQFLVSETESGNISRQEAVSMIPPLLLNVRPHHKILDMCAAPGSKTTQLIEMLHADMNVPFPEGFVIANDVDNKRCYLLVHQAKRLSSPCIMVVNHDASSIPRLQIDVDGRKEILFYDRILCDVPCSGDGTMRKNIDVWKKWTTLNSLQLHGLQLRIATRGAEQLAEGGRMVYSTCSLNPIEDEAVIASLLEKSEGALELADVSNELPGLKWMPGITQWKVMTKDGQWFTDWDAVPHSRHTQIRPTMFPPKDPEKLQAMHLERCLRILPHHQNTGGFFVAVLVKKSSMPWNKRQPKLQGKSAETRESTQLSPADLTEGKPTDPSKLESPSFTGTGDTEIAHATEDLENNGSKKDGVCGPPPSKKMKLFGFKEDPFVFIPEDDPLFPPIEKFYALDPSFPRMNLLTRTTEGKKRQLYMVSKELRNVLLNNSEKMKVINTGIKVWCRNNSGEEFDCAFRLAQEGIYTLYPFINSRIITVSMEDVKILLTQENPFFRKLSSETYSQAKDLAKGSIVLKYEPDSA

SEQ ID NO: 844169 - protein, 341 aa, Homo sapiens
MGRRSRGRRLQQQQRPEDAEDGAEGGGKRGEAGWEGGYPEIVKENKLFEHYYQELKIVPEGEWGQFMDALREPLPATLRITGYKSHAKEILHCLKNKYFKELEDLEVDGQKVEVPQPLSWYPEELAWHTNLSRKILRKSPHLEKFHQFLVSETESGNISRQEAVSMIPPLLLNVRPHHKILDMCAAPGSKTTQLIEMLHADMNVPFPEGFVIANDVDNKRCYLLVHQAKRLSSPCIMVVNHDASSIPRLQIDVDGRKEILFYDRILCDVPCSGDGTMRKNIDVWKKWTTLNSLQLHGLQLRIATRGAEQLAEGGRMVYSTCSLNPIEDEAVIASLLEKSEV

SEQ ID NO: 844170 - protein, 531 aa, Homo sapiens; identical to SEQ ID NO: 844165

SEQ ID NO: 844171 - protein, 732 aa, Homo sapiens
MGRRSRGRRLQQQQRPEDAEDGAEGGGKRGEAGWEGGYPEIVKENKLFEHYYQELKIVPEGEWGQFMDALREPLPATLRITGYKRYPEELAWHTNLSRKILRKSPHLEKFHQFLVSETESGNISRQEAVSMIPPLLLNVRPHHKILDMCAAPGSKTTQLIEMLHADMNVPFPEGFVIANDVDNKRCYLLVHQAKRLSSPCIMVVNHDASSIPRLQIDVDGRKEILFYDRILCDVPCSGDGTMRKNIDVWKKWTTLNSLQLHGLQLRIATRGAEQLAEGGRMVYSTCSLNPIEDEAVIASLLEKSEGALELADVSNELPGLKWMPGITQWKVMTKDGQWFTDWDAVPHSRHTQIRPTMFPPKDPEKLQAMHLERCLRILPHHQNTGGFFVAVLVKKSSMPWNKRQPKLQGKSAETRESTQLSPADLTEGKPTDPSKLESPSFTGTGDTEIAHATEDLENNGSKKDGVCGPPPSKKMKLFGFKEDPFVFIPEDDPLFPPIEKFYALDPSFPRMNLLTRTTEGKKRQLYMVSKELRNVLLNNSEKMKVINTGIKVWCRNNSGEEFDCAFRLAQEGIYTLYPFINSRIITVSMEDVKILLTQENPFFRKLSSETYSQAKDLAKGSIVLKYEPDSANPDALQCPIVLCGWRGKASIRTFVPKNERLHYLRMMGLEVLGEKKKEGVILTNESAASTGQPDNDVTEGQRAGEPNSPDAEEANSPDVTAGCDPAGVHPPR

SEQ ID NO: 844172 - protein, 531 aa, Homo sapiens; identical to SEQ ID NO: 844165

SEQ ID NO: 844173 - protein, 450 aa, Homo sapiens
MGRRSRGRRLQQQQRPEDAEDGAEGGGKRGEAGWEGGYPEIVKENKLFEHYYQELKIVPEGEWGQFMDALREPLPATLRITGYKSHAKEILHCLKNKYFKELEDLEVDGQKVEVPQPLSWYPEELAWHTNLSRKILRKSPHLEKFHQFLVSETESGNISRQEAVSMIPPLLLNVRPHHKILDMCAAPGSKTTQLIEMLHADMNVPFPEGFVIANDVDNKRCYLLVHQAKRLSSPCIMVVNHDASSIPRLQIDVDGRKEILFYDRILCDVPCSGDGTMRKNIDVWKKWTTLNSLQLHGLQLRIATRGAEQLAEGGRMVYSTCSLNPIEDEAVIASLLEKSEGALELADVSNELPGLKWMPGITQWKVMTKDGQWFTDWDAVPHSRHTQIRPTMFPPKDPEKLQAMHLERCLRILPHHQNTGGFFVAVLVKKSSMPWNKRQPKVSFSFSKMT

SEQ ID NO: 844174 - protein, 37 aa, Homo sapiens
GRRGKQVSLGPPYNNTNSIHHGSALITQLPPKSHTFQ

SEQ ID NO: 844175 - protein, 78 aa, Homo sapiens
FQLPFCVQYCVESWGFKDSVLLVWVAETYQKCFRGQLSFLIRKKYARVDRPECSSGPHGSQALILGKALLEGIARCKP

SEQ ID NO: 844176 - protein, 81 aa, Homo sapiens
SQSQKQTDSLLPAPNGPPNHWSTSPSHCCSNHKNSQSQKQTDSLLPAPNGPPNHWSTSPSHCCSNHKNSQSQKQTGSLLPA

SEQ ID NO: 844177 - protein, 298 aa, Homo sapiens
MLGRYREYSNGQAGAIEHLKESLEQSIDQLRSQRLLRNSGGRSISVTSLSASDLDGGTGSELHHFPPTSPLKDYGDPQGIKRMRSRTGVRFVQETDDMTQLHGFHQSLRDLSSEQIRLGDDFNRELSRRSRSDAETKRALEELTEKLNEAQKQEVVSDRVERRLQELEREMRTERELVERRQDQLGLMSLQLQEALKKQEAKADEHEGAIKNKLRQTETEKNQLEQELELSRRLLNQSEGSRETLLHQVEELRTQLTKAEGDRKGLQHQVSQISKQQSNYQDEQGEDWRFRRGKSRFV

SEQ ID NO: 844178 - protein, 361 aa, Homo sapiens
MVHAEAFSRPLSRNEVVGLIFRLTIFGAVTYFTIKWMVDAIDPTRKQKVEAQKQAEKLMKQIGVKNVKLSEYEMSIAAHLVDPLNMHVTWSDIAGLDDVITDLKDTVILPIKKKHLFENSRLLQPPKGVLLYGPPGCGKTLIAKATAKEAGCRFINLQPSTLTDKWYGESQKLAAAVFSLAIKLQPSIIFIDEIDSFLRNRSSSDHEATAMMKAQFMSLWDGLDTDHSCQVIVMGATNRPQDLDSAIMRRMPTRFHINQPALKQREAILKLILKNENVDRHVDLLEVAQETDGFSGSDLKEMCRDAALLCVREYVNSTSEESHDEDEIRPVQQQDLHRAIEKMKKSKDAAFQNVLTHVCLD

SEQ ID NO: 844179 - protein, 361 aa, Homo sapiens; identical to SEQ ID NO: 844178

SEQ ID NO: 844180 - protein, 361 aa, Homo sapiens; identical to SEQ ID NO: 844178

SEQ ID NO: 844181 - protein, 343 aa, Homo sapiens
MVHAEAFSRPLSRNEVVGLIFRLTIFGAVTYFTIKWMVDAIDPTRKQKVEAQKQAEKLMKQIGVKNVKLSEYEMSIAAHLVDPLNMHVTWSDIAGLDDVITDLKDTVILPIKKKHLFENSRLLQPPKGVLLYGPPGCGLQPSTLTDKWYGESQKLAAAVFSLAIKLQPSIIFIDEIDSFLRNRSSSDHEATAMMKAQFMSLWDGLDTDHSCQVIVMGATNRPQDLDSAIMRRMPTRFHINQPALKQREAILKLILKNENVDRHVDLLEVAQETDGFSGSDLKEMCRDAALLCVREYVNSTSEESHDEDEIRPVQQQDLHRAIEKMKKSKDAAFQNVLTHVCLD

SEQ ID NO: 844182 - protein, 287 aa, Homo sapiens
MVHAEAFSRPLSRNEVVGLIFRLTIFGAVTYFTIKWMVDAIDPTRKQKVEAQKQAEKLMKQIGVKNVKLSEYEMSIAAHLVDPLNMHVTWSDIAGLDDVITDLKDTVILPIKKKHLFENSRLLQPPKGVLLYGPPGCGKTLIAKATAKEAGCRFINLQPSTLTDKWYGESQKLAAAVFSLAIKLQPSIIFIDEIDSFLRNRSSSDHEATAMMKAQFMSLWDGLDTDHSCQVIVMGATNRPQDLDSAIMRRMPTRFHINQPALKQREAILKLILKNENLRKLKPREVL

SEQ ID NO: 844183 - protein, 361 aa, Homo sapiens; identical to SEQ ID NO: 844178

SEQ ID NO: 844184 - protein, 361 aa, Homo sapiens; identical to SEQ ID NO: 844178

SEQ ID NO: 844185 - protein, 141 aa, Homo sapiens
MVHAEAFSRPLSRNEVVGLIFRLTIFGAVTYFTIKWMVDAIDPTRKQKVEAQKQAEKLMKQIGVKNVKLSEYEMSIAAHLVDPLNMHVTWSDIAGLDDVITDLKDTVILPIKKKHLFENSRLLQPPKAISIKCINLHIKGN

SEQ ID NO: 844186 - protein, 361 aa, Homo sapiens; identical to SEQ ID NO: 844178

SEQ ID NO: 844187 - protein, 343 aa, Homo sapiens
MVHAEAFSRPLSRNEVVGLIFRLTIFGAVTYFTIKWMVDAIDPTRKQKVEAQKQAEKLMKQIGVKNVKLSEYEMSIAAHLVDPLNMHVTWSDIAGLDDVITDLKDTVILPIKKKHLFENSRLLQPPKGVLLYGPPGCGKTLIAKATAKEAGCRFINLQPSTLTDKWYGESQKLAAAVFSLAIKLQPSIIFIDEIDSFLRNRSSSDHEATAMMKAQFMSLWDGLDTDHSCQVIVMGATNRPQDLDSAIMRRMPTRFHINQPALKQREAILKLILKNENVDRHVDLLEVAQETDGFSGSDLKEMCRDAALLCVREYVNSTSEESHDEDEIRPVQQQDLHRAIGLD

SEQ ID NO: 844188 - protein, 582 aa, Homo sapiens
MAEFLDDQETRLCDNCKKEIPVFNFTIHEIHCQRNIGMCPTCKEPFPKSDMETHMAAEHCQVTCKCNKKLEKRLLKKHEETECPLRLAVCQHCDLELSILKLKEHEDYCGARTELCGNCGRNVLVKDLKTHPEVCGREGEEKRNEVAIPPNAYDESWGQDGIWIASQLLRQIEALDPPMRLPRRPLRAFESDVFHNRTTNQRNITAQVSIQNNLFEEQERQERNRGQQPPKEGGEESANLDFMLALSLQNEGQASSVAEQDFWRAVCEADQSHGGPRSLSDIKGAADEIMLPCEFCEELYPEELLIDHQTSCNPSRALPSLNTGSSSPRGVEEPDVIFQNFLQQAASNQLDSLMGLSNSHPVEESIIIPCEFCGVQLEEEVLFHHQDQCDQRPATATNHVTEGIPRLDSQPQETSPELPRRRVRHQGDLSSGYLDDTKQETANGPTSCLPPSRPINNMTATYNQLSRSTSGPRPGCQPSSPCVPKLSNSDSQDIQGRNRDSQNGAIAPGHVSVIRPPQNLYPENIVPSFSPGPSGRYGASGRSEGGRNSRVTPAAANYRSRTAKAKPSKQQGAGDAEEEEEE

SEQ ID NO: 844189 - protein, 154 aa, Homo sapiens
MAEFLDDQETRLCDNCKKEIPVFNFTIHEIHCQRNIGMCPTCKEPFPKSDMETHMAAEHCQVTCKCNKKLEKRLLKKHEETECPLRLAVCQHCDLELSILKLKEHEDYCGARTELCGNCGRNVLVKDLKTHPEVCGREGEEKRNEVAIPYECNA

SEQ ID NO: 844190 - protein, 582 aa, Homo sapiens; identical to SEQ ID NO: 844188

SEQ ID NO: 844191 - protein, 545 aa, Homo sapiens [sequence omitted]

SEQ ID NO: 844192 - protein, 582 aa, Homo sapiens; identical to SEQ ID NO: 844188

SEQ ID NO: 844193 - protein, 582 aa, Homo sapiens; identical to SEQ ID NO: 844188

SEQ ID NO: 844194 - protein, 574 aa, Homo sapiens
MAEFLDDQETRLCDNCKKEIPVFNFTIHEIHCQRNIGMCPTCKEPFPKSDMETHMAAEHCQVTCKCNKKLEKRLLKKHEETECPLRLAVCQHCDLELSILKLKEHEDYCGARTELCGNCGRNVLVKDLKTHPEVCGREGEEKRNEVAIPPNAYDESWGQDGIWIASQLLRQIEALDPPMRLPRRPLRAFESDVFHNRTTNQRNITAQVSIQNNLFEEQERQERNRGQQPPKEGGEESANLDFMLALSLQNEGQASSVAEQDFWRAVCEADQSHGGPRSLSDIKGAADEIMLPCEFCEELYPEELLIDHQTSCNPSRALPSLNTGSSSPRGVEEPDVIFQNFLQQAASNQLDSLMGLSNSHPVEESIIIPCEFCGVQLEEEVLFHHQDQCDQRPATATNHVTEGIPRLDSQPQETSPELPRRRVRHQGDLSSGYLDDTKQETANGPTSCLPPSRPINNMTATYNQLSRSTSGPRPGCQPSSPCVPKLSNSDSQDIQGRNRDSQNGAIAPGHVSVIRPPQNLYPENIVPSFSPGPSGRYGASGRSEGGRNSRVTPAAANYRSRTAKWKEGKILETW

SEQ ID NO: 844195 - protein, 564 aa, Homo sapiens
MAEFLDDQETRLCDNCKKEIPVFNFTIHEIHCQRNIGMCPTCKEPFPKSDMETHMAAEHCQVTCKCNKKLEKRLLKKHEETECPLRLAVCQHCDLELSILKLKEHEDYCGARTELCGNCGRNVLVKDLKTHPEVCGREGEEKRNEVAIPPNAYDESWGQDGIWIASQLLRQIEALDPPMRLPRRPLRAFESDVFHNRTTNQRNITAQVSIQNNLFEEQERQERNRGQQPPKEGGEESANLDFMLALSLQNEGQASSVAEQDFWRAVCEADQSHGGPRSLSDIKGAADEIMLPCEFCEELYPEELLIDHQTSCNPSRALPSLNTGSSSPRGVEEPDVIFQNFLQQAASNQLDSLMGLSNSHPVEESIIIPCEFCGVQLEEEVLFHHQDQCDQRPATATNHVTEGIPRLDSQPQETSPELPRRRVRHQGDLSSGYLDDTKQETANGPTSCLPPSRPINNMTATYNQLSRSTSGPRPGCQPSSPCVPKLSNSDSQDIQGRNRDSQNGAIAPGHVSVIRPPQNLYPENIVPSFSPGPSGRYGASGRSEGGRNSRVTPAAANYRSRTAK

SEQ ID NO: 844196 - protein, 540 aa, Homo sapiens [sequence omitted]

SEQ ID NO: 844197 - protein, 558 aa, Homo sapiens
  misc_feature (279)..(279): Xaa can be any naturally occurring amino acid
  misc_feature (288)..(288): Xaa can be any naturally occurring amino acid
GWVEAAEHCQVTCKCNKKLEKRLLKKHEETECPLRLAVCQHCDLELSILKLKEHEDYCGARTELCGNCGRNVLVKDLKTHPEVCGREGEEKRNEVAIPPNAYDESWGQDGIWIASQLLRQIEALDPPMRLPRRPLRAFESDVFHNRTTNQRNITAQVSIQNNLFEEQERQERNRGQQPPKEGGEESANLDFMLALSLQNEGQASSVAEQDFWRAVCEADQSHGGPRSLSDIKGAADEIMLPCEFCEELYPEELLIDHQTSCNPSRALTLRHPNKLDQGXRVPHAQEAXGMGERRKTPGENWGSKFRVRKGKNPIYQCGKQAASNQLDSLMGLSNSHPVEESIIIPCEFCGVQLEEEVLFHHQDQCDQRPATATNHVTEGIPRLDSQPQETSPELPRRRVRHQGDLSSGYLDDTKQETANGPTSCLPPSRPINNMTATYNQLSRSTSGPRPGCQPSSPCVPKLSNSDSQDIQGRNRDSQNGAIAPGHVSVIRPPQNLYPENIVPSFSPGPSGRYGASGRSEGGRNSRVTPAAANYRSRTAKAKPSKQQGAGDAEEEEEE

SEQ ID NO: 844198 - protein, 125 aa, Homo sapiens
MTATYNQLSRSTSGPRPGCQPSSPCVPKLSNSDSQDIQGRNRDSQNGAIAPGHVSVIRPPQNLYPENIVPSFSPGPSGRYGASGRSEGGRNSRVTPAAANYRSRTAKAKPSKQQGAGDAEEEEEE

SEQ ID NO: 844199 - protein, 364 aa, Homo sapiens
MAEFLDDQETRLCDNCKKEIPVFNFTIHEIHCQRNIGMCPTCKEPFPKSDMETHMAAEHCQVTCKCNKKLEKRLLKKHEETECPLRLAVCQHCDLELSILKLKEHEDYCGARTELCGNCGRNVLVKDLKTHPEVCGREGEEKRNEVAIPPNAYDESWGQDGIWIASQLLRQIEALDPPMRLPRRPLRAFESDVFHNRTTNQRNITAQVSIQNNLFEEQERQERNRGQQPPKEGGEESANLDFMLALSLQNEGQASSVAEQDFWRAVCEADQSHGGPRSLSDIKGAADEIMLPCEFCEELYPEELLIDHQTSCNPSRALPSLNTGSSSPRGVEEPDVIFQNFLQQAASNQLDSLMGLSSISSSSG

SEQ ID NO: 844200 - protein, 113 aa, Homo sapiens
SEFVDLCSGTLQELVSNCFLSVVGVKVAGIPGSPLQLPTTAAELQRQSLPSNRELGMQKRKRRSNGVSRDFTSVPVFCAQQHLPLCRPTSLALWVGEFFQILDFSRLWPFCVF

SEQ ID NO: 844201 - protein, 298 aa, Homo sapiens
MAEFLDDQETRLCDNCKKEIPVFNFTIHEIHCQRNIGMCPTCKEPFPKSDMETHMAAEHCQVTCKCNKKLEKRLLKKHEETECPLRLAVCQHCDLELSILKLKEHEDYCGARTELCGNCGRNVLVKDLKTHPEVCGREGEEKRNEVAIPPNAYDESWGQDGIWIASQLLRQIEALDPPMRLPRRPLRAFESDVFHNRTTNQRNITAQVSIQNNLFEEQERQERNRGQQPPKEGGEESANLDFMLALSLQNEGQASSVAEQDFWRAVCEADQSHGGPRSLSDIKGRLAYSALASFSTVL

SEQ ID NO: 844202 - protein, 574 aa, Homo sapiens; identical to SEQ ID NO: 844194

SEQ ID NO: 844203 - protein, 609 aa, Homo sapiens
  misc_feature (330)..(330): Xaa can be any naturally occurring amino acid
  misc_feature (339)..(339): Xaa can be any naturally occurring amino acid
MAEFLDDQETRLCDNCKKEIPVFNFTIHEIHCQRNIGMCPTCKEPFPKSDMETHMAAEHCQVTCKCNKKLEKRLLKKHEETECPLRLAVCQHCDLELSILKLKEHEDYCGARTELCGNCGRNVLVKDLKTHPEVCGREGEEKRNEVAIPPNAYDESWGQDGIWIASQLLRQIEALDPPMRLPRRPLRAFESDVFHNRTTNQRNITAQVSIQNNLFEEQERQERNRGQQPPKEGGEESANLDFMLALSLQNEGQASSVAEQDFWRAVCEADQSHGGPRSLSDIKGAADEIMLPCEFCEELYPEELLIDHQNKLEAFTCLTLRHPNKLDQGXRVPHAQEAXGMGERRKTPGENWGSKFRVRKGKNPIYQCGKQAASNQLDSLMGLSNSHPVEESIIIPCEFCGVQLEEEVLFHHQDQCDQRPATATNHVTEGIPRLDSQPQETSPELPRRRVRHQGDLSSGYLDDTKQETANGPTSCLPPSRPINNMTATYNQLSRSTSGPRPGCQPSSPCVPKLSNSDSQDIQGRNRDSQNGAIAPGHVSVIRPPQNLYPENIVPSFSPGPSGRYGASGRSEGGRNSRVTPAAANYRSRTAKAKPSKQQGAGDAEEEEEE

SEQ ID NO: 844204 - protein, 582 aa, Homo sapiens; identical to SEQ ID NO: 844188

SEQ ID NO: 844205 - protein, 582 aa, Homo sapiens; identical to SEQ ID NO: 844188

SEQ ID NO: 844206 - protein, 525 aa, Homo sapiens
  misc_feature (8)..(8): Xaa can be any naturally occurring amino acid
WKRAAGEXGTEELEKRLLKKHEETECPLRLAVCQHCDLELSILKLKEHEDYCGARTELCGNCGRNVLVKDLKTHPEVCGREGEEKRNEVAIPPNAYDESWGQDGIWIASQLLRQIEALDPPMRLPRRPLRAFESDVFHNRTTNQRNITAQVSIQNNLFEEQERQERNRGQQPPKEGGEESANLDFMLALSLQNEGQASSVAEQDFWRAVCEADQSHGGPRSLSDIKGAADEIMLPCEFCEELYPEELLIDHQTSCNPSRALPSLNTGSSSPRGVEEPDVIFQNFLQQAASNQLDSLMGLSNSHPVEESIIIPCEFCGVQLEEEVLFHHQDQCDQRPATATNHVTEGIPRLDSQPQETSPELPRRRVRHQGDLSSGYLDDTKQETANGPTSCLPPSRPINNMTATYNQLSRSTSGPRPGCQPSSPCVPKLSNSDSQDIQGRNRDSQNGAIAPGHVSVIRPPQNLYPENIVPSFSPGPSGRYGASGRSEGGRNSRVTPAAANYRSRTAKAKPSKQQGAGDAEEEEEE

SEQ ID NO: 844207 - protein, 406 aa, Homo sapiens
MAEFLDDQETRLCDNCKKEIPVFNFTIHEIHCQRNIGMCPTCKEPFPKSDMETHMAAEHCQVTCKCNKKLEKRLLKKHEETECPLRLAVCQHCDLELSILKLKEHEDYCGARTELCGNCGRNVLVKDLKTHPEVCGREGEEKRNEVAIPPNAYDESWGQDGIWIASQLLRQIEALDPPMRLPRRPLRAFESDVFHNRTTNQRNITAQVSIQNNLFEEQERQERNRGQQPPKEGGEESANLDFMLALSLQNEGQASSVAEQDFWRAVCEADQSHGGPRSLSDIKGAADEIMLPCEFCEELYPEELLIDHQTSCNPSRALPSLNTGSSSPRGVEEPDVIFQNFLQQAASNQLDSLMGLSNSHPVEESIIIPCEFCGVQLEEEVLFHHQDQCDRRPAIGNHGLSRYRAR

SEQ ID NO: 844208 - protein, 262 aa, Homo sapiens
MAEFLDDQETRLCDNCKKEIPVFNFTIHEIHCQRNIGMCPTCKEPFPKSDMETHMAAEHCQVTCKCNKKLEKRLLKKHEETECPLRLAVCQHCDLELSILKLKEHEDYCGARTELCGNCGRNVLVKDLKTHPEVCGREGEEKRNEVAIPPNAYDESWGQDGIWIASQLLRQIEALDPPMRLPRRPLRAFESDVFHNRTTNQRNITAQVSIQNNLFEEQERQERNRGQQPPKEGGEESANLDFMLALSLQNEGQAPGVYEALW

SEQ ID NO: 844209 - protein, 326 aa, Homo sapiens
MAEFLDDQETRLCDNCKKEIPVFNFTIHEIHCQRNIGMCPTCKEPFPKSDMETHMAAEHCQVTCKCNKKLEKRLLKKHEETECPLRLAVCQHCDLELSILKLKEHEDYCGARTELCGNCGRNVLVKDLKTHPEVCGREGEEKRNEVAIPPNAYDESWGQDGIWIASQLLRQIEALDPPMRLPRRPLRAFESDVFHNRTTNQRNITAQVSIQNNLFEEQERQERNRGQQPPKEGGEESANLDFMLALSLQNEGQASSVAEQDFWRAVCEADQSHGGPRSLSDIKGAADEIMLPCEFCEELLEHLCLRPHGYHLLCSIHRSLLAAQAN

SEQ ID NO: 844210 - protein, 132 aa, Homo sapiens
MAEFLDDQETRLCDNCKKEIPVFNFTIHEIHCQRNIGMCPTCKEPFPKSDMETHMAAEHCQVTCKCNKKLEKRLLKKHEETECPLRLAVCQHCDLELSILKLMGARWVLLPSVHNAVVVVLQSFVFTSFFPI

SEQ ID NO: 844211 - protein, 538 aa, Homo sapiens
MAGARAAAAAASAGSSASSGNQPPQELGLGELLEEFSRTQYRAKDGSGTGGSKVERIEKRCLELFGRDYCFSVIPNTNGDICGHYPRHIVFLEYESSEKEKDTFESTVQVSKLQDLIHRSKMARCRGRFVCPVILFKGKHICRSATLAGWGELYGRSGYNYFFSGGADDAWADVEDVTEEDCALRSGDTHLFDKVRGYDIKLLRYLSVKYICDLMVENKKVKFGMNVTSSEKVDKAQRYADFTLLSIPYPGCEFFKEYKDRDYMAEGLIFNWKQDYVDAPLSIPDFLTHSLNIDWSQYQCWDLVQQTQNYLKLLLSLVNSDDDSGLLVHCISGWDRTPLFISLLRLSLWADGLIHTSLKPTEILYLTVAYDWFLFGHMLVDRLSKGEEIFFFCFNFLKHITSEEFSALKTQRRKSLPARDGGFTLEDICMLRRKDRGSTTSLGSDFSLVMESSPGATGSFTYEAVELVPAGAPTQAAWLAALSDRETRLQEVRSAFLAAYSSTVGLRAVAPSPSGAIGGLLEQFARGVGLRSISSNAL

SEQ ID NO: 844212 - protein, 108 aa, Homo sapiens [sequence omitted]

SEQ ID NO: 844213 - protein, 477 aa, Homo sapiens
MAGARAAAAAASAGSSASSGNQPPQELGLGELLEEFSRTQYRAKDGSGTGGSKVERIEKRCLELFGRDYCFSVIPNTNGDICGHYPRHIVFLEYESSEKEKDTFESTVQVSKLQDLIHRSKMARCRGRFVCPVILFKGKHICRSATLAGWGELYGRSGYNYFFSGGADDAWADVEDVTEEDCALRSGDTHLFDKVRGYDIKLLRYLSVKYICDLMVENKKVKFGMNVTSSEKVDKAQRYADFTLLSIPYPGCEFFKEYKDRDYMAEGLIFNWKQDYVDAPLSIPDFLTHSLNIDWSQYQCWDLVQQTQNYLKLLLSLVNSDDDSGLLVHCISGWDRTPLFISLLRLSLWADGLIHTSLKPTEILYLTVAYDWFLFGHMLVDRLSKGEEIFFFCFNFLKHITSEEFSALKTQRRKSLPARDGGFTLEDICMLRRKDRGSTTSLGSDFSLVMESSPGATGSFTYEAVELVPAGAPTQAA

SEQ ID NO: 844214 - protein, 598 aa, Homo sapiens
MAGARAAAAAASAGSSASSGNQPPQELGLGELLEEFSRTQYRAKDGSGTGGSKVERIEKRCLELFGRDYCFSVIPNTNGDICGHYPRHIVFLEYESSEKEKDTFESTVQVSKLQDLIHRSKMARCRGRFVCPVILFKGKHICRSATLAGWGELYGRSGYNYFFSGGADDAWADVEDVTEEDCALRSGDTHLFDKVRGYDIKLLRYLSVKYICDLMVENKKVKFGMNVTSSEKVDKAQRYADFTLLSIPYPGCEFFKEYKDRDYMAEGLIFNWKQDYVDAPLSIPDFLTHSLNIDWSQYQCWDLVQQTQNYLKLLLSLVNSDDDSGLLVHCISGWDRTPLFISLLRLSLWADGLIHTSLKPTEILYLTVAYDWFLFGHMLVDRLSKGEEIFFFCFNFLKHITSEEFSALKTQRRKSLPARDGGFTLEDICMLRRKDRGSTTSLGSDFSLVMESSPGATGSFTYEAVELVPAGAPTQAAWRKSHSSSPQSVLWNRPQPSEDRLPSQQGLAEARSSSSSSSNHSDNFFRMGSSPLEVPKPRLAALSDRETRLQEVRSAFLAAYSSTVGLRAVAPSPSGAIGGLLEQFARGVGLRSISSNAL

SEQ ID NO: 844215 - protein, 650 aa, Homo sapiens
MAGARAAAAAASAGSSASSGNQPPQELGLGELLEEFSRTQYRAKDGSGTGGSKVERIEKRCLELFGRDYCFSVIPNTNGDICGHYPRHIVFLEYESSEKEKDTFESTVQVSKLQDLIHRSKMARCRGRFVCPVILFKGKHICRSATLAGWGELYGRSGYNYFFSGGADDAWADVEDVTEEDCALRSGDTHLFDKVRGYDIKLLRYLSVKYICDLMVENKKVKFGMNVTSSEKVDKAQRYADFTLLSIPYPGCEFFKEYKDRDYMAEGLIFNWKQDYVDAPLSIPDFLTHSLNIDWSQYQCWDLVQQTQNYLKLLLSLVNSDDDSGLLVHCISGWDRTPLFISLLRLSLWADGLIHTSLKPTEILYLTVAYDWFLFGHMLVDRLSKGEEIFFFCFNFLKHITSEEFSALKTQRRKSLPARDGGFTLEDICMLRRKDRGSTTSLGSDFSLVMESSPGATGSFTYEAVELVPAGAPTQAAWRKSHSSSPQSVLWNRPQPSEDRLPSQQGLAEARSSSSSSSNHSDNFFRMGSSPLEVPKPRSVDHPLPGSSLSTDYGSWQMVTGCGSIQERAVLHTDSSLPFSFPDELPNSCLLAALSDRETRLQEVRSAFLAAYSSTVGLRAVAPSPSGAIGGLLEQFARGVGLRSISSNAL

SEQ ID NO: 844216 - protein, 650 aa, Homo sapiens; identical to SEQ ID NO: 844215

SEQ ID NO: 844217 - protein, 383 aa, Homo sapiens
MAAGPAALRFESTVQVSKLQDLIHRSKMARCRGRFVCPVILFKGKHICRSATLAGWGELYGRSGYNYFFSGGADDAWADVEDVTEEDCALRSGDTHLFDKVRGYDIKLLRYLSVKYICDLMVENKKVKFGMNVTSSEKVDKAQRYADFTLLSIPYPGCEFFKEYKDRDYMAEGLIFNWKQDYVDAPLSIPDFLTHSLNIDWSQYQCWDLVQQTQNYLKLLLSLVNSDDDSGLLVHCISGWDRTPLFISLLRLSLWADGLIHTSLKPTEILYLTVAYDWFLFGHMLVDRLSKGEEIFFFCFNFLKHITSEEFSALKTQRRKSLPARDGGFTLEDICMLRRKDRGSTTSLGSDFSLVMESSPGATGSFTYEAVELVPAGAPTQAA

SEQ ID NO: 844218 - protein, 411 aa, Homo sapiens
MVENKKVKFGMNVTSSEKVDKAQRYADFTLLSIPYPGCEFFKEYKDRDYMAEGLIFNWKQCWDLVQQTQNYLKLLLSLVNSDDDSGLLVHCISGWDRTPLFISLLRLSLWADGLIHTSLKPTEILYLTVAYDWFLFGHMLVDRLSKGEEIFFFCFNFLKHITSEEFSALKTQRRKSLPARDGGFTLEDICMLRRKDRGSTTSLGSDFSLVMESSPGATGSFTYEAVELVPAGAPTQAAWRKSHSSSPQSVLWNRPQPSEDRLPSQQGLAEARSSSSSSSNHSDNFFRMGSSPLEVPKPRSVDHPLPGSSLSTDYGSWQMVTGCGSIQERAVLHTDSSLPFSFPDELPNSCLLAALSDRETRLQEVRSAFLAAYSSTVGLRAVAPSPSGAIGGLLEQFARGVGLRSISSNAL

SEQ ID NO: 844219 - protein, 650 aa, Homo sapiens; identical to SEQ ID NO: 844215

SEQ ID NO: 844220 - protein, 650 aa, Homo sapiens; identical to SEQ ID NO: 844215

SEQ ID NO: 844221 - protein, 356 aa, Homo sapiens
MARCRGRFVCPVILFKGKHICRSATLAGWGELYGRSGYNYFFSGGADDAWADVEDVTEEDCALRSGDTHLFDKVRGYDIKLLRYLSVKYICDLMVENKKVKFGMNVTSSEKVDKAQRYADFTLLSIPYPGCEFFKEYKDRDYMAEGLIFNWKQDYVDAPLSIPDFLTHSLNIDWSQYQCWDLVQQTQNYLKLLLSLVNSDDDSGLLVHCISGWDRTPLFISLLRLSLWADGLIHTSLKPTEILYLTVAYDWFLFGHMLVDRLSKGEEIFFFCFNFLKHITSEEFSALKTQRRKSLPARDGGFTLEDICMLRRKDRGSTTSLGSDFSLVMESSPGATGSFTYEAVELVPAGAPTQAA

SEQ ID NO: 844222 - protein, 590 aa, Homo sapiens
MAGARAAAAAASAGSSASSGNQPPQELGLGELLEEFSRTQYRAKDGSGTGGSKVERIEKRCLELFGRDYCFSVIPNTNGDICGHYPRHIVFLEYESSEKEKDTFESTVQVSKLQDLIHRSKMARCRGRFVCPVILFKGKHICRSATLAGWGELYGRSGYNYFFSGGADDAWADVEDVTEEDCALRSGDTHLFDKVRGYDIKLLRYLSVKYICDLMVENKKVKFGMNVTSSEKVDKAQRYADFTLLSIPYPGCEFFKEYKDRDYMAEGLIFNWKQDYVDAPLSIPDFLTHSLNIDWSQYQCWDLVQQTQNYLKLLLSLVNSDDDSGLLVHCISGWDRTPLFISLLRLSLWADGLIHTSLKPTEILYLTVAYDWFLFGHMLVDRLSKGEEIFFFCFNFLKHITSEEFSALKTQRRKSLPARDGGFTLEDICMLRRKDRGSTTSLGSDFSLVMESSPGATGSFTYEAVELVPAGAPTQAAWRKSHSSSPQSVLWNRPQPSEDRLPSQQGLAEARSSSSSSSNHSDNFFRMGSSPLEVPKPRSVDHPLPGSSLSTDYGSWQMVTGCGSIQERAVLHTDSSLPFSFPDELPNSCL

SEQ ID NO: 844223 - protein, 436 aa, Homo sapiens
MVENKKVKFGMNVTSSEKVDKAQRYADFTLLSIPYPGCEFFKEYKDRDYMAEGLIFNWKQDYVDAPLSIPDFLTHSLNIDWSQYQCWDLVQQTQNYLKLLLSLVNSDDDSGLLVHCISGWDRTPLFISLLRLSLWADGLIHTSLKPTEILYLTVAYDWFLFGHMLVDRLSKGEEIFFFCFNFLKHITSEEFSALKTQRRKSLPARDGGFTLEDICMLRRKDRGSTTSLGSDFSLVMESSPGATGSFTYEAVELVPAGAPTQAAWRKSHSSSPQSVLWNRPQPSEDRLPSQQGLAEARSSSSSSSNHSDNFFRMGSSPLEVPKPRSVDHPLPGSSLSTDYGSWQMVTGCGSIQERAVLHTDSSLPFSFPDELPNSCLLAALSDRETRLQEVRSAFLAAYSSTVGLRAVAPSPSGAIGGLLEQFARGVGLRSISSNAL

SEQ ID NO: 844224 - protein, 538 aa, Homo sapiens
MAGARAAAAAASAGSSASSGNQPPQELGLGELLEEFSRTQYRAKDGSGTGGSKVERIEKRCLELFGRDYCFSVIPNTNGDICGHYPRHIVFLEYESSEKEKDTFESTVQVSKLQDLIHRSKMARCRGRFVCPVILFKGKHICRSATLAGWGELYGRSGYNYFFSGGADDAWADVEDVTEEDCALRSGDTHLFDKVRGYDIKLLRYLSVKYICDLMVENKKVKFGMNVTSSEKVDKAQRYADFTLLSIPYPGCEFFKEYKDRDYMAEGLIFNWKQDYVDAPLSIPDFLTHSLNIDWSQYQCWDLVQQTQNYLKLLLSLVNSDDDSGLLVHCISGWDRTPLFISLLRLSLWADGLIHTSLKPTEILYLTVAYDWFLFGHMLVDRLSKGEEIFFFCFNFLKHITSEEFSALKTQRRKSLPARDGGFTLEDICMLRRKDRGSTTSLGSDFSLVMESSPGATGSFTYEAVELVPAGAPTQAAWRKSHSSSPQSVLWNRPQPSEDRLPSQQGLAEARSSSSSSSNHSDNFFRMGSSPLEVPKPR

SEQ ID NO: 844225 - protein, 127 aa, Homo sapiens
MTDCILSPLSPLCPRSVDHPLPGSSLSTDYGSWQMVTGCGSIQERAVLHTDSSLPFSFPDELPNSCLLAALSDRETRLQEVRSAFLAAYSSTVGLRAVAPSPSGAIGGLLEQFARGVGLRSISSNAL

SEQ ID NO: 844226 - protein, 245 aa, Homo sapiens
MFQRAQELRRRAEDYHKCKIPPSARKPLCNWVRMVAAEHRHSSGLPYWLYLTAETLKNRMGRQPPPPTQQHSITDNSLSLKTPPECLLTPLPPSVDDNIKECPLAPLPPSPLPPSVDDNLKECLFVPLPPSPLPPSVDDNLKECLFVPLPPSPLPPSVDDNLKTPPLATQEAEVEKPPKPKRWRVDEVEQSPKPKRRRVDEVEQSPKPKRQREAEAQQLPKPKRRRLSKLRTRHCTQAWAIRINP

SEQ ID NO: 844227 - protein, 231 aa, Homo sapiens
MFQRAQELRRRAEDYHKCKIPPSARKPLCNWVRMVAAEHRHSSGLPYWLYLTAETLKNRMGRQPPPPTQQHSITDNSLSLKTPPECLLTPLPPSVDDNIKECPLAPLPPSPLPPSVDDNLKECLFVPLPPSPLPPSVDDNLKECLFVPLPPSPLPPSVDDNLKTPPLATQEAEVEKPPKPKRWRVDEVEQSPKPKRQREAEAQQLPKPKRRRLSKLRTRHCTQAWAIRINP

SEQ ID NO: 844228 - protein, 179 aa, Homo sapiens
VCWLNWSNGSKPLLAFVVPALAIVAVNFVVVLLVLTKLWRPTVGERLSRDDKATIIRVGKSLLILTPLLGLTWGFGIGTIVDSQNLAWHVIFALLNAFQGFFILCFGILLDSKLRQLLFNKLSALSSWKQTEKQNSSDLSAKPKFSKPFNPLQNKGHYAFSHTGDSSDNIMLTQFVSNE

SEQ ID NO: 844229 - protein, 119 aa, Homo sapiens
SARWLIINNKPEEGLKELTKAAHRNGMKNAEDILTMEVLKSTMKQELEAAQKKHSLCELLRIPNICKRICFLSFVRSAGVCWRSTPDPVCLGITSGGCRTAKIPACSFLWKLHFRGAPA

SEQ ID NO: 844230 - protein, 119 aa, Homo sapiens
SARWLIINNKPEEGLKELTKAAHRNGMKNAEDILTMEVLKSTMKQELEAAQKKHSLCELLRIPNICKRICFLSFVRFASTIPFWGLTLAPSALWETMFSCCRLSLVQSPSWPIVLHLGH

SEQ ID NO: 844231 - protein, 120 aa, Homo sapiens
SYWQPAFWPSYLCLKVRKVHRWKKENVFPSFLRDCPGHTYLKPEGKGELSSQDSLIEIWGFRTDFATRKLLGNESKMSKIGSDIWLSSAHLRSSKKLVPFIPDSFSRTAIDHLPFGQSNS

SEQ ID NO: 844232 - protein, 64 aa, Homo sapiens
NEKTTPSPAEPTENGDRTPLANEKTTPSLAEPTENGQRTPFANEKTTSSSAEPTEHEERTPLAN

SEQ ID NO: 844233 - protein, 169 aa, Homo sapiens
MRGTPGDADGGGRAVYQSMCKPITGTINDLNQQVWTLQGQNLVAVPRSDSVTPVTVAVITCKYPEALEQGRGDPIYLGIQNPEMCLYCEKVGEQPTLQLKEQKIMDLYGQPEPVKPFLFYRAKTGRTSTLESVAFPDWFIASSKRDQPIILTSELGKSYNTAFELNIND

SEQ ID NO: 844234 - protein, 169 aa, Homo sapiens; identical to SEQ ID NO: 844233

SEQ ID NO: 844235 - protein, 36 aa, Homo sapiens
NWGFNIVRSKGDEPCSCGIFHSPHFTYALEVPWGLH

SEQ ID NO: 844236 - protein, 518 aa, Homo sapiens
KAEVWEGLRGGLRRSAGGWSSERVWAAAGSAMETVQLRNPPRRQLKKLDEDSLTKQPEEVFDVLEKLGEGSYGSVYKAIHKETGQIVAIKQVPVESDLQEIIKEISIMQQCDSPHVVKYYGSYFKNTDLWIVMEYCGAGSVSDIIRLRNKTLTEDEIATILQSTLKGLEYLHFMRKIHRDIKAGNILLNTEGHAKLADFGVAGQLTDTMAKRNTVIGTPFWMAPEVIQEIGYNCVADIWSLGITAIEMAEGKPPYADIHPMRAIFMIPTNPPPTFRKPELWSDNFTDFVKQCLVKSPEQRATATQLLQHPFVRSAKGVSILRDLINEAMDVKLKRQESQQREVDQDDEENSEEDEMDSGTMVRAVGDEMGTVRVASTMTDGANTMIEHDDTLPSQLGTMVINAEDEEEEGTMKRRDETMQPAKPSFLEYFEQKEKENQINSFGKSVPGPLKNSSDWKIPQDGDYEFLKSWTVEDLQKRLLALDPMMEQEIEEIRQKYQSKRQPILDAIEAKKRRQQNF

SEQ ID NO: 844237 - protein, 509 aa, Homo sapiens
KAEVWEGLRGGLRRSAGGWSSERVWAAAGSAMETVQLRNPPRRQLKKLDEDSLTKQPEEVFDVLEKLGEGSYGSVYKAIHKETGQIVAIKQVPVESDLQEIIKEISIMQQCDSPHVVKYYGSYFKNTDLWIVMEYCGAGSVSDIIRLRNKTLTEDEIATILQSTLKGLEYLHFMRKIHRDIKAGNILLNTEGHAKLADFGVAGQLTDTMAKRNTVIGTPFWMAPEVIQEIGYNCVADIWSLGITAIEMAEGKPPYADIHPMRAIFMIPTNPPPTFRKPELWSDNFTDFVKQCLVKSPEQRATATQLLQHPFVRSAKGVSILRDLINEAMDVKLKRQESQQREVDQDDEENSEEDEMDSGTMVRAVGDEMGTVRVASTMTDGANTMIEHDDTLPSQLGTMVINAEDEEEEGTMKRRDETMQPAKPSFLEYFEQKEKENQGPLKNSSDWKIPQDGDYEFLKSWTVEDLQKRLLALDPMMEQEIEEIRQKYQSKRQPILDAIEAKKRRQQNF

SEQ ID NO: 844238 - protein, 411 aa, Homo sapiens
MQQCDSPHVVKYYGSYFKNTDLWIVMEYCGAGSVSDIIRLRNKTLTEDEIATILQSTLKGLEYLHFMRKIHRDIKAGNILLNTEGHAKLADFGVAGQLTDTMAKRNTVIGTPFWMAPEVIQEIGYNCVADIWSLGITAIEMAEGKPPYADIHPMRAIFMIPTNPPPTFRKPELWSDNFTDFVKQCLVKSPEQRATATQLLQHPFVRSAKGVSILRDLINEAMDVKLKRQESQQREVDQDDEENSEEDEMDSGTMVRAVGDEMGTVRVASTMTDGANTMIEHDDTLPSQLGTMVINAEDEEEEGTMKRRDETMQPAKPSFLEYFEQKEKENQINSFGKSVPGPLKNSSDWKIPQDGDYEFLKSWTVEDLQKRLLALDPMMEQEIEEIRQKYQSKRQPILDAIEAKKRRQQNF

SEQ ID NO: 844239 - protein, 467 aa, Homo sapiens
KAEVWEGLRGGLRRSAGGWSSERVWAAAGSAMETVQLRNPPRRQLKKLDEDSLTKQPEEVFDVLEKLGEGSYGSVYKAIHKETGQIVAIKQVPVESDLQEIIKEISIMQQCDSPHVVKYYGSYFKNTDLWIVMEYCGAGSVSDIIRLRNKTLTEDEIATILQSTLKGLEYLHFMRKIHRDIKAGNILLNTEGHAKLADFGVAGQLTDTMAKRNTVIGTPFWMAPEVIQEIGYNCVADIWSLGITAIEMAEGKPPYADIHPMRAIFMIPTNPPPTFRKPELWSDNFTDFVKQCLVKSPEQRATATQLLQHPFVRSAKGVSILRDLINEAMDVKLKRQESQQREVDQDDEENSEEDEMDSGTMVRAVGDEMGTVRVASTMTDGANTMIEHDDTLPSQLGTMVINAEDEEEEGTMKSKALSKFTDFLDQAYIFQRRQILMVHAGLALGSFFCHNQRSRKLGSLRWGQEVW

SEQ ID NO: 844240 - protein, 265 aa, Homo sapiens
GQIPFHPMRAIFMIPTNPPPTFRKPELWSDNFTDFVKQCLVKSPEQRATATQLLQHPFVRSAKGVSILRDLINEAMDVKLKRQESQQREVDQDDEENSEEDEMDSGTMVRAVGDEMGTVRVASTMTDGANTMIEHDDTLPSQLGTMVINAEDEEEEGTMKRRDETMQPAKPSFLEYFEQKEKENQINSFGKSVPGPLKNSSDWKIPQDGDYEFLKSWTVEDLQKRLLALDPMMEQEIEEIRQKYQSKRQPILDAIEAKKRRQQNF

SEQ ID NO: 844241 - protein, 70 aa, Homo sapiens
KAEVWEGLRGGLRRSAGGWSSERVWAAAGSAMETVQLRNPPRRQLKKLDEDSLTKQPEEVFDVLEKLGEG

SEQ ID NO: 844242 - protein, 518 aa, Homo sapiens; identical to SEQ ID NO: 844236

SEQ ID NO: 844243 - protein, 446 aa, Homo sapiens
KAEVWEGLRGGLRRSAGGWSSERVWAAAGSAMETVQLRNPPRRQLKKLDEDSLTKQPEEVFDVLEKLGEGSYGSVYKAIHKETGQIVAIKQVPVESDLQEIIKEISIMQQCDSPHVVKYYGSYFKNTDLWIVMEYCGAGSVSDIIRLRNKTLTEDEIATILQSTLKGLEYLHFMRKIHRDIKAGNILLNTEGHAKLADFGVAGQLTDTMAKRNTVIGTPFWMAPEVIQEIGYNCVADIWSLGITAIEMAEGKPPYADIHPMRAIFMIPTNPPPTFRKPELWSDNFTDFVKQCLVKSPEQRATATQLLQHPFVRSAKGVSILRDLINEAMDVKLKRQESQQREVDQDDEENSEEDEMDSGTMVRAVGDEMGTVRVASTMTDGANTMIEHDDTLPSQLGTMVINAEDEEEEGTMKRREETRAASETIIREYQEQERQRANQSNTRGKS

SEQ ID NO: 844244 - protein, 231 aa, Homo sapiens
KAEVWEGLRGGLRRSAGGWSSERVWAAAGSAMETVQLRNPPRRQLKKLDEDSLTKQPEEVFDVLEKLGEGSYGSVYKAIHKETGQIVAIKQVPVESDLQEIIKEISIMQQCDSPHVVKYYGSYFKNTDLWIVMEYCGAGSVSDIIRLRNKTLTEDEIATILQSTLKGLEYLHFMRKIHRDIKAGNILLNTEGHAKLADFGVAGQLTVSKNITCIDNFHFCPEKQFLLFTYF

SEQ ID NO: 844245 - protein, 218 aa, Homo sapiens
  misc_feature (2)..(2): Xaa can be any naturally occurring amino acid
LXVNDSLNFHRYRCMVADEMGLGKTIQAIGITYFYKEEWPLLIVVPSSLRYPWTEEIEKWIPELSPEEINVIQNKTDVRRMLTSKVTVLGYGLLTADAKTLIDALNNQNFKVVIVDESHYMKSRNATRSRILLPIVQKARRAILLTGTPALGRPEELFMQIEALFPQKFGRWTDYAKRYCNAHIRVSLPSPRLDCSGTIMAHYNLCLLGSIDSSALAS

SEQ ID NO: 844246 - protein, 283 aa, Homo sapiens
LGFRVALGLRVAEFREFLLTRRIIMPRVHNIKKSLTPHISCVTNESDNLLDFLPDRLRAKLLPFQKDGIIFALKRNGRCMVAYEMGLGKTIQAIGITYFYKEEWPLLIVVPSSLRYPWTEEIEKWIPELSPEEINVIQNKTDVRRMLTSKVTVLGYGLLTADAKTLIDALNNQNFKVVIVDESHYMKSRNATRSRILLPIVQKARRAILLTGTPALGRPEELFMQIEALFPQKFGRWTDYAKRYCNAHIRVSLPSPRLDCSGTIMAHYNLCLLGSIDSSALAS

SEQ ID NO: 844247 - protein, 259 aa, Homo sapiens
MPRVHNIKKSLTPHISCVTNESDNLLDFLPDRLRAKLLPFQKDGIIFALKRNGRCMVAYEMGLGKTIQAIGITYFYKEEWPLLIVVPSSLRYPWTEEIEKWIPELSPEEINVIQNKTDVRRMLTSKVTVLGYGLLTADAKTLIDALNNQNFKVVIVDESHYMKSRNATRSRILLPIVQKARRAILLTGTPALGRPEELFMQIEALFPQKFGRWTDYAKRYCNAHIRVSLPSPRLDCSGTIMAHYNLCLLGSIDSSALAS

SEQ ID NO: 844248 - protein, 135 aa, Homo sapiens
LGFRVALGLRVAEFREFLRDSQMGLGKTIQAIGITYFYKEEWPLLIVVPSSLRYPWTEEIEKWIPELSPEEINVIQNKTDVRDMSTSYQLTDSAAYWLYLDRSMHTALSDSALQLQLTQQPFTQLRLLRWMNHTT

SEQ ID NO: 844249 - protein, 63 aa, Homo sapiens
LLLIRAQEQKGVEGESVGGHKHGVEVSGQGLTWGTGEAPIFRREGRGGAPGFAGPVSEKISPP

SEQ ID NO: 844250 - protein, 111 aa, Homo sapiens
MFTPEQIMGKDVRLLRIKKEGSLDLALEGGVDSPIGKVVVSAVYERGAAERHGGIVKGDEIMAINGKIVTDYTLAEADAALQKAWNQGGDWIDLVVAVCPPKEYDDELTFF

SEQ ID NO: 844251 - protein, 563 aa, Homo sapiens [sequence omitted]

SEQ ID NO: 844252 - protein, 561 aa, Homo sapiens
YELSSTQRSLKALIRHYSHHQVDFLIENDAEKDYLYDVLRMYHQTMDVAVLVGDLKLVINEPSRLPLFDAIRPLIPLKHQVEYDQLTPRRSRKLKEVRLDRLHPEGLGLSVRGGLEFGCGLFISHLIKGGQADSVGLQVGDEIVRINGYSISSCTHEEVINLIRTKKTVSIKVRHIGLIPVKSSPDEPLTWQYVDQFVSESGGVRGSLGSPGNRENKEKKVFISLVGSRGLGCSISSGPIQKPGIFISHVKPGSLSAEVGLEIGDQIVEVNGVDFSNLDHKEAVNVLKSSRSLTISIVAAAGRELFMTDRERLAEARQRELQRQELLMQKRLAMESNKILQEQQEMERQRRKEIAQKAAEENERYRKEMEQIVEEEEKFKKQWEEDWGSKEQLLLPKTITAEVHPVPLRKPKYDQGVEPELEPADDLDGGTEEQGEQDFRKYEEGFDPYSMFTPEQIMGKDVRLLRIKKEGSLDLALEGGVDSPIGKVVVSAVYERGAAERHGGIVKGDEIMAINGKIVTDYTLAEADAALQKAWNQGGDWIDLVVAVCPPKEYDDELTFF

SEQ ID NO: 844253 - protein, 506 aa, Homo sapiens
APRAAGPVAVAALSSSWQPGTRRNGSCNDAAGPGPAMDRKVAREFRHKVDFLIENDAEKDYLYDVLRMYHQTMDVAVLVGDLKLVINEPSRLPLFDAIRPLIPLKHQVEYDQLTPRRSRKLKEVRLDRLHPEGLGLSVRGGLEFGCGLFISHLIKGGQADSVGLQVGDEIVRINGYSISSCTHEEVINLIRTKKTVSIKVRHIGLIPVKSSPDEPLTWQYVDQFVSESGGVRGSLGSPGNRENKEKKVFISLVGSRGLGCSISSGPIQKPGIFISHVKPGSLSAEVGLEIGDQIVEVNGVDFSNLDHKEAVNVLKSSRSLTISIVAAAGRELFMTDRERLAEARQRELQRQELLMQKRLAMESNKILQEQQEMERQRRKEIAQKAAEENERYRKEMEQIVEEEEKFKKQWEEDWGSKEQLLLPKTITAEVHPVPLRKPKYDQGVEPELEPADDLDGGTEEQGEQLLDGFIVTMANSQPSGRAVRDSLSPSSWNAKSPGNASGYPWP

SEQ ID NO: 844254 - protein, 588 aa, Homo sapiens
APRAAGPVAVAALSSSWQPGTRRNGSCNDAAGPGPAMDRKVAREFRHKVDFLIENDAEKDYLYDVLRMYHQTMDVAVLVGDLKLVINEPSRLPLFDAIRPLIPLKHQVEYDQLTPRRSRKLKEVRLDRLHPEGLGLSVRGGLEFGCGLFISHLIKGGQADSVGLQVGDEIVRINGYSISSCTHEEVINLIRTKKTVSIKVRHIGLIPVKSSPDEPLTWQYVDQFVSESGGVRGSLGSPGNRENKEKKVFISLVGSRGLGCSISSGPIQKPGIFISHVKPGSLSAEVGLEIGDQIVEVNGVDFSNLDHKEAVNVLKSSRSLTISIVAAAGRELFMTDRERLAEARQRELQRQELLMQKRLAMESNKILQEQQEMERQRRKEIAQKAAEENERYRKEMEQIVEEEEKFKKQWEEDWGSKEQLLLPKTITAEVHPVPLRKPKYDQGVEPELEPADDLDGGTEEQGEQDFRKYEEGFDPYSMFTPEQIMGKDVRLLRIKKEGSLDLALEGGVDSPIGKVVVSAVYERGAAERHGGIVKGDEIMAINGKIVTDYTLAEADAALQKAWNQGGDWIDLVVAVCPPKEYDDELTFF

SEQ ID NO: 844255 - protein, 563 aa, Homo sapiens
APRAAGPVAVAALSSSWQPGTRRNGSCNDAAGPGPAMDRKVAREFRHKVDFLIENDAEKDYLYDVLRMYHQTMDVAVLVGDLKLVINEPSRLPLFDAIRPLIPLKHQVEYDQLTPRRSRKLKEVRLDRLHPEGLGLSVRGGLEFGCGLFISHLIKGGQADSVGLQVGDEIVRINGYSISSCTHEEVINLIRTKKTVSIKVRHIGLIPVKSSPDEPLTWQYVDQFVSESGGVRGSLGSPGNRENKEKKVFISLVGSRGLGCSISSGPIQKPGIFISHVKPGSLSAEVGLEIGDQIVEVNGVDFSNLDHKEAVNVLKSSRSLTISIVAAAGRELFMTDRERLAEARQRELQRQELLMQKRLAMESNKILQEQQEMERQRRKEIAQKAAEENERYRKEMEQIVEEEEKFKKQWEEDWGSKEQLLLPKTITAEVHPYPFASQSDFRKYEEGFDPYSMFTPEQIMGKDVRLLRIKKEGSLDLALEGGVDSPIGKVVVSAVYERGAAERHGGIVKGDEIMAINGKIVTDYTLAEADAALQKAWNQGGDWIDLVVAVCPPKEYDDELTFF

SEQ ID NO: 844256 - protein, 521 aa, Homo sapiens [sequence omitted]

SEQ ID NO: 844257 - protein, 451 aa, Homo sapiens
  misc_feature (1)..(1): Xaa can be any naturally occurring amino acid
  misc_feature (10)..(10): Xaa can be any naturally occurring amino acid
  misc_feature (17)..(17): Xaa can be any naturally occurring amino acid
  misc_feature (24)..(24): Xaa can be any naturally occurring amino acid
XLGPFPVQNXQGPAESXHDPFLRXPGCQVGDEIVRINGYSISSCTHEEVINLIRTKKTVSIKVRHIGLIPVKSSPDEPLTWQYVDQFVSESGGVRGSLGSPGNRENKEKKVFISLVGSRGLGCSISSGPIQKPGIFISHVKPGSLSAEVGLEIGDQIVEVNGVDFSNLDHKEAVNVLKSSRSLTISIVAAAGRELFMTDRERLAEARQRELQRQELLMQKRLAMESNKILQEQQEMERQRRKEIAQKAAEENERYRKEMEQIVEEEEKFKKQWEEDWGSKEQLLLPKTITAEVHPVPLRKPKYDQGVEPELEPADDLDGGTEEQGEQDFRKYEEGFDPYSMFTPEQIMGKDVRLLRIKKEGSLDLALEGGVDSPIGKVVVSAVYERGAAERHGGIVKGDEIMAINGKIVTDYTLAEADAALQKAWNQGGDWIDLVVAVCPPKEYDDELTFF

SEQ ID NO: 844258 - protein, 147 aa, Homo sapiens
PYSSALTLKTLCCVALKPSLCFQDFRKYEEGFDPYSMFTPEQIMGKDVRLLRIKKEGSLDLALEGGVDSPIGKVVVSAVYERGAAERHGGIVKGDEIMAINGKIVTDYTLAEADAALQKAWNQGGDWIDLVVAVCPPKEYDDELTFF

SEQ ID NO: 844259 - protein, 2486 aa, Homo sapiens
MVLLLCLSCLIFSCLTFSWLKIWEKMTDSKPITKSKSEANLIPSQEPFPASDNSGETPQRNGEGHTLHKDTQPGRAQPPTKAQRSGRRRNSLPPSRQKPPRNPLSSSDAAPSPELQANGTGTQGLEATDTNGLSSSARPQGSKLVPSKEDKKQANIKRQLMTNFILGSFDDYSSDEDSVAGSSRESTRKGSRASLGALSLEAYLTTGEAETRVPTMRPSMSGLHLVKRGREHKKLDLHRDFTVASPAEFVTRFGGDRVIEKVLIANNGIAAVKCMRSIRRWAYEMFRNERAIRFVRMVTPEDLKANAEYIKMADHYGPAPGGPNNNNYANVELIVDIAKRIPLQAVWAGWGHALENPKLPELLCKNGVAFLGPPRLRPMVGLGDKIASTVVAQTLQVPTLPRSGSALTVEWTEDDLQQGKRISVPEDVYDKGCVKDVDEGLEAAERIGFPLMIKASEGGGGKGIRETESAEDFPILFRQVQSEIPGSPIFLMKLAQHARHLEVQILADQYGNAVSLFGRDCSIQRRHQKIVEEAPATIAPLAIFEFMEQCAIRLAKTVGYVSAGTVEYLYSQDGSFHFLELNPRLQVEHPCTEMIADVNLPAAQLQIAMGAPLHRLKDIRLLYGESPWGDSPISFENSAHLPCPRGHVIATRITSENPDEGFKPSSGTVQELNFRSSKNVWGYFTVAATGGLHEFAISQFGHCFSWGENREEAISNMVVALKELSIRGDFRTTVEYLINLLETESFQNNDIDTGWLDYLIAEKVQAEKPDIMLGVVCGALERGDAMFRTCMTDFLHSLERGQVLPADSLLNLVDVELIYEGVKYILKVTRQSLTMFVLIMNGCHIEIDAHRLNDGGLLLSYNGNSYTTYMKEEVDSYRITIGNKTCVFEKENDPTVLRSPSAGKLTQYTVEDGGHVEAGSSYAEMEVMKMIMTLNVQERGRVKYIKRPGAVLEAGCVVARLELDDPSKVHPAEPFTGELPAQQTLPILGEKLHQVFHSVLGSLTNVMSGFCLPEPFFSIKLKEWVQKLMMTLRHPSLLLDVQEIMTSRAGRIPPPVEKSVRKVMAQYASNITSVLCQFPSQQIATILDCHAATLQRKADREVFFINTQSIVQLVQRYRSGIRGYMKTVVMDLLRRYLRVETIFSKARDADANSSGMVGGVRSLSFTSVWVVLSPPAHYDKCVINLREQFKPDMSQVLDCIFSHAQVAKKNQLVIMLIDELCGPDPSLSDELISILNELTQLSKSEHCKVALRARQILIASTPSYELRHNQVESIFLSAIDMYGHQFCPENLQKLILSETTIFDVLNTFFYHANKVVCMASLEVYVGGAYIAYVLNSLQHRQLPDGTCVVEFQFMLPSSHPNRMTVPISITNPDLLRHSTELFMDSGFSPLCQRMGAMVAFRRFEDFTRNFDEVISCFANVPKDTPLFSEARTSLYSEDDCKSLREEPIHILNVSIQCADHLEDEALVPILRTFVQSKKNILVDYGLRRITFLIAQEKEFPKFFTFRARDEFAEDRIYRHLEPALAFQLELNRMRNFDLTAVPCANHKMHLYLGAAKVKEGVEVTDHRFFIRAIIRHSDLITKEASFEYLQNEGERLLLEAMDELEVAFNNTSVRTDCNHIFLNFVPTVIMDPFKIEESVRYMVMRYGSRLWKLRVLQAEVKINIRQTTTGSAVPIRLFITNESGYYLDISLYKEVTDSRSGNIMFHSFGNKQGPQHGMLINTPYVTKDLLQAKRFQAQTLGTTYIYDFPEMFRQALFKLWGSPDKYPKDILTYTELVLDSQGQLVEMNRLPGGNEVGMVAFKMRFKTQEYPEGRDVIVIGNDITFRIGSFGPGEDLLYLRASEMARAEGIPKIYVAANSGARIGMAEEIKHMFHVAWVDPEDPHKGFKYLYLTPQDYTRISSLNSVHCKHIEEGGESRYMITDIIGKDDGLGVENLRGSGMIAGESSLAYEEIVTISLVTCRAIGIGAYLVRLGQRVIQVENSHIILTGASALNKVLGREVYTSNNQLGGVQIMHYNGVSHITVPDDFEGVYTILEWLSYMPKDNHSPVPIITPTDPIDREIEFLPSRAPYDPRWMLAGRPHPTLKGTWQSGFFDHGSFKEIMAPWAQTVVTGRARLGGIPVGVIAVETRTVEVAVPADPANLDSEAKIIQQAGQVWFPDSAYKTAQAIKDFNREKLPLMIFANWRGFSGGMKDMYDQVLKFGAYIVDGLRQYKQPILIYIPPYAELRGGSWVVIDATINPLCIEMYADKESRGGVLEPEGTVEIKFRKKDLIKSMRRIDPAYKKLMEQLGEPDLSDKDRKDLEGRLKAREDLLLPIYHQVAVQFADFHDTPGRMLEKGVISDILEWKTARTFLYWRLRRLLLEDQVKQEILQASGELSHVHIQSMLRRWFVETEGAVKAYLWDNNQVVVQWLEQHWQAGDGPRSTIRENITYLKHDSVLKTIRGLVEENPEVAVDCVIYLSQHISPAERAQVVHLLSTMDSPAST

SEQ ID NO: 844260 - protein, 2486 aa, Homo sapiens; identical to SEQ ID NO: 844259

SEQ ID NO: 844261 - protein, 2486 aa, Homo sapiens; identical to SEQ ID NO: 844259

SEQ ID NO: 844262 - protein, 1056 aa, Homo sapiens
MTVPISITNPDLLRHSTELFMDSGFSPLCQRMGAMVAFRRFEDFTRNFDEVISCFANVPKDTPLFSEARTSLYSEDDCKSLREEPIHILNVSIQCADHLEDEALVPILRTFVQSKKNILVDYGLRRITFLIAQEKEFPKFFTFRARDEFAEDRIYRHLEPALAFQLELNRMRNFDLTAVPCANHKMHLYLGAAKVKEGVEVTDHRFFIRAIIRHSDLITKEASFEYLQNEGERLLLEAMDELEVAFNNTSVRTDCNHIFLNFVPTVIMDPFKIMFHSFGNKQGPQHGMLINTPYVTKDLLQAKRFQAQTLGTTYIYDFPEMFRQALFKLWGSPDKYPKDILTYTELVLDSQGQLVEMNRLPGGNEVGMVAFKMRFKTQEYPEGRDVIVIGNDITFRIGSFGPGEDLLYLRASEMARAEGIPKIYVAANSGARIGMAEEIKHMFHVAWVDPEDPHKGFKYLYLTPQDYTRISSLNSVHCKHIEEGGESRYMITDIIGKDDGLGVENLRGSGMIAGESSLAYEEIVTISLVTCRAIGIGAYLVRLGQRVIQVENSHIILTGASALNKVLGREVYTSNNQLGGVQIMHYNGVSHITVPDDFEGVYTILEWLSYMPKDNHSPVPIITPTDPIDREIEFLPSRAPYDPRWMLAGRPHPTLKGTWQSGFFDHGSFKEIMAPWAQTVVTGRARLGGIPVGVIAVETRTVEVAVPADPANLDSEAKIIQQAGQVWFPDSAYKTAQAIKDFNREKLPLMIFANWRGFSGGMKDMYDQVLKFGAYIVDGLRQYKQPILIYIPPYAELRGGSWVVIDATINPLCIEMYADKESRGGVLEPEGTVEIKFRKKDLIKSMRRIDPAYKKLMEQLGEPDLSDKDRKDLEGRLKAREDLLLPIYHQVAVQFADFHDTPGRMLEKGVISDILEWKTARTFLYWRLRRLLLEDQVKQEILQASGELSHVHIQSMLRRWFVETEGAVKAYLWDNNQVVVQWLEQHWQAGDGPRSTIRENITYLKHDSVLKTIRGLVEENPEVAVDCVIYLSQHISPAERAQVVHLLSTMDSPAST

SEQ ID NO: 844263 - protein, 250 aa, Homo sapiens
GPPCDRVCIESMQTKRAGGVLEPEGTVEIKFRKKDLIKSMRRIDPAYKKLMEQLGEPDLSDKDRKDLEGRLKAREDLLLPIYHQVAVQFADFHDTPGRMLEKGVISDILEWKTARTFLYWRLRRLLLEDQVKQEILQASGELSHVHIQSMLRRWFVETEGAVKAYLWDNNQVVVQWLEQHWQAGDGPRSTIRENITYLKHDSVLKTIRGLVEENPEVAVDCVIYLSQHISPAERAQVVHLLSTMDSPAST

SEQ ID NO: 844264 - protein, 687 aa, Homo sapiens
MTVPISITNPDLLRHSTELFMDSGFSPLCQRMGAMVAFRRFEDFTRNFDEVISCFANVPKDTPLFSEARTSLYSEDDCKSLREEPIHILNVSIQCADHLEDEALVPILRTFVQSKKNILVDYGLRRITFLIAQEKEFPKFFTFRARDEFAEDRIYRHLEPALAFQLELNRMRNFDLTAVPCANHKMHLYLGAAKVKEGVEVTDHRFFIRAIIRHSDLITKEASFEYLQNEGERLLLEAMDELEVAFNNTSVRTDCNHIFLNFVPTVIMDPFKIEESVRYMVMRYGSRLWKLRVLQAEVKINIRQTTTGSAVPIRLFITNESGYYLDISLYKEVTDSRSGNIMFHSFGNKQGPQHGMLINTPYVTKDLLQAKRFQAQTLGTTYIYDFPEMFRQALFKLWGSPDKYPKDILTYTELVLDSQGQLVEMNRLPGGNEVGMVAFKMRFKTQEYPEGRDVIVIGNDITFRIGSFGPGEDLLYLRASEMARAEGIPKIYVAANSGARIGMAEEIKHMFHVAWVDPEDPHKGFKYLYLTPQDYTRISSLNSVHCKHIEEGGESRYMITDIIGKDDGLGVENLRGSGMIAGESSLAYEEIVTISLVTCRAIGIGAYLVRLGQRVIQVENSHIILTGASALNKVTKKGPVQSGSLGARSHFNIPIGLWWGIFLNMKPVSFLLIQELFFSNLQLSGSL

SEQ ID NO: 844265 - protein, 532 aa, Homo sapiens
MTVPISITNPDLLRHSTELFMDSGFSPLCQRMGAMVAFRRFEDFTRNFDEVISCFANVPKDTPLFSEARTSLYSEDDCKSLREEPIHILNVSIQCADHLEDEALVPILRTFVQSKKNILVDYGLRRITFLIAQEKEFPKFFTFRARDEFAEDRIYRHLEPALAFQLELNRMRNFDLTAVPCANHKMHLYLGAAKVKEGVEVTDHRFFIRAIIRHSDLITKEASFEYLQNEGERLLLEAMDELEVAFNNTSVRTDCNHIFLNFVPTVIMDPFKIEESVRYMVMRYGSRLWKLRVLQAEVKINIRQTTTGSAVPIRLFITNESGYYLDISLYKEVTDSRSGNIMFHSFGNKQGPQHGMLINTPYVTKDLLQAKRFQAQTLGTTYIYDFPEMFRQALFKLWGSPDKYPKDILTYTELVLDSQGQLVEMNRLPGGNEVGMVAFKMRFKTQEYPEGRDVIVIGNDITFRIGSFGPGEDLLYLRASEMARAEGIPKIYVAANSGARIGMAEEIKHMFHVAWVDPEDPHKVRRETGGAG

SEQ ID NO: 844266 - protein, 71 aa, Homo sapiens
AQAIKDFNREKLPLMIFANWRGFSGGMKGKPLPAYVTPKPWGQHPGQHPLGGDANVLVCAHHHLSCVSQQP

SEQ ID NO: 844267 - protein, 1785 aa, Homo sapiens
MLKNLNIRVPSLIAKDTDAEVWDKGLVWELHCFSWGENREEAISNMVVALKELSIRGDFRTTVEYLINLLETESFQNNDIDTGWLDYLIAEKVQAEKPDIMLGVVCGALERGDAMFRTCMTDFLHSLERGQVLPADSLLNLVDVELIYEGVKYILKVTRQSLTMFVLIMNGCHIEIDAHRLNDGGLLLSYNGNSYTTYMKEEVDSYRITIGNKTCVFEKENDPTVLRSPSAGKLTQYTVEDGGHVEAGSSYAEMEVMKMIMTLNVQERGRVKYIKRPGAVLEAGCVVARLELDDPSKVHPAEPFTGELPAQQTLPILGEKLHRVFHSVLGSLTNVMSGFCLPEPFFSIKLKEWVQKLMMTLRHPSLLLDVQEIMTSRAGRIPPPVEKSVRKVMAQYASNITSVLCQFPSQQIATILDCHAATLQRKADREVFFINTQSIVQLVQRYRSGIRGYMKTVVMDLLRRYLRVEHHFQQAHYDKCVINLREQFKPDMSQVLDCIFSHAQVAKKNQLVIMLIDELCGPDPSLSDELISILNELTQLSKSEHCKVALRARQILIASPPSYELRHNQVESIFLSAIDMYGHQFCPENLQKLILSETTIFDVLNTFFYHANKVVCMASLEVYVGGAYIAYVLNSLQHRQLPDGTCVVEFQFMLPSSHPNRMTVPISITNPDLLRHSTELFMDSGFSPLCQRMGAMVAFRRFEDFTRNFDEVISCFANVPKDTPLFSEARTSLYSEDDCKSLREEPIHILNVSIQCADHLEDEALVPILRTFVQSKKNILVDYGLRRITFLIAQEKEFPKFFTFRARDEFAEDRIYRHLEPALAFQLELNRMRNFDLTAVPCANHKMHLYLGAAKVKEGVEVTDHRFFIRAIIRHSDLITKEASFEYLQNEGERLLLEAMDELEVAFNNTSVRTDCNHIFLNFVPTVIMDPFKIEESVRYMVMRYGSRLWKLRVLQAEVKINIRQTTTGSAVPIRLFITNESGYYLDISLYKEVTDSRSGNIMFHSFGNKQGPQHGMLINTPYVTKDLLQAKRFQAQTLGTTYIYDFPEMFRQALFKLWGSPDKYPKDILTYTELVLDSQGQLVEMNRLPGGNEVGMVAFKMRFKTQEYPEGRDVIVIGNDITFRIGSFGPGEDLLYLRASEMARAEGIPKIYVAANSGARIGMAEEIKHMFHVAWVDPEDPHKGFKYLYLTPQDYTRISSLNSVHCKHIEEGGESRYMITDIIGKDDGLGVENLRGSGMIAGESSLAYEEIVTISLVTCRAIGIGAYLVRLGQRVIQVENSHIILTGASALNKVLGREVYTSNNQLGGVQIMHYNGVSHITVPDDFEGVYTILEWLSYMPKDNHSPVPIITPTDPIDREIEFLPSRAPYDPRWMLAGRPHPTLKGTWQSGFFDHGSFKEIMAPWAQTVVTGRARLGGIPVGVIAVETRTVEVAVPADPANLDSEAKIIQQAGQVWFPDSAYKTAQAIKDFNREKLPLMIFANWRGFSGGMKDMYDQVLKFGAYIVDGLRQYKQPILIYIPPYAELRGGSWVVIDATINPLCIEMYADKESRGGVLEPEGTVEIKFRKKDLIKSMRRIDPAYKKLMEQLGEPDLSDKDRKDLEGRLKAREDLLLPIYHQVAVQFADFHDTPGRMLEKGVISDILEWKTARTFLYWRLRRLLLEDQVKQEILQASGELSHVHIQSMLRRWFVETEGAVKAYLWDNNQVVVQWLEQHWQAGDGPRSTIRENITYLKHDSVLKTIRGLVEENPEVAVDCVIYLSQHISPAERAQVVHLLSTMDSPAST

SEQ ID NO: 844268 - protein, 1786 aa, Homo sapiens
CWDYRREPPHPATPVLFQFSESHHCSNSVDVCMNLEMIHVPFPSRNMVVALKELSIRGDFRTTVEYLINLLETESFQNNDIDTGWLDYLIAEKVQAEKPDIMLGVVCGALERGDAMFRTCMTDFLHSLERGQVLPADSLLNLVDVELIYEGVKYILKVTRQSLTMFVLIMNGCHIEIDAHRLNDGGLLLSYNGNSYTTYMKEEVDSYRITIGNKTCVFEKENDPTVLRSPSAGKLTQYTVEDGGHVEAGSSYAEMEVMKMIMTLNVQERGRVKYIKRPGAVLEAGCVVARLELDDPSKVHPAEPFTGELPAQQNTAHLGEKLHQVFHSVLGSLTNVMSGFCLPEPFFSIKLKEWVQKLMMTLRHPSLLLDVQEIMTSRAGRIPPPVEKSVRKVMAQYASNITSVLCQFPSQQIATILDCHAATLQRKADREVFFINTQSIVQLVQRYRSGIRGYMKTVVMDLLRRYLRVEHHFQQAHYDKCVINLREQFKPDMSQVLDCIFSHAQVAKKNQLVIMLIDELCGPDPSLSDELISILNELTQLSKSEHCKVALRARQILIASTPSYELRHNQVESIFLSAIDMYGHQFCPENLQKLILSETTIFDVLNTFFYHANKVVCMASLEVYVGGAYIAYVLNSLQHRQLPDGTCVVEFQFMLPSSHPNRMTVPISITNPDLLRHSTELFMDSGFSPLCQRMGAMVAFRRFEDFTRNFDEVISCFANVPKDTPLFSEARTSLYSEDDCKSLREEPIHILNVSIQCADHLEDEALVPILRTFVQSKKNILVDYGLRRITFLIAQEKEFPKFFTFRARDEFAEDRIYRHLEPALAFQLELNRMRNFDLTAVPCANHKMHLYLGAAKVKEGVEVTDHRFFIRAIIRHSDLITKEASFEYLQNEGERLLLEAMDELEVAFNNTSVRTDCNHIFLNFVPTVIMDPFKIEESVRYMVMRYGSRLWKLRVLQAEVKINIRQTTTGSAVPIRLFITNESGYYLDISLYKEVTDSRSGNIMFHSFGNKQGPQHGMLINTPYVTKDLLQAKRFQAQTLGTTYIYDFPEMFRQALFKLWGSPDKYPKDILTYTELVLDSQGQLVEMNRLPGGNEVGMVAFKMRFKTQEYPEGRDVIVIGNDITFRIGSFGPGEDLLYLRASEMARAEGIPKIYVAANSGARIGMAEEIKHMFHVAWVDPEDPHKGFKYLYLTPQDYTRISSLNSVHCKHIEEGGESRYMITDIIGKDDGLGVENLRGSGMIAGESSLAYEEIVTISLVTCRAIGIGAYLVRLGQRVIQVENSHIILTGASALNKVLGREVYTSNNQLGGVQIMHYNGVSHITVPDDFEGVYTILEWLSYMPKDNHSPVPIITPTDPIDREIEFLPSRAPYDPRWMLAGRPHPTLKGTWQSGFFDHGSFKEIMAPWAQTVVTGRARLGGIPVGVIAVETRTVEVAVPADPANLDSEAKIIQQAGQVWFPDSAYKTAQAIKDFNREKLPLMIFANWRGFSGGMKDMYDQVLKFGAYIVDGLRQYKQPILIYIPPYAELRGGSWVVIDATINPLCIEMYADKESRGGVLEPEGTVEIKFRKKDLIKSMRRIDPAYKKLMEQLGEPDLSDKDRKDLEGRLKAREDLLLPIYHQVAVQFADFHDTPGRMLEKGVISDILEWKTARTFLYWRLRRLLLEDQVKQEILQASGELSHVHIQSMLRRWFVETEGAVKAYLWDNNQVVVQWLEQHWQAGDGPRSTIRENITYLKHDSVLKTIRGLVEENPEVAVDCVIYLSQHISPAERAQVVHLLSTMDSPAST

SEQ ID NO: 844269 - protein, 1124 aa, Homo sapiens
MTVPISITNPDLLRHSTELFMDSGFSPLCQRMGAMVAFRRFEDFTRNFDEVISCFANVPKDTPLFSEARTSLYSEDDCKSLREEPIHILNVSIQCADHLEDEALVPILRTFVQSKKNILVDYGLRRITFLIAQEKEFPKFFTFRARDEFAEDRIYRHLEPALAFQLELNRMRNFDLTAVPCANHKMHLYLGAAKVKEGVEVTDHRFFIRAIIRHSDLITKEASFEYLQNEGERLLLEAMDELEVAFNNTSVRTDCNHIFLNFVPTVIMDPFKIEESVRYMVMRYGSRLWKLRVLQAEVKINIRQTTTGSAVPIRLFITNESGYYLDISLYKEVTDSRSGNIMFHSFGNKQGPQHGMLINTPYVTKDLLQAKRFQAQTLGTTYIYDFPEMFRQALFKLWGSPDKYPKDILTYTELVLDSQGQLVEMNRLPGGNEVGMVAFKMRFKTQEYPEGRDVIVIGNDITFRIGSFGPGEDLLYLRASEMARAEGIPKIYVAANSGARIGMAEEIKHMFHVAWVDPEDPHKGFKYLYLTPQDYTRISSLNSVHCKHIEEGGESRYMITDIIGKDDGLGVENLRGSGMIAGESSLAYEEIVTISLVTCRAIGIGAYLVRLGQRVIQVENSHIILTGASALNKVLGREVYTSNNQLGGVQIMHYNGVSHITVPDDFEGVYTILEWLSYMPKDNHSPVPIITPTDPIDREIEFLPSRAPYDPRWMLAGRPHPTLKGTWQSGFFDHGSFKEIMAPWAQTVVTGRARLGGIPVGVIAVETRTVEVAVPADPANLDSEAKIIQQAGQVWFPDSAYKTAQAIKDFNREKLPLMIFANWRGFSGGMKDMYDQVLKFGAYIVDGLRQYKQPILIYIPPYAELRGGSWVVIDATINPLCIEMYADKESRGGVLEPEGTVEIKFRKKDLIKSMRRIDPAYKKLMEQLGEPDLSDKDRKDLEGRLKAREDLLLPIYHQVAVQFADFHDTPGRMLEKGVISDILEWKTARTFLYWRLRRLLLEDQVKQEILQASGELSHVHIQSMLRRWFVETEGAVKAYLWDNNQVVVQWLEQHWQAGDGPRSTIRENITYLKHDSVLKTIRGLVEENPEVAVDCVIYLSQHISPAERAQVVHLLSTMDSPAST

SEQ ID NO: 844270 - protein, 419 aa, Homo sapiens
MTVPISITNPDLLRHSTELFMDSGFSPLCQRMGAMVAFRRFEDFTRNFDEVISCFANVPKDTPLFSEARTSLYSEDDCKSLREEPIHILNVSIQCADHLEDEALVPILRTFVQSKKNILVDYGLRRITFLIAQEKEFPKFFTFRARDEFAEDRIYRHLEPALAFQLELNRMRNFDLTAVPCANHKMHLYLGAAKVKEGVEVTDHRFFIRAIIRHSDLITKEASFEYLQNEGERLLLEAMDELEVAFNNTSVRTDCNHIFLNFVPTVIMDPFKIEESVRYMVMRYGSRLWKLRVLQAEVKINIRQTTTGSAVPIRLFITNESGYYLDISLYKEVTDSRSGNIMFHSFGNKQGPQHGMLINTPYVTKDLLQAKRFQAQTLGTTYIYDFPEMFRQASPAAQTRYPLGPPSRLHQNQSPSLIL

SEQ ID NO: 844271 - protein, 106 aa, Homo sapiens
IVTKFSWKFPSLCGFFPVPLAALPKDFCKTKSEVTSLGTESPQGSSYCFFYPCISLSSLNLSQLQEGRDFNLGNKSTEHEISEGVWDTSWLHKNPFTIVPASLSSK

SEQ ID NO: 844272 - protein, 106 aa, Homo sapiens
MENQAHNTMGTSPCEAELQELMEQIDIMVSNKKMDWERKMRALETRLDLRDQELANAQTCLDQKGQEVGLLRQKLDSLEKCNLAMTQNYEGQLQSLKAQVRKLIII

SEQ ID NO: 844273 - protein, 181 aa, Homo sapiens
MENQAHNTMGTSPCEAELQELMEQIDIMVSNKKMDWERKMRALETRLDLRDQELANAQTCLDQKGQEVGLLRQKLDSLEKCNLAMTQNYEGQLQSLKAQFSKLTNNFEKLRLHQMKQNKVPRKELPHLKEEIPFELSNLNQKLEEFRAKSREWDKQEILYQTHLISLDAQQKLLSEKCNQF

SEQ ID NO: 844274 - protein, 69 aa, Homo sapiens
AVLSLEFGQTTNGDRVLGSGPAGTATPPRDSLSLPLTIAGAHGLLTTCQVLLSLDQPLRQQVLPLPPGH

SEQ ID NO: 844275 - protein, 69 aa, Homo sapiens; identical to SEQ ID NO: 844274

SEQ ID NO: 844276 - protein, 201 aa, Homo sapiens
CTGEIEDLHCLYSMQPIGRQLIAKEGNTLLLFAINSRRQHMVEFLLKNQANIHAVDNFKRTALILAVQHNLSSIVTLLLQQNIHISSQDMFGQTAEDYAFCCDLRSIQQQILEHKNKMLKNHLRNDNQETAAMKPDTLDPTRTTQEHNGQPQDTAGAQAEHNLKVASEEKDQDRLGRKLTPQGQRDLDRIAGQVAAANKKH

SEQ ID NO: 844277 - protein, 124 aa, Homo sapiens
AERLLSHHANIEALNKEGNTLLLFAINSRRQHMVEFLLKNQANIHAVDNFKRTALILAVQHNLSSIVTLLLQQNIHISSQDMFGQTAEDYAFCCDLRSIQQQILEHKNKMLKNHLRNDNQKQQL

SEQ ID NO: 844278 - protein, 132 aa, Homo sapiens
EAAAMKNESFKTQGASSKVSLYHQSGVQWHDLRLLQPSPPRFKQFSCLSLPRSWDNRHMRPCPETAAMKPENLKKRKKRKKLKKRKEGAKEHNLKVASEEKDQDRLGRKLTPQGQRDLDRIAGQVAAANKKH

SEQ ID NO: 844279 - protein, 104 aa, Homo sapiens
PLTEFPPLTEFQELLPGIGITGSYSVSESPFFSPIHLHSNVAWTVEDPVDSAPPGQRKKEQWYAGINPSDGINSEVLEAIRVTRHKNAMAERWESRIYASEEDD

SEQ ID NO: 844280 - protein, 679 aa, Homo sapiens
MDRVTRYPILGIPQAHRGTGLVLDGDTSYTYHLVCMGPEASGWGQDEPQTWPTDHRAQQGVQRQGVSYSVHAYTGQPSPRGLHSENREDEGWQVYRLGARDAHQGRPTWALRPEDGEDKEMKTYRLDAGDADPRRLCDLERERWAVIQGQAVRKSSTVATLQGTPDHGDPRTPGPPRSTPLEENVVDREQIDFLAARQQFLSLEQANKGAPHSSPARGTPAGTTPGASQAPKAFNKPHLANGHVVPIKPQVKGVVREENKVRAVPTWASVQVVDDPGSLASVESPGTPKETPIEREIRLAQEREADLREQRGLRQATDHQELVEIPTRPLLTKLSLITAPRRERGRPSLYVQRDIVQETQREEDHRREGLHVGRASTPDWVSEGPQPGLRRALSSDSILSPAPDARAADPAPEVRKVNRIPPDAYQPYLSPGTPQLEFSAFGAFGKPSSLSTAEAKAATSPKATMSPRHLSESSGKPLSTKQEASKPPRGCPQANRGVVRWEYFRLRPLRFRAPDEPQQAQVPHVWGWEVAGAPALRLQKSQSSDLLERERESVLRREQEVAEERRNALFPEVFSPTPDENSDQNSRSSSQASGITGSYSVSESPFFSPIHLHSNVAWTVEDPVDSAPPGQRKKEQWYAGINPSDGINSEVLEAIRVTRHKNAMAERWESRIYASEEDD

SEQ ID NO: 844281 - protein, 229 aa, Homo sapiens
MGDPNSRKKQALNRLRAQLRKKKESLADQFDFKMYIAFVFKEKKKKSALFEVSEVIPVMTNNYEENILKGVRDSSYSLESSLELLQKDVVQLHAPRYQSMRRDVIGCTQEMDFILWPRNDIEKIVCLLFSRWKESDEPFRPVQAKFEFHHGDYEKQFLHVLSRKDKTGIVVNNPNQSVFLFIDRQHLQTPKNKATIFKLCSICLYLPQEQLTHWAVGTIEDHLRPYMPE

SEQ ID NO: 844282 - protein, 229 aa, Homo sapiens; identical to SEQ ID NO: 844281

SEQ ID NO: 844283 - protein, 229 aa, Homo sapiens; identical to SEQ ID NO: 844281

SEQ ID NO: 844284 - protein, 229 aa, Homo sapiens; identical to SEQ ID NO: 844281

SEQ ID NO: 844285 - protein, 229 aa, Homo sapiens; identical to SEQ ID NO: 844281

SEQ ID NO: 844286 - protein, 229 aa, Homo sapiens; identical to SEQ ID NO: 844281

SEQ ID NO: 844287 - protein, 113 aa, Homo sapiens [sequence omitted]

SEQ ID NO: 844288 - protein, 229 aa, Homo sapiens; identical to SEQ ID NO: 844281

SEQ ID NO: 844289 - protein, 149 aa, Homo sapiens
MGDPNSRKKQALNRLRAQLRKKKESLADQFDFKMYIAFVFKEKKKKSALFEVSEVIPVMTNNYEENILKGVRDSSYSLESSLELLQKDVVQLHAPRYQSMRRDVIGCTQEMDFILWPRNDIEKIVCLLFSRWKESDEPFRPVQVFWSKV

SEQ ID NO: 844290 - protein, 229 aa, Homo sapiens; identical to SEQ ID NO: 844281

SEQ ID NO: 844291 - protein, 160 aa, Homo sapiens
MGDPNSRKKQALNRLRAQLRKKKESLADQFDFKMYIAFVFKEKKKKSALFEVSEVIPVMTNNYEENILKGVRDSSYSLESSLELLQKDVVQLHAPRYQSMRRDVIGCTQEMDFILWPRNDIEKIVCLLFSRWKESDEPFRPVQWFDDKNPIWAGRGCSRL

SEQ ID NO: 844292 - protein, 160 aa, Homo sapiens; identical to SEQ ID NO: 844291

SEQ ID NO: 844293 - protein, 733 aa, Homo sapiens
NVGAKQHGREAAAACRALSSGTLDFRTLSAMALPLLPGNSFNRNVKGDGSDVPSWVAFDKQVLSFDAYLEEEVLDKSQTNYRIRYYKIYFYPEDDTIQVNEPEVKNSGLLQGTSIRRHRITLPPPDEDQFYTVYHFNVGTEVVFYGRTFKIYDCDAFTRNFLRKIGVKVNPPVQCPEDPYMKIRREVVEHVEPLRPYESLDTLKQFLQYHGKILCFFCLWDDSVSMFGDRRELILHYFLCDDTIEIKELLPHSSGRDALKMFLRRSKLPKNCPPRVYQPGQITDRAVLNSYGDFIKNQADGYLFDRYKLGKVDQEFYKDSDLSLGVTINVWGRKVLLYDCDEFTKSYYKSKYGIENFTSVSCKPPSPPPKIERKFPPYNGFGSEEDSLRNCIDLKPTPHRRNFKKFMEKDSYGSKSNILRFFCKLVTDKCVDLDRMFVISYYLGDDTISVFEPIERNSGIAGGMFLKRSRVKKPGQEVFKSELSEYIKAEELYIGVTVNVNGYLFRLLNADEYTLNYMEQNTDKYPFSNLKLALQKLKQEEGKSRELKQVFKAADSKHTNMVDYNTFRDILMSLTVGNLAEQEFVTIARHYRVPEGTCSDMDFLIALAHEKFKKNMFENFDTFIYSCVYEDREKKNVLPTKDIKRLCKSSRLPLSDDLLESLLSRFEDSEKQIDYKSFFSALNWRKNPVPELQPASYLKERCEDVWLGMPSPIPAKYIDYWTFLKDAFGLEEE

SEQ ID NO: 844294 - protein, 469 aa, Homo sapiens
FDFVFQNCPPRVYQPGQITDRAVLNSYGDFIKNQADGYLFDRYKLGKVDQEFYKDSDLSLGVTINVWGRKVLLYDCDEFTKSYYKSKYGIENFTSVSCKPPSPPPKIERKFPPYNGFGSEEDSLRNCIDLKPTPHRRNFKKFMEKDSYGSKSNILRFFAKLVTDKCVDLDRMFVISYYLGDDTISVFEPIERNSGIAGGMFLKRSRVKKPGQEVFKSELSEYIKAEELYIGVTVNVNGYLFRLLNADEYTLNYMEQNTDKYPFSNLKLALQKLKQEEGKSRELKQVFKAADSKHTNMVDYNTFRDILMSLTVGNLAEQEFVTIARHYRVPEGTCSDMDFLIALAHEKFKKNMFENFDTFIYSCVYEDREKKNVLPTKDIKRLCKSSRLPLSDDLLESLLSRFEDSEKQIDYKSFFSALNWRKNPVPELQPASYLKERCEDVWLGMPSPIPAKYIDYWTFLKDAFGLEEE

SEQ ID NO: 844295 - protein, 162 aa, Homo sapiens
MSLTVGNLAEQEFVTIARHYRVPEGTCSDMDFLIALAHEKFKKNMFENFDTFIYSCVYEDREKKNVLPTKDIKRLCKSSRLPLSDDLLESLLSRFEDSEKQIDYKSFFSALNWRKNPVPELQPASYLKERCEDVWLGMPSPIPAKYIDYWTFLKDAFGLEEE

SEQ ID NO: 844296 - protein, 779 aa, Homo sapiens
RGGQTTRPGGGRCLPGPLFWDPGFSDTERHGPASAAGQQLQPQRVGKEKFHKSQHWGFCNNVMMLVSDEKPGIGGEPLLGQKIKPKCSIYPKGDGSDVPSWVAFDKQVLSFDAYLEEEVLDKSQTNYRIRYYKIYFYPEDDTIQVNEPEVKNSGLLQGTSIRRHRITLPPPDEDQFYTVYHFNVGTEVVFYGRTFKIYDCDAFTRNFLRKIGVKVNPPVQCPEDPYMKIRREVVEHVEPLRPYESLDTLKQFLQYHGKILCFFCLWDDSVSMFGDRRELILHYFLCDDTIEIKELLPHSSGRDALKMFLRRSKLPKNCPPRVYQPGQITDRAVLNSYGDFIKNQADGYLFDRYKLGKVDQEFYKDSDLSLGVTINVWGRKVLLYDCDEFTKSYYKSKYGIENFTSVSCKPPSPPPKIERKFPPYNGFGSEEDSLRNCIDLKPTPHRRNFKKFMEKDSYGSKSNILRFFCKLVTDKCVDLDRMFVISYYLGDDTISVFEPIERNSGIAGGMFLKRSRVKKPGQEVFKSELSEYIKAEELYIGVTVNVNGYLFRLLNADEYTLNYMEQNTDKYPFSNLKLALQKLKQEEGKSRELKQVFKAADSKHTNMVDYNTFRDILMSLTVGNLAEQEFVTIARHYRVPEGTCSDMDFLIALAHEKFKKNMFENFDTFIYSCVYEDREKKNVLPTKDIKRLCKSSRLPLSDDLLESLLSRFEDSEKQIDYKSFFSALNWRKNPVPELQPASYLKERCEDVWLGMPSPIPAKYIDYWTFLKDAFGLEEE

SEQ ID NO: 844297 - protein, 349 aa, Homo sapiens
MGDMGDPPKKKRLISLCVGCGNQIHDQYILRVSPDLEWHAACLKCAECNQYLDESCTCFVRDGKTYCKRDYIRLYGIKCAKCSIGFSKNDFVMRARSKVYHIECFRCVACSRQLIPGDEFALREDGLFCRADHDVVERASLGAGDPLSPLHPARPLQMAAEPISARQPALRPHVHKQPEKTTRVRTVLNEKQLHTLRTCYAANPRPDALMKEQLVEMTGLSPRVIRVWFQNKRCKDKKRSIMMKQLQQQQPNDKTNIQGMTGTPMVAASPERHDGGLQANPVEVQSYQPPWKVLSDFALQSDIDQPAFQQLVNFSEGGPGSNSTGSEVASMSSQLPDTPNSMVASPIEA

SEQ ID NO: 844298 - protein, 349 aa, Homo sapiens; identical to SEQ ID NO: 844297

SEQ ID NO: 844299 - protein, 74 aa, Homo sapiens
ADTISTSVQSEIDSLLFSNVVNFSEGGPGSNSTGSEVASMSSQLPDTRGKRSDWISNPNKLPVHFWGKSRAILP

SEQ ID NO: 844300 - protein, 285 aa, Homo sapiens
MEPIKIVPWLYGIKCAKCSIGFSKNDFVMRARSKVYHIECFRCVACSRQLIPGDEFALREDGLFCRADHDVVERASLGAGDPLSPLHPARPLQMAAEPISARQPALRPHVHKQPEKTTRVRTVLNEKQLHTLRTCYAANPRPDALMKEQLVEMTGLSPRVIRVWFQNKRCKDKKRSIMMKQLQQQQPNDKTNIQGMTGTPMVAASPERHDGGLQANPVEVQSYQPPWKVLSDFALQSDIDQPAFQQLVNFSEGGPGSNSTGSEVASMSSQLPDTPNSMVASPIEA

SEQ ID NO: 844301 - protein, 145 aa, Homo sapiens
MAKSLRSKWKRKMRAEKRKKNAPKEASRLKSILKLDGDVLMKDVQEIATVVVPKPKHCQEKMQCEVKDEKDDMKMETDIKRNKKTLLDQHGQYPIWMNQRQRKRLKAKREKRKKKKKKKKIVGGAWAPEKNLLENLCAGGRRAGP

SEQ ID NO: 844302 - protein, 129 aa, Homo sapiens
MAKSLRSKWKRKMRAEKRKKNAPKEASRLKSILKLDGDVLMKDVQEIATVVVPKPKHCQEKMQCEVKDEKDDMKMETDIKRNKKTLLDQHGQYPIWMNQRQRKRLKAKREKRKGKSKAKAVKVAKGLAW

SEQ ID NO: 844303 - protein, 129 aa, Homo sapiens; identical to SEQ ID NO: 844302

SEQ ID NO: 844304 - protein, 88 aa, Homo sapiens
RLRIQLVPRSFIPSITPQVCFGNLNKIFSLIHPSSTDTLTGCYPISSYNQASTFCQVLIWLELFLQLVIIVNRDKTDDVLTNFCELRF

SEQ ID NO: 844305 - protein, 129 aa, Homo sapiens; identical to SEQ ID NO: 844302

SEQ ID NO: 844306 - protein, 129 aa, Homo sapiens; identical to SEQ ID NO: 844302

SEQ ID NO: 844307 - protein, 103 aa, Homo sapiens
MAKSLRSKWKRKMRAEKRKKNAPKEASRLKSILKLDGDVLMKDVQEIATVVVPKPKHCQEKMQCEVKDEKDDMKMETDIKRNKKTLLDQHGQYPPPPQKKKFF

SEQ ID NO: 844308 - protein, 102 aa, Homo sapiens
MAKSLRSKWKRKMRAEKRKKNAPKEASRLKSILKLDGDVLMKDVQEIATVVVPKPKHCQEKMQCEVKDEKEKKKKKKNFVGGLGPGKEFYRDPFRVGAPRGA

SEQ ID NO: 844309 - protein, 413 aa, Homo sapiens
DGSHILTVGVGANIFMYGRLSGIVTEQTNSKDGVAVITLPLGGSIKQGVKSRWVLLRSIDLVSSVDGTPSLPVSLSWVRDGILVVGMDCEMHVYAQWKHAVKFGDTEADSSNAEEAAMQDHSTFKSNMLARKSVVEGTAISDDVFCSPTVIQDGGLFEAAHVLSPTLPQYHPTQLLELMDLGKVRRAKAILSHLVKCIAGEVAIVRDPDAGEGTKRHLSRTISVSGSTAKETVTVGKDGTRDYTEIDSIPPLPLYALLAADQDTSYRISEESTKIPQSYEDQTVSQPEDQYSELFQIQDIPTDDIDLEPEKRENKSKVINLSQYGPAYFGQEHARVLSSHLMHSSLPGLTRLEQMFLVALADTVATTSTELDESRDKSCSGRDTLDECGLRYLLAMRLHTCLLTSLPPLYRVQ

SEQ ID NO: 844310 - protein, 124 aa, Homo sapiens
STGLVHRDNNTFNTLCSAPEELNTECLEQETGERSCSLLRLHKTEDMKRGNMHECPHGEPPPPAAPALMITPIINWGMALCLVLALHGPRTLHRTQRGTRKEEAIRLGTHVLEAHSLDKVSHTL

SEQ ID NO: 844311 - protein, 72 aa, Homo sapiens
HKHVDVLLLCLSEVNLYDVFKKWIIEKVNELMKNESKEKKGGNNAGSEIEVKVNGVMEETANRGNANTAMVQ

SEQ ID NO: 844312 - protein, 110 aa, Homo sapiens
MCLSFYVHHVRKADCIHGYETVGLCWTMKTSPKYVKTDKRRPPFIFFKVKALKERCNRRPPWSVNYFMRDHPSRKCSQVQWLMPVIPALWEVEAGGSLEVRRYRPAWQTR

SEQ ID NO: 844313 - protein, 1246 aa, Homo sapiens
MPAPGALILLAAVSASGCLASPAHPDGFALGRAPLAPPYAVVLISCSGLLAFIFLLLTCLCCKRGDVGFKEFENPEGEDCSGEYTPPAEETSSSQSLPDVYILPLAEVSLPMPAPQPSHSDMTTPLGLSRQHLSYLQEIGSGWFGKVILGEIFSDYTPAQVVVKELRASAGPLEQRKFISEAQPYRSLQHPNVLQCLGLCVETLPFLLIMEFCQLGDLKRYLRAQRPPEGLSPELPPRDLRTLQRMGLEIARGLAHLHSHNYVHSDLALRNCLLTSDLTVRIGDYGLAHSNYKEDYYLTPERLWIPLRWAAPELLGELHGTFMVVDQSRESNIWSLGVTLWELFEFGAQPYRHLSDEEVLAFVVRQQHVKLARPRLKLPYADYWYDILQSCWRPPAQRPSASDLQLQLTYLLSERPPRPPPPPPPPRDGPFPWPWPPAHSAPRPGTLSSPFPLLDGFPGADPDDVLTVTESSRGLNLECLWEKARRGAGRGGGAPAWQPASAPPAPHANPSNPFYEALSTPSVLPVISARSPSVSSEYYIRLEEHGSPPEPLFPNDWDPLDPGVPAPQAPQAPSEVPQLVSETWASPLFPAPRPFPAQSSASGSFLLSGWDPEGRGAGETLAGDPAEVLGERGTAPWVEEEEEEEEGSSPGEDSSSLGGGPSRRGPLPCPLCSREGACSCLPLERGDAVAGWGGHPALGCPHPPEDDSSLRAERGSLADLPMAPPASAPPEFLDPLMGAAAPQYPGRGPPPAPPPPPPPPRAPADPAASPDPPSAVASPGSGLSSPGPKPGDSGYETETPFSPEGAFPGGGAAEEEGVPRPRAPPEPPDPGAPRPPPDPGPLPLPGPREKPTFVVQVSTEQLLMSLREDVTRNLLGEKGATARETGPRKAGRGPGNREKVPGLNRDPTVLGNGKQAPSLSLPVNGVTVLENGDQRAPGIEEKAAENGALGSPEREEKVLENGELTPPRREEKALENGELRSPEAGEKVLVNGGLTPPKSEDKVSENGGLRFPRNTERPPETGPWRAPGPWEKTPESWGPAPTIGEPAPETSLERAPAPSAVVSSRNGGETAPGPLGPAPKNGTLEPGTERRAPETGGAPRAPGAGRLDLGSGGRAPVGTGTAPGGGPGSGVDAKAGWVDNTRPQPPPPPLPPPPEAQPRRLEPAPPRARPEVAPEGEPGAPDSRAGGDTALSGDGDPPKPERKGPEMPRLFLDLGPPQGNSEQIKGEEAAGHSQGRGPAVSEACGG

SEQ ID NO: 844314 - protein, 1131 aa, Homo sapiens
VCVTARETRHHLHLPAILDKMPAPGALILLAAVSASGCLASPAHPDGFALGRAPLAPPYAVVLISCSGLLAFIFLLLTCLCCKRGDVGFKEFENPEGEDCSGEYTPPAEETSSSQSLPDVYILPLAEVSLPMPAPQPSHSDMTTPLGLSRQHLSYLQEIGSGWFGKVILGEIFSDYTPAQVVVKELRASAGPLEQRKFISEAQPYRSLQHPNVLQCLGLCVETLPFLLIMEFCQLGDLKRYLRAQRPPEGLSPELPPRDLRTLQRMGLEIARGLAHLHSHNYVHSDLALRNCLLTSDLTVRIGDYGLAHSNYKEDYYLTPERLWIPLRWAAPELLGELHGTFMVVDQSRESNIWSLGVTLWELFEFGAQPYRHLSDEEVLAFVVRQQHVKLARPRLKLPYADYWYDILQSCWRPPAQRPSASDLQLQLTYLLSERPPRPPPPPPPPRDGPFPWPWPPAHSAPRPGTLSSPFPLLDGFPGADPDDVLTVTESSRGLNLECLWEKARRGAGRGGGAPAWQPASAPPAPHANPSNPFYEALSTPSVLPVISARSPSVSSEYYIRLEEHGSPPEPLFPNDWDPLDPGVPAPQAPQAPSEVPQLVSETWASPLFPAPRPFPAQSSASGSFLLSGWDPEGRGAGETLAGDPAEVLGERGTAPWVEEEEEEEEGSSPGEDSSSLGGGPSRRGPLPCPLCSREGACSCLPLERGDAVAGWGGHPALGCPHPPEDDSSLRAERGSLADLPMAPPASAPPEFLDPLMGAAAPQYPGRGPPPAPPPPPPPPRAPADPAASPDPPSAVASPGSGLSSPGPKPGDSGYETETPFSPEGAFPGGGAAEEEGVPRPRAPPEPPDPGAPRPPPDPGPLPLPGPREKPTFVVQVSTEQLLMSLREDVTRNLLGEKGATARETGPRKAGRGPGNREKVPGLNRDPTVLGNGKQAPSLSLPVNGVTVLENGDQRAPGIEEKAAENGALGSPEREEKVLENGELTPPRREEKALENGELRSPEAGEKVLVNGGLTPPKSEDKVSENGGLRFPRNTERPPETGPWRAPGPWEKTPESWGPAPTIGEPAPETSLERAPAPSAVVSSRNGGETAPGPLGPAPKNGTLEPGTERRPNEAGIPPPLHREPPFSELN

SEQ ID NO: 844315 - protein, 120 aa, Homo sapiens
LGPQPSPVPTDGFALGRAPLAPPYAVVLISCSGLLAFIFLLLTCLCCKRGDVGFKVRCMRGFNLGRKTPARPLPPTQVVGGEKGAVNPRAPSSLKLWQDLEPWDGEMGDGNWAGTGRQLQ

SEQ ID NO: 844316 - protein, 1480 aa, Homo sapiens
VCVTARETRHHLHLPAILDKMPAPGALILLAAVSASGCLASPAHPDGFALGRAPLAPPYAVVLISCSGLLAFIFLLLTCLCCKRGDVGFKEFENPEGEDCSGEYTPPAEETSSSQSLPDVYILPLAEVSLPMPAPQPSHSDMTTPLGLSRQHLSYLQEIGSGWFGKVILGEIFSDYTPAQVVVKELRASAGPLEQRKFISEAQPYRSLQHPNVLQCLGLCVETLPFLLIMEFCQLGDLKRYLRAQRPPEGLSPELPPRDLRTLQRMGLEIARGLAHLHSHNYVHSDLALRNCLLTSDLTVRIGDYGLAHSNYKEDYYLTPERLWIPLRWAAPELLGELHGTFMVVDQSRESNIWSLGVTLWELFEFGAQPYRHLSDEEVLAFVVRQQHVKLARPRLKLPYADYWYDILQSCWRPPAQRPSASDLQLQLTYLLSERPPRPPPPPPPPRDGPFPWPWPPAHSAPRPGTLSSPFPLLDGFPGADPDDVLTVTESSRGLNLECLWEKARRGAGRGGGAPAWQPASAPPAPHANPSNPFYEALSTPSVLPVISARSPSVSSEYYIRLEEHGSPPEPLFPNDWDPLDPGVPAPQAPQAPSEVPQLVSETWASPLFPAPRPFPAQSSASGSFLLSGWDPEGRGAGETLAGDPAEVLGERGTAPWVEEEEEEEEGSSPGEDSSSLGGGPSRRGPLPCPLCSREGACSCLPLERGDAVAGWGGHPALGCPHPPEDDSSLRAERGSLADLPMAPPASAPPEFLDPLMGAAAPQYPGRGPPPAPPPPPPPPRAPADPAASPDPPSAVASPGSGLSSPGPKPGDSGYETETPFSPEGAFPGGGAAEEEGVPRPRAPPEPPDPGAPRPPPDPGPLPLPGPREKPTFVVQVSTEQLLMSLREDVTRNLLGEKGATARETGPRKAGRGPGNREKVPGLNRDPTVLGNGKQAPSLSLPVNGVTVLENGDQRAPGIEEKAAENGALGSPEREEKVLENGELTPPRREEKALENGELRSPEAGEKVLVNGGLTPPKSEDKVSENGGLRFPRNTERPPETGPWRAPGPWEKTPESWGPAPTIGEPAPETSLERAPAPSAVVSSRNGGETAPGPLGPAPKNGTLEPGTERRAPETGGAPRAPGAGRLDLGSGGRAPVGTGTAPGGGPGSGVDAKAGWVDNTRPQPPPPPLPPPPEAQPRRLEPAPPRARPEVAPEGEPGAPDSRAGGDTALSGDGDPPKPERKGPEMPRLFLDLGPPQGNSEQIKARLSRLSLALPPLTLTPFPGPGPRRPPWEGADAGAAGGEAGGAGAPGPAEEDGEDEDEDEEEDEEAAAPGAAAGPRGPGRARAAPVPVVVSSADADAARPLRGLLKSPRGADEPEDSELERKRKMVSFHGDVTVYLFDQETPTNELSVQAPPEGDTDPSTPPAPPTPPHPATPGDGFPSNDSGFGGSFEWAEDFPLLPPPGPPLCFSRFSVSPALETPGPPARAPDARPAGPVEN

SEQ ID NO: 844317 - protein, 174 aa, Homo sapiens
VCVTARETRHHLHLPAILDKMPAPGALILLAAVSASGCLASPAHPDGFALGRAPLAPPYAVVLISCSGLLAFIFLLLTCLCCKRGDVGFKEFENPEGEDCSGEYTPPAEETSSSQSLPDVYILPLAEVSLPMPAPQPSHSDMTTPLGLSRQHLSYLQEIGSGWFGKSAPPSSLH

SEQ ID NO: 844318 - protein, 776 aa, Homo sapiens
AKIKDSMPLLEKNEPKMSEAKNYLSSILNHGRLSPQYMCEAMLILGKLHYVEGSYRDAISMYARAGIDDMSMENKPLYQMRLLSEAFVIKGLSLERLPNSIASRFRLTEREEEVITCFERASWIAQVFLQELEKTTNNSTSRHLKGCHPLDYELTYFLEAALQSAYVKNLKKGNIVKGMRELREVLRTVETKATQNFKVMAAKHLAGVLLHSLSEECYWSPLSHPLPEFMGKEESSFATQALRKPHLYEGDNLYCPKDNIEEALLLLLISESMATRDVVLSRVPEQEEDRTVSLQNAAAIYDLLSITLGRRGQYVMLSECLERAMKFAFGEFHLWYQVALSMVACGKSAYAVSLLRECVKLRPSDPTVPLMAAKVCIGSLRWLEEAEHFAMMVISLGEEAGEFLPKGYLALGLTYSLQATDATLKSKQDELHRKALQTLERAQQLAPSDPQVILYVSLQLALVRQISSAMEQLQEALKVRKDDAHALHLLALLFSAQKHHQHALDVVNMAITEHPENFNLMFTKVKLEQVLKGPEEALVTCRQVLRLWQTLYSFSQLGGLEKDGSFGEGLTMKKQSGMHLTLPDAHDADSGSRRASSIAASRLEEAMSELTMPSSVLKQGPMQLWTTLEQIWLQAAELFMEQQHLKEAGFCIQEAAGLFPTSHSVLYMRGRLAEVKGNLEEAKQLYKEALTVNPDGVRIMHSLGLMLSRLGHKSLAQKVLRDAVERQSTCHEAWQGLGEVLQAQGQNEAAVDCFLTALELEASSPVLPFSIIPREL

SEQ ID NO: 844319 - protein, 748 aa, Homo sapiens
MSLSFQPQYMCEAMLILGKLHYVEGSYRDAISMYARAGIDDMSMENKPLYQMRLLSEAFVIKGLSLERLPNSIASRFRLTEREEEVITCFERASWIAQVFLQELEKTTNNSTSRHLKGCHPLDYELTYFLEAALQSAYVKNLKKGNIVKGMRELREVLRTVETKATQNFKVMAAKHLAGVLLHSLSEECYWSPLSHPLPEFMGKEESSFATQALRKPHLYEGDNLYCPKDNIEEALLLLLISESMATRDVVLSRVPEQEEDRTVSLQNAAAIYDLLSITLGRRGQYVMLSECLERAMKFAFGEFHLWYQVALSMVACGKSAYAVSLLRECVKLRPSDPTVPLMAAKVCIGSLRWLEEAEHFAMMVISLGEEAGEFLPKGYLALGLTYSLQATDATLKSKQDELHRKALQTLERAQQLAPSDPQVILYVSLQLALVRQISSAMEQLQEALKVRKDDAHALHLLALLFSAQKHHQHALDVVNMAITEHPENFNLMFTKVKLEQVLKGPEEALVTCRQVLRLWQTLYSFSQLGGLEKDGSFGEGLTMKKQSGMHLTLPDAHDADSGSRRASSIAASRLEEAMSELTMPSSVLKQGPMQLWTTLEQIWLQAAELFMEQQHLKEAGFCIQEAAGLFPTSHSVLYMRGRLAEVKGNLEEAKQLYKEALTVNPDGVRIMHSLGLMLSRLGHKSLAQKVLRDAVERQSTCHEAWQGLGEVLQAQGQNEAAVDCFLTALELEASSPVLPFSIIPREL

SEQ ID NO: 844320 - protein, 776 aa, Homo sapiens; identical to SEQ ID NO: 844318

SEQ ID NO: 844321 - protein, 776 aa, Homo sapiens; identical to SEQ ID NO: 844318

SEQ ID NO: 844322 - protein, 305 aa, Homo sapiens
AKIKDSMPLLEKNEPKMSEAKNYLSSILNHGRLSPQYMCEAMLILGKLHYVEGSYRDAISMYARAGIDDMSMENKPLYQMRLLSEAFVIKGLSLERLPNSIASRFRLTEREEEVITCFERASWIAQVFLQELEKTTNNSTSRHLKGCHPLDYELTYFLEAALQSAYVKNLKKGNIVKGMRELREVLRTVETKATQNFKVMAAKHLAGVLLHSLSEECYWSPLSHPLPEFMGKEESSFATQALRKPHLYEGDNLYCPKDNIEEALLLLLISESMATRDVVLSRVPEQEEDRSITSALGRSTSSLRP

SEQ ID NO: 844323 - protein, 105 aa, Homo sapiens
QQRWGETEAHRESKRSRGMAEAAALMALCFLRVREVSMWSRPGGAGSPGESGPLLGCADGHSPSPQPDVHQGEAGAGAERPRGSPRDLQTSAEAVADPVQLLPAG

SEQ ID NO: 844324 - protein, 708 aa, Homo sapiens
SFQHASGFLGEHSPGGQRSCRGGLSLERLPNSIASRFRLTEREEEVITCFERASWIAQVFLQELEKTTNNSTSRHLKGCHPLDYELTYFLEAALQSAYVKNLKKGNIVKGMRELREVLRTVETKATQNFKVMAAKHLAGVLLHSLSEECYWSPLSHPLPEFMGKEESSFATQALRKPHLYEGDNLYCPKDNIEEALLLLLISESMATRDVVLSRVPEQEEDRTVSLQNAAAIYDLLSITLGRRGQYVMLSECLERAMKFAFGEFHLWYQVALSMVACGKSAYAVSLLRECVKLRPSDPTVPLMAAKVCIGSLRWLEEAEHFAMMVISLGEEAGEFLPKGYLALGLTYSLQATDATLKSKQDELHRKALQTLERAQQLAPSDPQVILYVSLQLALVRQISSAMEQLQEALKVRKDDAHALHLLALLFSAQKHHQHALDVVNMAITEHPENFNLMFTKVKLEQVLKGPEEALVTCRQVLRLWQTLYSFSQLGGLEKDGSFGEGLTMKKQSGMHLTLPDAHDADSGSRRASSIAASRLEEAMSELTMPSSVLKQGPMQLWTTLEQIWLQAAELFMEQQHLKEAGFCIQEAAGLFPTSHSVLYMRGRLAEVKGNLEEAKQLYKEALTVNPDGVRIMHSLGLMLSRLGHKSLAQKVLRDAVERQSTCHEAWQGLGEVLQAQGQNEAAVDCFLTALELEASSPVLPFSIIPREL

SEQ ID NO: 844325 - protein, 735 aa, Homo sapiens
MLILGKLHYVEGSYRDAISMYARAGIDDMSMENKPLYQMRLLSEAFVIKGLSLERLPNSIASRFRLTEREEEVITCFERASWIAQVFLQELEKTTNNSTSRHLKGCHPLDYELTYFLEAALQSAYVKNLKKGNIVKGMRELREVLRTVETKATQNFKVMAAKHLAGVLLHSLSEECYWSPLSHPLPEFMGKEESSFATQALRKPHLYEGDNLYCPKDNIEEALLLLLISESMATRDVVLSRVPEQEEDRTVSLQNAAAIYDLLSITLGRRGQYVMLSECLERAMKFAFGEFHLWYQVALSMVACGKSAYAVSLLRECVKLRPSDPTVPLMAAKVCIGSLRWLEEAEHFAMMVISLGEEAGEFLPKGYLALGLTYSLQATDATLKSKQDELHRKALQTLERAQQLAPSDPQVILYVSLQLALVRQISSAMEQLQEALKVRKDDAHALHLLALLFSAQKHHQHALDVVNMAITEHPENFNLMFTKVKLEQVLKGPEEALVTCRQVLRLWQTLYSFSQLGGLEKDGSFGEGLTMKKQSGMHLTLPDAHDADSGSRRASSIAASRLEEAMSELTMPSSVLKQGPMQLWTTLEQIWLQAAELFMEQQHLKEAGFCIQEAAGLFPTSHSVLYMRGRLAEVKGNLEEAKQLYKEALTVNPDGVRIMHSLGLMLSRLGHKSLAQKVLRDAVERQSTCHEAWQGLGEVLQAQGQNEAAVDCFLTALELEASSPVLPFSIIPREL

SEQ ID NO: 844326 - protein, 737 aa, Homo sapiens
AKIKDSMPLLEKNEPKMSEAKNYLSSILNHGRLSPQYMCEAMLILGKLHYVEGSYRDAISMYARAGIDDMSMENKPLYQMRLLSEAFVIKGLSLERLPNSIASRFRLTEREEEVITCFERASWIAQVFLQELEKTTNNSTSRHLKGCHPLDYELTYFLEAALQSAYVKNLKKGNIVKGMRELREVLRTVETKATQNFKVMAAKHLAGVLLHSLSEECYWSPLSHPLPEFMGKEESSFATQALRKPHLYEGDNLYCPKDNIEEALLLLLISESMATRDVVLSRVPEQEEDRTVSLQNAAAIYDLLSITLGRRGQYVMLSECLERAMKFAFGEFHLWYQVALSMVACGKSAYAVSLLRECVKLRPSDPTVPLMAAKVCIGSLRWLEEAEHFAMMVISLGEEAGEFLPKGYLALGLTYSLQATDATLKSKQDELHRKALQTLERAQQLAPSDPQVILYVSLQLALVRQISSAMEQLQEALKVRKDDAHALHLLALLFSAQKHHQHALDVVNMAITEHPENFKGLEKDGSFGEGLTMKKQSGMHLTLPDAHDADSGSRRASSIAASRLEEAMSELTMPSSVLKQGPMQLWTTLEQIWLQAAELFMEQQHLKEAGFCIQEAAGLFPTSHSVLYMRGRLAEVKGNLEEAKQLYKEALTVNPDGVRIMHSLGLMLSRLGHKSLAQKVLRDAVERQSTCHEAWQGLGEVLQAQGQNEAAVDCFLTALELEASSPVLPFSIIPREL

SEQ ID NO: 844327 - protein, 776 aa, Homo sapiens; identical to SEQ ID NO: 844318

SEQ ID NO: 844328 - protein, 181 aa, Homo sapiens
MGYRDPRRSRTRGELTMPSSVLKQGPMQLWTTLEQIWLQAAELFMEQQHLKEAGFCIQEAAGLFPTSHSVLYMRGRLAEVKGNLEEAKQLYKEALTVNPDGVRIMHSLGLMLSRLGHKSLAQKVLRDAVERQSTCHEAWQGLGEVLQAQGQNEAAVDCFLTALELEASSPVLPFSIIPREL

SEQ ID NO: 844329 - protein, 776 aa, Homo sapiens; identical to SEQ ID NO: 844318

SEQ ID NO: 844330 - protein, 195 aa, Homo sapiens
LFLPSLAPHNAPTNNTVTTGLIDGAVVSGIGSGERFFPPPSGLSYSSWFCIEHFSSPPNNHPVRLLTVVRRANSSEQHYVCLAIVLSAKDRSLIVSTKEELLQNYVDDFSEESSFYEILPCCARFRCGELIIEGQWHHLVLVMSKGMLKNSTAALYIDGQLVNTVKPSLMSTRLVGILGTFWGYRAFPFRKFQPR

SEQ ID NO: 844331 - protein, 181 aa, Homo sapiens
LFLPSLAPHNAPTNNTVTTGLIDGAVVSGIGSGERFFPPPSGLSYSSWFCIEHFSSPPNNHPVRLLTVVRRANSSEQHYVCLAIVLSAKDRSLIVSTKEELLQNYVDDFSEESSFYEILPCCARFRCGELIIEGQWHHLVLVMSKGMLKNSTAALYIDGQLVNTVKLHYVHSTPGGSGSAN

SEQ ID NO: 844332 - protein, 343 aa, Homo sapiens
MDNQAERESEAGVGLQRDEDDAPLCEDVELQDGDLSPEEKIFLREFPRLKEDLKGNIDKLRALADDIDKTHKKFTKANMVATSTAVISGVMSLLGLALAPATGGGSLLLSTAGQGLATAAGVTSIVSGTLERSKNKEAQARAEDILPTYDQEDREDEEEKADYVTAAGKIIYNLRNTLKYAKKNVRAFWKLRANPRLANATKRLLTTGQVSSRSRVQVQKAFAGTTLAMTKNARVLGGVMSAFSLGYDLATLSKEWKHLKEGARTKFAEELRAKALELERKLTELTQLYKSLQQKVRSRARGVGKDLTGTCETEAYWKELREHVWMWLWLCVCLCVCVYVQFT

SEQ ID NO: 844333 - protein, 343 aa, Homo sapiens; identical to SEQ ID NO: 844332

SEQ ID NO: 844334 - protein, 222 aa, Homo sapiens
MPKTMHFLFRFIVFFYLWGLFTAQRQKKEESTEEVKIEVLHRPENCSKTSKKGDLLNAHYDGYLAKDGSKFYCSRTQNEGHPKWFVLGVGQVIKGLDIAMTDMCPGEKRKVVIPPSFAYGKEGYAEGKIPPDATLIFEIELYAVTKGPRSIETFKQIDMDNDRQLSKAEINLYLQREFEKDEKPRDKSYQDAVLEDIFKKNDHDGDGFISPKEYNVYQHDEL

SEQ ID NO: 844335 - protein, 159 aa, Homo sapiens
AGQRLPRVGTRPRDIHGARVTRGRESSVLLEPMPKTMHFLFRFIVFFYLWGLFTAQRQKKEESTEEVKIEVLHRPENCSKTSKKGDLLNAHYDGYLAKDGSKFYCSRTQNEGHPKWFVLGVGQVIKGLDIAMTDMCPGEKRKVVIPPSFAYGKEGYGST

SEQ ID NO: 844336 - protein, 254 aa, Homo sapiens
AGQRLPRVGTRPRDIHGARVTRGRESSVLLEPMPKTMHFLFRFIVFFYLWGLFTAQRQKKEESTEEVKIEVLHRPENCSKTSKKGDLLNAHYDGYLAKDGSKFYCSRTQNEGHPKWFVLGVGQVIKGLDIAMTDMCPGEKRKVVIPPSFAYGKEGYAEGKIPPDATLIFEIELYAVTKGPRSIETFKQIDMDNDRQLSKAEINLYLQREFEKDEKPRDKSYQDAVLEDIFKKNDHDGDGFISPKEYNVYQHDEL

SEQ ID NO: 844337 - protein, 112 aa, Homo sapiens
MTATWLKTARNSTAAEGKIPPDATLIFEIELYAVTKGPRSIETFKQIDMDNDRQLSKAEINLYLQREFEKDEKPRDKSYQDAVLEDIFKKNDHDGDGFISPKEYNVYQHDEL

SEQ ID NO: 844338 - protein, 159 aa, Homo sapiens; identical to SEQ ID NO: 844335

SEQ ID NO: 844339 - protein, 106 aa, Homo sapiens
AGQRLPRVGTRPRDIHGARVTRGRESSVLLEPMPKTMHFLFRFIVFFYLWGLFTAQRQKKEESTEEVKIEVLHRPENCSKTSKKGDLLNAHYDGYLAKDGSKFYCR

SEQ ID NO: 844340 - protein, 174 aa, Homo sapiens
  misc_feature (34)..(34): Xaa can be any naturally occurring amino acid
RECLNQEREVAVSRDRTTVLRLGDRTRLRLKKKXKKLETSSLSLVRNSARAMTDMCPGEKRKVVIPPSFAYGKEGYAEGKIPPDATLIFEIELYAVTKGPRSIETFKQIDMDNDRQLSKAEINLYLQREFEKDEKPRDKSYQDAVLEDIFKKNDHDGDGFISPKEYNVYQHDEL

SEQ ID NO: 844341 - protein, 159 aa, Homo sapiens; identical to SEQ ID NO: 844335

SEQ ID NO: 844342 - protein, 254 aa, Homo sapiens; identical to SEQ ID NO: 844336

SEQ ID NO: 844343 - protein, 238 aa, Homo sapiens
VWLCGGSMEVLPCSRVAHIERKKKPYNSNIGFYTKRNALRVAEVWMDDYKSHVYIAWNLPLENPGIDIGDVSERRALRKSLKCKNFQWYLDHVYPEMRRYNNTVAYGELRNNKAKDVCLDQGPLENHTAILYPCHGWGPQLARYTKEGFLHLGALGTTTLLPDTRCLVDNSKSRLPQLLDCDKVKSSLYKRWNFIQNGAIMNKGTGRCLEVENRGLAGIDLILRSCTGQRWTIKNSIK

SEQ ID NO: 844344 - protein, 108 aa, Homo sapiens
LHICPHIMGATRPLHTPSALGISLRLRKSKAPPTPIALLLHQRSCKDASRDQPPAQASKAGAPLRGRMARVAPGSLWKGRHQPCPTLRGALYAYKAPQDGAGSRTREP

SEQ ID NO: 844345 - protein, 139 aa, Homo sapiens
SERRRWRPKMASWLPETLFETVGQGPPPSKDYYQLLVTRSQVIFRWWKISLRSEYRSTKPGEAKETHEDFLENSHLQGQTALIFGARILDYVINLCKGKFDFLERLSDDLLLTIISYLDLEDIARLCQTSHRFAKTESC

SEQ ID NO: 844346 - protein, 157 aa, Homo sapiens
MVIFRWWKISLRSEYRSTKPGEAKETHEDFLENSHLQGQTALIFGARILDYVINLCKGKFDFLERLSDDLLLTIISYLDLEDIARLCQTSHRFAKLCMSDKLWEQIVQSTCDTITPDVRALAEDTGWRQLFFTNKLQLQRQLRKRKQKYGNLREKQP

SEQ ID NO: 844347 - protein, 197 aa, Homo sapiens
SERRRWRPKMASWLPETLFETVGQGPPPSKDYYQLLVTRSQVIFRWWKISLRSEYRSTKPGEAKETHEDFLENSHLQGQTALIFGARILDYVINLCKGKFDFLERLSDDLLLTIISYLDLEDIARLCQTSHRFAKLCMSDKLWEQIVQSTCDTITPDVRALAEDTGWRQLFFTNKLQLQRQLRKRKQKYGNLREKQP

SEQ ID NO: 844348 - protein, 197 aa, Homo sapiens; identical to SEQ ID NO: 844347

SEQ ID NO: 844349 - protein, 157 aa, Homo sapiens; identical to SEQ ID NO: 844346

SEQ ID NO: 844350 - protein, 98 aa, Homo sapiens
SERRRWRPKMASWLPETLFETVGQGPPPSKDYYQLLVTRSQVIFRWWKISLRSEYRSTKPGEAKETHEDFLENSHLQGKERNILYTPVKFSLVSGRFC

SEQ ID NO: 844351 - protein, 197 aa, Homo sapiens; identical to SEQ ID NO: 844347

SEQ ID NO: 844352 - protein, 193 aa, Homo sapiens
MALSWVLTVLSLLPLLEAQIPLCANLVPVPITNATLDRITGKWFYIASAFRNEEYNKSVQEIQATFFYFTPNKTEDTIFLQRVTKTRQDPVASINTTLPGNVPSGKMGTHLPRYRGEGPRACSPHLPDPSGTPKTLHACFLTVNDEKNWGLSVYADKPETTKEQLGEFYEALRDCLRISQVRCRVHRLAHTHG

SEQ ID NO: 844353 - protein, 149 aa, Homo sapiens
RFFEKKKNRPSQYALSGSSSLSSYLAESQFHCVQPSPGAITNATLTRSLASGFISHRPFETRSTISRFRRSKQPSFTSPPTRQRTRSFFRELPGPDRTQLHLLTPPYLGMFPAGKWGPISPDTVGRAQEHVRLTCLIPQGHPRPYMLAS

SEQ ID NO: 844354 - protein, 113 aa, Homo sapiens
MQIFVKTLTGKTITLEVEPSDTIENVKAKIQDKEGIPPDQQRLIFAGKQLEDGRTLSDYNIQKESTLHLVLRLRGGMQIFVKTLTRYVGRAQEHVRLTCLIPQGHPRPYMLAS

SEQ ID NO: 844355 - protein, 193 aa, Homo sapiens; identical to SEQ ID NO: 844352

SEQ ID NO: 844356 - protein, 193 aa, Homo sapiens; identical to SEQ ID NO: 844352

SEQ ID NO: 844357 - protein, 230 aa, Homo sapiens
MALSWVLTVLSLLPLLEAQIPLCANLVPVPITNATLDRITGKWFYIASAFRNEEYNKSVQEIQATFFYFTPNKTEDTIFLQRVTKTRQDPVASINTTLPGNVPSGKMGTHLPRYRGEGPRACSPHLPDPSGTPKTLHACFLTVNDEKNWGLSVYADKPETTKEQLGEFYEALRDCLRISQVRCRVHRLAHTHAGKSVPDTGWEQGRELGGHGCAGGGHVDLNVFPSVRIG

SEQ ID NO: 844358 - protein, 225 aa, Homo sapiens
MALSWVLTVLSLLPLLEAQIPLCANLVPVPITNATLDRITGKWFYIASAFRNEEYNKSVQEIQATFFYFTPNKTEDTIFLQRVTKTRQDPVASINTTLPGNVPSGKMGTHLPRYRGEGPRACSPHLPDPSGTPKTLHACFLTVNDEKNWGLSVYADKPETTKEQLGEFYEALRDCLRISQVRCRVHRLAHTHGKRKGLDSAHLVHGPTWAAPEAQSRRAARQGCT

SEQ ID NO: 844359 - protein, 224 aa, Homo sapiens
MIGSTCVLSLVIEHVSVVCYTSVNPWYTHVCELPYFTLVDNASGSARCAMLLKAQSWMRRFMWAQLACESIKSGSSQKTQDVRIIIMYGLGTIQATFFYFTPNKTEDTIFLQRVTKTRQDPVASINTTLPGNVPSGKMGTHLPRYRGEGPRACSPHLPDPSGTPKTLHACFLTVNDEKNWGLSVYADKPETTKEQLGEFYEALRDCLRISQVRCRVHRLAHTHG

SEQ ID NO: 844360 - protein, 119 aa, Homo sapiens
MALSWVLTVLSLLPLLEAQIPLCANLVPVPITNATLDRITGKWFYIASAFRNEEYNKSVQEIQATFFYFTPNKTEDTIFLQRVTKTRQDPVASINTTLPGNVPSGLIPQGHPRPYMLAS

SEQ ID NO: 844361 - protein, 122 aa, Homo sapiens
MALSWVLTVLSLLPLLEAQIPLCANLVPVPITNATLDRITGKWFYIASAFRNEEYNKSVQEIQATFFYFTPNKTEDTIFLREYQTRQNQCFYNSSYLNVQRENGTVSRYEGGREHVRSPAVP

SEQ ID NO: 844362 - protein, 123 aa, Homo sapiens
MALSWVLTVLSLLPLLEAQIPLCANLVPVPITNATLDRITGKWFYIASAFRNEEYNKSVQEIQATFFYFTPNKTEDTIFLQRVTKTRQNQCFYNSSYLNVQRENGTVSRYEGGREHVRSPAVP

SEQ ID NO: 844363 - protein, 124 aa, Homo sapiens
MALSWVLTVLSLLPLLEAQIPLCANLVPVPITNATLDRITGKWFYIASAFRNEEYNKSVQEIQATFFYFTPNKTEDTIFLQRVTKTRQNQCFYNTTYLSELSIRVYQNTPFQGMYALLFLSCLH

SEQ ID NO: 844364 - protein, 104 aa, Homo sapiens
MALSWVLTVLSLLPLLEAQIPLCANLVPVPITNATLDRITGKWFYIASAFRNEEYNKSVQEIQATFFYFTPNKTEDTIFLREYQTRGRPRTCSLTCCSLGTPRP

SEQ ID NO: 844365 - protein, 130 aa, Homo sapiens
MALSWVLTVLSLLPLLEAQIPLCANLVPVPITNATLDRHQFIKFDTEEEAIAIANAADVGLAGYFYSQDPAQIWRVAEQLEVGMVGVNEGLISSVEALLVAVKQSGLGREGSKYGIDEYLELKYVCYGGL

SEQ ID NO: 844366 - protein, 193 aa, Homo sapiens; identical to SEQ ID NO: 844352

SEQ ID NO: 844367 - protein, 193 aa, Homo sapiens; identical to SEQ ID NO: 844352

SEQ ID NO: 844368 - protein, 192 aa, Homo sapiens
CLSCCLVKKGLASSLPSTMIVSFLRPPSHVSSEACGTITGKWFYIASAFRNEEYNKSVQEIQATFFYFTPNKTEDTIFLQRVTKTRQDPVASINTTLPGNVPSGKMGTHLPRYRGEGPRACSPHLPDPSGTPKTLHACFLTVNDEKNWGLSVYADKPETTKEQLGEFYEALRDCLRISQVRCRVHRLAHTHG

SEQ ID NO: 844369 - protein, 193 aa, Homo sapiens; identical to SEQ ID NO: 844352

SEQ ID NO: 844370 - protein, 195 aa, Homo sapiens
MEQAKVALEAFCKTSPGRQASVSLCANLVPVPITNATLDRITGKWFYIASAFRNEEYNKSVQEIQATFFYFTPNKTEDTIFLQRVTKTRQDPVASINTTLPGNVPSGKMGTHLPRYRGEGPRACSPHLPDPSGTPKTLHACFLTVNDEKNWGLSVYADKPETTKEQLGEFYEALRDCLRISQVRCRVHRLAHTHG

SEQ ID NO: 844371 - protein, 218 aa, Homo sapiens
MALSWVLTVLSLLPLLEAQIPLCANLVPVPITNATLDRITGKWFYIASAFRNEEYNKSVQEIQATFFYFTPNKTEDTIFLQRVTKTRQDPVASINTTLPGNVPSGKMGTHLPRYRGEGPRACSPHLPDPSGTPKTLHACFLTVNDEKNWGLSVYADKPETTKEQLGEFYEALRDCLRISQVRCRVHRLAHTHGCQRDTGVGSDRRLGGGPGGGGREVR

SEQ ID NO: 844372 - protein, 200 aa, Homo sapiens
MALSWVLTVLSLLPLLEAQIPLCANLVPVPITNATLDRITGKWFYIASAFRNEEYNKSVQEIQATFFYFTPNKTEDTIFLQRVTKTRQDPVASINTTLPGNVPSGKMGTHLPRYRGEGPRACSPHLPDPSGTPKTLHACFLTVNDEKNWGLSVYADKPETTKEQLGEFYEALRDCLQWLTLILFPTVYTTSDLGMRNGRG

SEQ ID NO: 844373 - protein, 123 aa, Homo sapiens; identical to SEQ ID NO: 844362

SEQ ID NO: 844374 - protein, 252 aa, Homo sapiens
MALSWVLTVLSLLPLLEAQIPLCANLVPVPITNATLDRITGKWFYIASAFRNEEYNKSVQEIQATFFYFTPNKTEDTIFLQRVTKTRGEGPRACSPHLPDPSGTPKTLHACFLTVNDEKNWGLSVYADKPETTKEQLGEFYEALRDCLRISQVRCRVHRLAHTHGLTCEPLEKQHEKERKHGSGEQSKRRERLLAKYLSIQLSNNSPPNMIGSTAVDYSIASTSSGLALDPTWARQKGRSSLQPEPRCYRHG

SEQ ID NO: 844375 - protein, 104 aa, Homo sapiens
MALSWVLTVLSLLPLLEAQIPLCANLVPVPITNATLDRITGKWFYIASAFRNEEYNKSVQEIQATFFYFTPNKTEDTIFLQRVTKTRETDKDTRCIYKKNINMK

SEQ ID NO: 844376 - protein, 325 aa, Homo sapiens
MGDTAPPQAPAGGLGGASGAGLLGGGSVTPRVHSAIVERLRARIAVCRQHHLSCEGRYERGRAESSDRERESTLQLLSLVQHGQGARKAGKHTKATATAATTTAPPPPPAAPPAASQAAATAAPPPPPDYHHHHQQHLLNSSNNGGSGGINGEQQPPASTPGDQRNSALIAVSTWLSHGSGCGPVTFCEGRVCFGLKVEWMAMKKAKMSPDYLKGHWVCSGGFMRLLIMFCWCSLLGFPSLIGYSLTDKKPEFSRGSLGSTSYKRRGYQLARSEPLRKVLSHGSSSFGQPALIRPPSHFSAPKHLSAQLAFIKAFFSLPHFPSPF

SEQ ID NO: 844377 - protein, 1153 aa, Homo sapiens [sequence omitted]

SEQ ID NO: 844378 - protein, 110 aa, Homo sapiens
LVDDLDAYFVSEDETITAVCKEPTRPKFKMPEMNIKAPKIPMPDFDLHLKGTHGRGFLAEEACTQESQSTGSIVRFSFLEITCTYSHTRNEHTYRQGKPQTVIQVGRRKI

SEQ ID NO: 844379 - protein, 770 aa, Homo sapiens
DVNLPKADVDVSGPKVDVEVPDVSLEGPEGKLKGPKFKMPEMHFKTPKISMPDVDFNLKGPKIKGDVDVSAPKLEGELKGPELDVKGPKLDADMPEVAVEGPNGKWKTPKFKMPDMHFKAPKISMPDLDLHLKSPKAKGEVDVDVPKLEGDLKGPHVDVSGPDIDIEGPEGKLKGPKFKMPDMHFKAPNISMPDVDLNLKGPKIKGDVDVSVPEVEGKLEVPDMNIRGPKVDVNAPDVQAPDWHLKMPKMKMPKFSMPGFKAEGPEVDVNLPKADVDISGPKVDIEGPDVNIEGPEGKLKGPKLKMPEMNIKAPKISMPDFDLHLKGPKVKGDVDVSLPKVEGDLKGPEVDIKGPKVDINAPDVGVQGPDWHLKMPKVKMPKFSMPGFKGEGPDGDVKLPKADIDVSGPKVDIEGPDVNIEGPEGKLKGPKFKMPEMNIKAPKISMPDIDLNLKGPKVKGDVDVSLPKVEGDLKGPEVDIKGPKVDIDAPDVDVHGPDWHLKMPKIKMPKISMPGFKGEGPDVDVNLPKADIDVSGPKVDVECPDVNIEGPEGKWKSPKFKMPEMHFKTPKISMPDIDLNLTGPKIKGDVDVTGPKVEGDLKGPEVDLKGPKVDIDVPDVNVQGPDWHLKMPKMKMPKFSMPGFKAEGPEVDVNLPKADVDVSGPKVDVEGPDVNIEGPEGKLKGPKFKMPEMNIKAPKIPMPDFDLHLKGTHGRGFLAEEACTQESQSTGSIVRFSFLEITCTYSHTRNEHTYRQGKPQTVIQVGRRKI

SEQ ID NO: 844380 - protein, 514 aa, Homo sapiens
DVNLPKADVDVSGPKVDVEVPDVSLEGPEGKLKGPKFKMPEMHFKTPKISMPDVDFNLKGPKIKGDVDVSAPKLEGELKGPELDVKGPKLDADMPEVAVEGPNGKWKTPKFKMPDMHFKAPKISMPDLDLHLKSPKAKGEVDVDVPKLEGDLKGPHVDVSGPDIDIEGPEGKLKGPKFKMPDMHFKAPNISMPDVDLNLKGPKIKGDVDVSVPEVEGKLEVPDMNIRGPKVDVNAPDVQAPDWHLKMPKMKMPKFSMPGFKAEGPEVDVNLPKADIDVSGPKVDVECPDVNIEGPEGKWKSPKFKMPEMHFKTPKISMPDIDLNLTGPKIKGDVDVTGPKVEGDLKGPEVDLKGPKVDIDVPDVNVQGPDWHLKMPKMKMPKFSMPGFKAEGPEVDVNLPKADVDVSGPKVDVEGPDVNIEGPEGKLKGPKFKMPEMNIKAPKIPMPDFDLHLKGTHGRGFLAEEACTQESQSTGSIVRFSFLEITCTYSHTRNEHTYRQGKPQTVIQVGRRKI

SEQ ID NO: 844381 - protein, 108 aa, Homo sapiens
VELECPDAKLKGPKFKMPDMHFKAPKISMPDVDLHLKGPKVKGDVDVSVPKLEGDLTGPSVGVEVPDVELECPDAKLKGPKFKMPEMHFKTPKSKGMWMCLCQNWREI

SEQ ID NO: 844382 - protein, 68 aa, Homo sapiens
VELECPDAKLKGPKFKMPDMHFKAPKISMPDVDLHLKGPKVKGDVDVSVPKLEGDLTGPSVGVEVPDE

SEQ ID NO: 844383 - protein, 563 aa, Homo sapiens
DVNLPKADVDVSGPKVDVEVPDVSLEGPEGKLKGPKFKMPEMHFKTPKISMPDVDFNLKGPKIKGDVDVSAPKLEGELKGPELDVKGPKLDADMPEVAVEGPNGKWKTPKFKMPDMHFKAPKISMPDLDLHLKSPKAKGEVDVDVPKLEGDLKGPHVDVSGPDIDIEGPEGKLKGPKFKMPDMHFKAPNISMPDVDLNLKGPKIKGDVDVSVPEVEGKLEVPDMNIRGPKVDVNAPDVQAPDWHLKMPKMKMPKFSMPGFKAEGPEVDVNLPKADVDISGPKVDIEGPDVNIEGPEGKLKGPKLKMPEMNIKAPKISMPDFDLHLKGPKVKGDVDVSLPKVEGDLKGPEVDIKGPKVDINAPDVGVQGPDWHLKMPKVKMPKFSMPGFKGEGPDGDVKLPKADIDVSGPKVDIEGPDVNIEGPEGKLKGPKFKMPEMNIKAPKISMPDIDLNLKGPKVKGDVDVSLPKVEGDLKGPEVDIKGPKVDIDAPDVDVHGPDWHLKMPKIKMPKISMPGFKGEGPDVDVNLPKADIDVSGPKVDVECPDVNIEGPELLEPIPYEFMA

SEQ ID NO: 844384 - protein, 284 aa, Homo sapiens
VELECPDAKLKGPKFKMPDMHFKAPKISMPDVDLHLKGPKVKGDVDVSVPKLEGDLTGPSVGVEVPDVELECPDAKLKGPKFKMPEMHFKTPKISMPDVDLHLKGPKVKGDMDVSVPKVEGEMKVPDVDIKGPKMDIDAPDVDVHGPDWHLKMPKMKMPKFSMPGFKAEGPEVDVNLPKADVVVSGPKVDVEVPDVSLEGPEGKLKGPKLKMPEMHFKAPKISMPDVDLHLKGPKVKGDVDVSLPKLEGDLTGPSVDVEVPDVELECPDAKLKGPKFKMPEMHF

SEQ ID NO: 844385 - protein, 175 aa, Homo sapiens
MVEGDLKGPEVDLKGPKVDIDVPDVNVQGPDWHLKMPKMKMPKFSMPGFKAEGPEVDVNLPKADVDVSGPKVDVEGPDVNIEGPEGKLKGPKFKMPEMNIKAPKIPMPDFDLHLKGTHGRGFLAEEACTQESQSTGSIVRFSFLEITCTYSHTRNEHTYRQGKPQTVIQVGRRKI

SEQ ID NO: 844386 - protein, 74 aa, Homo sapiens
FLRLGGRRLCAGLQVLPRIGVIAEPDALEGWAWGPQSTPEAFPLGRVASRRRKHSHVKDELPIKATLLSSRTES

SEQ ID NO: 844387 - protein, 74 aa, Homo sapiens; identical to SEQ ID NO: 844386

SEQ ID NO: 844388 - protein, 161 aa, Homo sapiens
MLFSIRSAKFVFKELFQFIPSTAIGIMSGRGKGGKGLGKGGAKRHRKVLRDNIQGITKPAIRRLARRGGVKRISGLIYEETRGVLKVFLENVIRDAVTYTEHAKRKTVHSHGCSICPKTFRGALCMASAAESKNTRSPENFKKQKKPKGPFQGRSQSRLKS

SEQ ID NO: 844389 - protein, 197 aa, Homo sapiens
  misc_feature (162)..(162): Xaa can be any naturally occurring amino acid
  misc_feature (193)..(193): Xaa can be any naturally occurring amino acid
MLFSIRSAKFVFKELFQFIPSTAIGIMSGRGKGGKGLGKGGAKRHRKVLRDNIQGITKPAIRRLARRGGVKRISGLIYEETRGVLKVFLENVIRDAVTYTEHAKRKTVHSHGCSICPKTFRGALCMASAAESKNTRSPENFKKQKKKAAARFESVIDTVDSXGARYHSPKVIVLNSWASFVVMGLALPYRLHXSPFA

SEQ ID NO: 844390 - protein, 144 aa, Homo sapiens
MLFSIRSAKFVFKELFQFIPSTAIGIMSGRGKGGKGLGKGGAKRHRKVLRDNIQGITKPAIRRLARRGGVKRISGLIYEETRGVLKVFLENVIRDAVTYTEHAKRKTVHSHGCSICPKTFRGALCMASAAESKNTRSPENFKKQ

SEQ ID NO: 844391 - protein, 181 aa, Homo sapiens
  misc_feature (11)..(11): Xaa can be any naturally occurring amino acid
QAKLVTPGPIXTLNDAHDCNTTRPQANGYRPPFEFDVIASACYRIRGRATAARRRQKGTAIGIMSGRGKGGKGLGKGGAKRHRKVLRDNIQGITKPAIRRLARRGGVKRISGLIYEETRGVLKVFLENVIRDAVTYTEHAKRKTVHSHGCSICPKTFRGALCMASAAESKNTRSPENFKKQ

SEQ ID NO: 844392 - protein, 198 aa, Homo sapiens
  misc_feature (11)..(11): Xaa can be any naturally occurring amino acid
QAKLVTPGPIXTLNDAHDCNTTRPQANGYRPPFEFDVIASACYRIRGRATAARRRQKGTAIGIMSGRGKGGKGLGKGGAKRHRKVLRDNIQGITKPAIRRLARRGGVKRISGLIYEETRGVLKVFLENVIRDAVTYTEHAKRKTVHSHGCSICPKTFRGALCMASAAESKNTRSPENFKKQKKPKGPFQGRSQSRLKS

SEQ ID NO: 844393 - protein, 150 aa, Homo sapiens
  misc_feature (9)..(9): Xaa can be any naturally occurring amino acid
QKLSGIPPXLPGTRPASDTAARRRQKGTAIGIMSGRGKGGKGLGKGGAKRHRKVLRDNIQGITKPAIRRLARRGGVKRISGLIYEETRGVLKVFLENVIRDAVTYTEHAKRKTVHSHGCSICPKTFRGALCMASAAESKNTRSPENFKKQ

SEQ ID NO: 844394 - protein, 151 aa, Homo sapiens
MLFSIRSAKFVFKELFQFIPSTAIGIMSGRGKGGKGLGKGGAKRHRKVLRDNIQGITKPAIRRLARRGGVKRISGLIYEETRGVLKVFLENVIRDAVTYTEHAKRKTVHSHGCSICPKTFRGALCMASAGLGKKIFPPLFKKKRGGKKKIF

SEQ ID NO: 844395 - protein, 105 aa, Homo sapiens
  misc_feature (2)..(3): Xaa can be any naturally occurring amino acid
  misc_feature (12)..(12): Xaa can be any naturally occurring amino acid
AXXKKKSGKGTXTTATPTKPAIRRLARRGGVKRISGLIYEETRGVLKVFLENVIRDAVTYTEHAKRKTVHSHGCSICPKTFRGALCMASAAESKNTRSPENFKKQ

SEQ ID NO: 844396 - protein, 219 aa, Homo sapiens
  misc_feature (11)..(11): Xaa can be any naturally occurring amino acid
  misc_feature (198)..(198): Xaa can be any naturally occurring amino acid
  misc_feature (219)..(219): Xaa can be any naturally occurring amino acid
QAKLVTPGPIXTLNDAHDCNTTRPQANGYRPPFEFDVIASACYRIRGRATAARRRQKGTAIGIMSGRGKGGKGLGKGGAKRHRKVLRDNIQGITKPAIRRLARRGGVKRISGLIYEETRGVLKVFLENVIRDAVTYTEHAKRKTVHSHGCSICPKTFRGALCMASAAESKNTRSPENFKKQKRPSNVDAAANSYQLSXLDSGGPYQLPYMIVLQSWRVX

SEQ ID NO: 844397 - protein, 205 aa, Homo sapiens
  misc_feature (11)..(11): Xaa can be any naturally occurring amino acid
QAKLVTPGPIXTLNDAHDCNTTRPQANGYRPPFEFDVIASACYRIRGRATAARRRQKGTAIGIMSGRGKGGKGLGKGGAKRHRKVLRDNIQGITKPAIRRLARRGGVKRISGLIYEETRGVLKVFLENVIRDAVTYTEHAKRKTVHSHGCSICPKTFRGALCMASAAESKNTRSPENFKKQILSAVSDQTIVYSSMLMHAAVLRA

SEQ ID NO: 844398 - protein, 147 aa, Homo sapiens
EPAARLRLRERRQKVTAARRRQKGTAIGIMSGRGKGGKGLGKGGAKRHRKVLRDNIQGITKPAIRRLARRGGVKRISGLIYEETRGVLKVFLENVIRDAVTYTEHAKRKTVHSHGCSICPKTFRGALCMASAAESKNTRSPENFKKQ

SEQ ID NO: 844399 - protein, 42 aa, Homo sapiens
GDAEKAADKIRHPFLIKSSKPGRQCYFLKLVINIYLKSTVSI

SEQ ID NO: 844400 - protein, 104 aa, Homo sapiens
MACLRGRPLCCASGWQGSHTWESGCQGEQGWESPCRTLMEWLEGGGQTFNVPLPAFQVRQVWCWVALPCPHPTERASEWAAPFHACTPDIQHRTSFPFLRQGLT

SEQ ID NO: 844401 - protein, 678 aa, Homo sapiens
AGGGGGGGGGRGSFRFALHPGSSSAAGTASSGRLAGFALALRQPGRIMGLPRGPEGQGLPEVETREDEEQNVKLTEILELLVAAGYFRARIKGLSPFDKVVGGMTWCITTCNFDVDVDLLFQENSTIGQKIALSEKIVSVLPRMKCPHQLEPHQIQGMDFIHIFPVVQWLVKRAIETKEEMGDYIRSYSVSQFQKTYSLPEDDDFIKRKEKAIKTVVDLSEVYKPRRKYKRHQGAEELLDEESRIHATLLEYGRRYGFSRQSKMEKAEDKKTALPAGLSATEKADAHEEDELRAAEEQRIQSLMTKMTAMANEESRLTASSVGQIVGLCSAEIKQIVSEYAEKQSELSAEESPEKLGTSQLHRRKVISLNKQIAQKTKHLEELRASHTSLQARYNEAKKTLTELKTYSEKLDKEQAALEKIESKADPSILQNLRALVAMNENLKSQEQEFKAHCREEMTRLQQEIENLKAERAPRGDEKTLSSGEPPGTLTSAMTHDEDLDRRYNMEKEKLYKIRLLQARRNREIAILHRKIDEVPSRAELIQYQKRFIELYRQISAVHKETKQFFTLYNTLDDKKVYLEKEISLLNSIHENFSQAMASPAARDQFLRQMEQIVEGIKQSRMKMEKKKQENKMRRDQLNDQYLELLEKQRLYFKTVKEFKEEGRKNEMLLSKVKAKAS

SEQ ID NO: 844402 - protein, 678 aa, Homo sapiens; identical to SEQ ID NO: 844401

SEQ ID NO: 844403 - protein, 254 aa, Homo sapiens
AGGGGGGGGGRGSFRFALHPGSSSAAGTASSGRLAGFALALRQPGRIMGLPRGPEGQGLPEVETREDEEQNVKLTEILELLVAAGYFRARIKGLSPFDKVVGGMTWCITTCNFDVDVDLLFQENSTIGQKIALSEKIVSVLPRMKCPHQLEPHQIQGMDFIHIFPVVQWLVKRAIETKEEMGDYIRSYSVSQFQKTYSLPEDDDFIKRKEKAIKTVVDLSEVYKPRRKYKRHQGAEELLDEESRIHATLLEYGR

SEQ ID NO: 844404 - protein, 415 aa, Homo sapiens
MEKAEDKKTALPAGLSATEKADAHEEDELRAAEEQRIQSLMTKMTAMANEESRLTASSVGQIVGLCSAEIKQIVSEYAEKQSELSAEESPEKLGTSQLHRRKVISLNKQIAQKTKHLEELRASHTSLQARYNEAKKTLTELKTYSEKLDKEQAALEKIESKADPSILQNLRALVAMNENLKSQEQEFKAHCREEMTRLQQEIENLKAERAPRGDEKTLSSGEPPGTLTSAMTHDEDLDRRYNMEKEKLYKIRLLQARRNREIAILHRKIDEVPSRAELIQYQKRFIELYRQISAVHKETKQFFTLYNTLDDKKVYLEKEISLLNSIHENFSQAMASPAARDQFLRQMEQIVEGIKQSRMKMEKKKQENKMRRDQLNDQYLELLEKQRLYFKTVKEFKEEGRKNEMLLSKVKAKAS

SEQ ID NO: 844405 - protein, 469 aa, Homo sapiens
AGGGGGGGGGRGSFRFALHPGSSSAAGTASSGRLAGFALALRQPGRIMGLPRGPEGQGLPEVETREDEEQNVKLTEILELLVAAGYFRARIKGLSPFDKVVGGMTWCITTCNFDVDVDLLFQENSTIGQKIALSEKIVSVLPRMKCPHQLEPHQIQGMDFIHIFPVVQWLVKRAIETKEEMGDYIRSYSVSQFQKTYSLPEDDDFIKRKEKAIKTVVDLSEVYKPRRKYKRHQGAEELLDEESRIHATLLEYGRRYGFSRQSKMEKAEDKKTALPAGLSATEKADAHEEDELRAAEEQRIQSLMTKMTAMANEESRLTASSVGQIVGLCSAEIKQIVSEYAEKQSELSAEESPEKLGTSQLHRRKVISLNKQIAQKTKHLEELRASHTSLQARYNEAKKTLTELKTYSEKLDKEQAALEKIESKADPSILQNLRALVAMNENLKSQEQEFKAHCRVSVVWCQQINQDAY

SEQ ID NO: 844406 - protein, 110 aa, Homo sapiens
LDITAKIHVGILLLSYMFRTTHCCSLPFLFQQRIQSLMTKMTAMANEEVSGSRGGVGMGTWHHPALLGSSPREPTFSGAASHQHTVPPLPQGVPFVNLFLMPSAATHGNL

SEQ ID NO: 844407 - protein, 38 aa, Homo sapiens
MTLTFWGLISVGGHAHVRPPRAMKAPWVCHKKKYKSMP

SEQ ID NO: 844408 - protein, 100 aa, Homo sapiens
VHKQVVESAYEVIKLKGYTSWAIGLSVADLAESIMKNLRRVHPISTMIGGIKDDVFLSIPCILGENGISDRVKVTLTPEEGAHLKNSADPLWGIQKELQF

SEQ ID NO: 844409 - protein, 338 aa, Homo sapiens
MTDAIHMLDSYCHPTSDKSVLDSRTLKLEALLSVKQEKEIQMKMIVTRGESVLQNTSPEGIPTIQQQLQSVKDMWASLLSAGIRCKSQLEGALSKWTSYQDGVRQFSGWMDSMEANLNESERQHAELRDKTTMLGKAKLLNEEVLSYSSLLETIEVKGAGMTEHYVTQLELQDLQERYRAIQERAKEAVTKSEKLVRLHQEYQRDLKAFEVWLGQEQEKLDQYSVLEGDAHTHETTLRDLQELQVHCAEGQALLNSVLHTREDVIPSGIPQAEDRALESLRQDWQAYQHRLSETRTQFNNVVNKLRLMEQKFQQVDEWLKTAEEKVSPRTRRQSNRAT

SEQ ID NO: 844410 - protein, 477 aa, Homo sapiens
DFDRGESVLQILLQKAFPLFSQQLQSVNGYVGIPFVCRDSVVKANSKELSPSGQVIRMEFDSSPVGMDSMEANLNESKRQHAELRDKTEKMVHESSNRLYDLPAKRREQQKLQEKVSRLDRIVAEHNQFSLGIKELQDWMTDAIHMLDSYCHPTSDKSVLDSRTLKLEALLSVKQEKEIQMKMIVTRGESVLQNTSPEGIPTIQQQLQSVKDMWASLLSAGIRCKSQLEGALSKWTSYQDGVRQFSGWMDSMEANLNESERQHAELRDKTTMLGKAKLLNEEVLSYSSLLETIEVKGAGMTEHYVTQLELQDLQERYRAIQERAKEAVTKSEKLVRLHQEYQRDLKAFEVWLGQEQEKLDQYSVLEGDAHTHETTLRDLQELQVHCAEGQALLNSVLHTREDVIPSGIPQAEDRALESLRQDWQAYQHRLSETRTQFNNVVNKLRLMEQKFQQVDEWLKTAEEKVSPRTRRQSNRAT

SEQ ID NO: 844411 - protein, 338 aa, Homo sapiens; identical to SEQ ID NO: 844409

SEQ ID NO: 844412 - protein, 657 aa, Homo sapiens
MIPCRAALTFARCLIRRKIVTLDSLEDTKLCRCLSTMDLIALGVGSTLGAGVYVLAGEVAKADSGPSIVVSFLIAALASVMAGLCYAEFGARVPKTGSAYLYTYVTVGELWAFITGWNLILSYVIGTSSVARAWSGTFDELLSKQIGQFLRTYFRMNYTGLAEYPDFFAVCLILLLAGLLSFGVKESAWVNKVFTAVNILVLLFVMVAGFVKGNVANWKISEEFLKNISASAREPPSENGTSIYGAGGFMPYGFTGTLAGAATCFYAFVGFDCIATTGEEVRNPQKAIPIGIVTSLLVCFMAYFGVSAALTLMMPYYLLDEKSPLPVAFEYVGWGPAKYVVAAGSLCALSTSLLGSMFPLPRILFAMARDGLLFRFLARVSKRQSPVAATLTAGVISALMAFLFDLKALVDMMSIGTLMAYSLVAACVLILRYQPGLSYDQPKCSPEKDGLGSSPRVTSKSESQVTMLQRQGFSMRTLFCPSLLPTQQSASLVSFLVGFLAFLVLGLSVLTTYGVHAITRLEAWSLALLTLFLVLFVAIVLTIWRQPQNQQKVAFMVPFLPFLPAFSILVNIYLMVQLSADTWVRFSIWMAIGFLIYFSYGIRHSLEGHLRDENNEEDAYPDNVHAAAEEKSAIQANDHHPRNLSSPFIFHEKTSEF

SEQ ID NO: 844413 - protein, 730 aa, Homo sapiens
PSAARPAGAPLPGTSEAAAAAPASPSRGPPTRCSRQPTAAFLARPQPSPTGDSLKTSRKAVSPYRSPSSDVRMIPCRAALTFARCLIRRKIVTLDSLEDTKLCRCLSTMDLIALGVGSTLGAGVYVLAGEVAKADSGPSIVVSFLIAALASVMAGLCYAEFGARVPKTGSAYLYTYVTVGELWAFITGWNLILSYVIGTSSVARAWSGTFDELLSKQIGQFLRTYFRMNYTGLAEYPDFFAVCLILLLAGLLSFGVKESAWVNKVFTAVNILVLLFVMVAGFVKGNVANWKISEEFLKNISASAREPPSENGTSIYGAGGFMPYGFTGTLAGAATCFYAFVGFDCIATTGEEVRNPQKAIPIGIVTSLLVCFMAYFGVSAALTLMMPYYLLDEKSPLPVAFEYVGWGPAKYVVAAGSLCALSTSLLGSIFPMPRVIYAMAEDGLLFKCLAQINSKTKTPIIATLSSGAVAALMAFLFDLKALVDMMSIGTLMAYSLVAACVLILRYQPGLSYDQPKCSPEKDGLGSSPRVTSKSESQVTMLQRQGFSMRTLFCPSLLPTQQSASLVSFLVGFLAFLVLGLSVLTTYGVHAITRLEAWSLALLALFLVLFVAIVLTIWRQPQNQQKVAFMVPFLPFLPAFSILVNIYLMVQLSADTWVRFSIWMAIGFLIYFSYGIRHSLEGHLRDENNEEDAYPDNVHAAAEEKSAIQANDHHPRNLSSPFIFHEKTSEF

SEQ ID NO: 844414 - protein, 730 aa, Homo sapiens; identical to SEQ ID NO: 844413

SEQ ID NO: 844415 - protein, 730 aa, Homo sapiens; identical to SEQ ID NO: 844413

SEQ ID NO: 844416 - protein, 730 aa, Homo sapiens; identical to SEQ ID NO: 844413

SEQ ID NO: 844417 - protein, 730 aa, Homo sapiens; identical to SEQ ID NO: 844413

SEQ ID NO: 844418 - protein, 730 aa, Homo sapiens; identical to SEQ ID NO: 844413

SEQ ID NO: 844419 - protein, 137 aa, Homo sapiens
MYIIFKELINTTTFQGYSLRKVTRRRVFCQSDFPMCLFSFLESHLLKTEQVSMGLVALCLMALRERWLVLQLAFMPLWDLTALQQLVRAVSWLSVEGVFLVVHEYPCVVAEGPGKREGFRVRRALVPGPAVTRAADD

SEQ ID NO: 844420 - protein, 53 aa, Homo sapiens
VRFDSVGGLSNHIAALKEMVVFPLLYPEVFEKFKIQPPRVWLFYGPPGTGNTL

SEQ ID NO: 844421 - protein, 80 aa, Homo sapiens
WGLTIVMLWNKARGGRDGRHLMSLTLQDVQQEEAASCRLTMRASSVISTVLTAIINANRNVQTTQNLRTPISINCSETSI

SEQ ID NO: 844422 - protein, 111 aa, Homo sapiens
WAKDMKFTKEETPRQTHHRKSHSNLAIREKQMKNKMSPYTHETGSGWEAGRVPVWQGRGASCPGGGRCPVLPVRVTEPEPSMPLLDVHPKETLVQTHQGTCLDVTIHTCVG

SEQ ID NO: 844423 - protein, 147 aa, Homo sapiens
MFLNGNCLETLKKKEPEGGRRRLSHPGNMGWMRPSQETTPPDRSHHSGFGLFCGDPGPEIEPFSLWVFPQEMVLEIHQLFMDHEYPCHHITSHCTWVAAHWTTSQSCAAWQGCRRACCSTWWKSPAQCTRPTVMSATFETAQEPGPS

SEQ ID NO: 844424 - protein, 147 aa, Homo sapiens; identical to SEQ ID NO: 844423

SEQ ID NO: 844425 - protein, 83 aa, Homo sapiens
CRILEGTTPQSEAAGGVTVNTIGAESISDEEVAPGQVVVTGHDGVGERTATMSVLEGEASGRDTQTQGHSLIPLFNKYLLVIC

SEQ ID NO: 844426 - protein, 210 aa, Homo sapiens
AAPIQGLRSPERDPGTPRPVGGPCPGLGGAITPSLKTRGYRTQDRGPGGGSAGETARLAQRRGRGPGGPQSTPRNPRVSRGERSHCPTQTVKKLLEEQRRRQQQQPDAGGVQGQFLPPPEQPLTPSVNEAVTGHPPFPAHSETVGSGPSSLGFPDWDPNTHAAYTDSPYSCPASAAENFLPPDFYPPSDPGQPCPFPQGMEVRYRVGTGC

SEQ ID NO: 844427 - protein, 250 aa, Homo sapiens
AAPIQGLRSPERDPGTPRPVGGPCPGLGGAITPSLKTRGYRTQDRGPGGGSAGETARLAQRRGRGPGGPQSTPRNPRVSRGERSHCPTQTVKKLLEEQRRRQQQQPDAGGVQGQFLPPPEQPLTPSVNEAVTGHPPFPAHSETVGSGPSSLGFPDWDPNTHAAYTDSPYSCPASAAENFLPPDFYPPSDPGQPCPFPQGMEAGPWRVSAPPSGPPQFPAVVPGPSLEVARAHMLALGPQQLLAQDEEGDT

SEQ ID NO: 844428 - protein, 258 aa, Homo sapiens
MASWQAGVCLGGRLVAQILASRARRPGDTLTQQSAFSSSQAVLNSGVQVDLEARDFEGLTPLHTAILALNVAMRPSDLCPRVLSTQARDRLDCVHMLLQMGANHTSQEMRSCCVVQAGLQLLASSDPPSSASQSARITGVNHRTPPREIKSNKTVLHLAVQAANPTLVQLLLELPRGDLRTFVNMKAHGNTALHMAAALPPGPAQEAIVRHLLAAGADPTLRNLENEQPVHLLRPGPGPEGLRQLLKRSRVAPPGLSS

SEQ ID NO: 844429 - protein, 250 aa, Homo sapiens; identical to SEQ ID NO: 844427

SEQ ID NO: 844430 - protein, 527 aa, Homo sapiens
AAPIQGLRSPERDPGTPRPVGGPCPGLGGAITPSLKTRGYRTQDRGPGGGSAGETARLAQRRGRGPGGPQSTPRNPRVSRGERSHCPTQTVKKLLEEQRRRQQQQPDAGGVQGQFLPPPEQPLTPSVNEAVTGHPPFPAHSETVGSGPSSLGFPDWDPNTHAAYTDSPYSCPASAAENFLPPDFYPPSDPGQPCPFPQGMEDPPDTQFYVEIFSATAGPWRVSAPPSGPPQFPAVVPGPSLEVARAHMLALGPQQLLAQDEEGDTLLHLFAARGLRWAAYAAAEVLQVYRRLDIREHKGKTPLLVAAAANQPLIVEDLLNLGAEPNAADHQGRSVLHVAATYGLPGVLLAVLNSGVQVDLEARDFEGLTPLHTAILALNVAMRPSDLCPRVLSTQARDRLDCVHMLLQMGANHTSQEIKSNKTVLHLAVQAANPTLVQLLLELPRGDLRTFVNMKAHGNTALHMAAALPPGPAQEAIVRHLLAAGADPTLRNLENEQPVHLLRPGPGPEGLRQLLKRSRVAPPGLSS

SEQ ID NO: 844431 - protein, 150 aa, Homo sapiens
MRSCCVVQAGLQLLASSDPPSSASQSARITGVNHRTPPREIKSNKTVLHLAVQAANPTLVQLLLELPRGDLRTFVNMKAHGNTALHMAAALPPGPAQEAIVRHLLAAGADPTLRNLENEQPVHLLRPGPGPEGLRQLLKRSRVAPPGLSS

SEQ ID NO: 844432 - protein, 250 aa, Homo sapiens; identical to SEQ ID NO: 844427

SEQ ID NO: 844433 - protein, 250 aa, Homo sapiens; identical to SEQ ID NO: 844427

SEQ ID NO: 844434 - protein, 71 aa, Homo sapiens
VKKLLEEQRRRQQQQPDAGGVQVRPGSHSSPEAPCCPVGTQRLAGPSGLMRGVVLTEMSYRSETDPEESAR

SEQ ID NO: 844435 - protein, 125 aa, Homo sapiens
APPSAWRAFPTSPSNLTDFSPSFALSTAPAAVEEEPCGAARPVLLGLKPRPWTDFPVPTVLRDSQRMLMLQTHDNVCGISCHWGFTLKPQNGCRGVNRPQYLGCCDTPLLPTRSPLDDFCEIEAP

SEQ ID NO: 844436 - protein, 608 aa, Homo sapiens
AAPIQGLRSPERDPGTPRPVGGPCPGLGGAITPSLKTRGYRTQDRGPGGGSAGETARLAQRRGRGPGGPQSTPRNPRVSRGERSHCPTQTVKKLLEEQRRRQQQQPDAGGVQGQFLPPPEQPLTPSVNEAVTGHPPFPAHSETVGSGPSSLGFPDWDPNTHAAYTDSPYSCPASAAENFLPPDFYPPSDPGQPCPFPQGMEDPPDTQFYVEIFSATAGPWRVSAPPSGPPQFPAVVPGPSLEVARAHMLALGPQQLLAQDEEGDTLLHLFAARGLRWAAYAAAEVLQVYRRLDIREHKGKTPLLVAAAANQPLIVEDLLNLGAEPNAADHQGRSVLHVAATYGLPGVLLVMASWQAGVCLGGRLVAQILASRARRPGDTLTQQSAFSSSQAVLNSGVQVDLEARDFEGLTPLHTAILALNVAMRPSDLCPRVLSTQARDRLDCVHMLLQMGANHTSQEMRSCCVVQAGLQLLASSDPPSSASQSARITGVNHRTPPREIKSNKTVLHLAVQAANPTLVQLLLELPRGDLRTFVNMKAHGNTALHMAAALPPGPAQEAIVRHLLAAGADPTLRNLENEQPVHLLRPGPGPEGLRQLLKRSRVAPPGLSS

SEQ ID NO: 844437 - protein, 250 aa, Homo sapiens; identical to SEQ ID NO: 844427

SEQ ID NO: 844438 - protein, 539 aa, Homo sapiens
AAPIQGLRSPERDPGTPRPVGGPCPGLGGAITPSLKTRGYRTQDRGPGGGSAGETARLAQRRGRGPGGPQSTPRNPRVSRGERSHCPTQTVKKLLEEQRRRQQQQPDAGGVQGQFLPPPEQPLTPSVNEAVTGHPPFPAHSETVGSGPSSLGFPDWDPNTHAAYTDSPYSCPASAAENFLPPDFYPPSDPGQPCPFPQGMEAGPWRVSAPPSGPPQFPAVVPGPSLEVARAHMLALGPQQLLAQDEEGDTLSIRDRVVCRLLAWWGLSHGCPPPVLRLLHLFAARGLRWAAYAAAEVLQVYRRLDIREHKGKTPLLVAAAANQPLIVEDLLNLGAEPNAADHQGRSVLHVAATYGLPGVLLAVLNSGVQVDLEARDFEGLTPLHTAILALNVAMRPSDLCPRVLSTQARDRLDCVHMLLQMGANHTSQEIKSNKTVLHLAVQAANPTLVQLLLELPRGDLRTFVNMKAHGNTALHMAAALPPGPAQEAIVRHLLAAGADPTLRNLENEQPVHLLRPGPGPEGLRQLLKRSRVAPPGLSS

SEQ ID NO: 844439 - protein, 622 aa, Homo sapiens
AAPIQGLRSPERDPGTPRPVGGPCPGLGGAITPSLKTRGYRTQDRGPGGGSAGETARLAQRRGRGPGGPQSTPRNPRVSRGERSHCPTQTVKKLLEEQRRRQQQQPDAGGVQGQFLPPPEQPLTPSVNEAVTGHPPFPAHSETVGSGPSSLGFPDWDPNTHAAYTDSPYSCPASAAENFLPPDFYPPSDPGQPCPFPQGMEAGPWRVSAPPSGPPQFPAVVPGPSLEVARAHMLALGPQQLLAQDEEGDTLLHLFAARGLRWAAYAAAEVLQVYRRLDIREHKGKTPLLVAAAANQPLIVEDLLNLGAEPNAADHQGRSVLHVAATYGLPGVLLVWPAGRQGFVWGVDWLPRFWLPGPGGQGIPLPSSLPSLPPRLCLTLGSRLTWKPETSRVSWVWAGLVWLVWLGEVGADAGPHCLHSAGLTPLHTAILALNVAMRPSDLCPRVLSTQARDRLDCVHMLLQMGANHTSQEMRSCCVVQAGLQLLASSDPPSSASQSARITGVNHRTPPREIKSNKTVLHLAVQAANPTLVQLLLELPRGDLRTFVNMKAHGNTALHMAAALPPGPAQEAIVRHLLAAGADPTLRNLENEQPVHLLRPGPGPEGLRQLLKRSRVAPPGLSS

SEQ ID NO: 844440 - protein, 250 aa, Homo sapiens; identical to SEQ ID NO: 844427

SEQ ID NO: 844441 - protein, 250 aa, Homo sapiens; identical to SEQ ID NO: 844427

SEQ ID NO: 844442 - protein, 132 aa, Homo sapiens
MDLPYYHGRLTKQDCETLLLKEGVDGNFLLRDSESIPGVLCLCVSFKNIVYTYRIFREKHGYYRIQTAEGSPKQVFPSLKELISKFEKPNQGMVVHLLKPIKRTSPSLRWRGLKLELETFVNSNSDYVDVLP

SEQ ID NO: 844443 - protein, 108 aa, Homo sapiens
MGLFAAFPTPLSLPGSQPVFPYQGFCHPWPMSVHLGSPPSIITSCPRELPVPLFQLFPSLAVEIVSTFDLLLSSDLLLSSYSLCAARFPRSVAFSSLGFLLYSDFQLF

SEQ ID NO: 844444 - protein, 196 aa, Homo sapiens
APPWLPWSAGRAARSSRKCPRSRFPVQVGKMAVSTVFSTSSLMLALSRHSLLSPLLSVTSFRRFYRGDSPTDSQKDMIEIPLPPWQERTDESIETKRARLLYESRKRGMLENCILLSLFAKEHLQHMTEKQLNLYDRLINEPSNDWDIYYWATEAKPAPEIFENEVMALLRDFAKNKNKEQRLRAPDLEYLFEKPR

SEQ ID NO: 844445 - protein, 196 aa, Homo sapiens; identical to SEQ ID NO: 844444

SEQ ID NO: 844446 - protein, 196 aa, Homo sapiens; identical to SEQ ID NO: 844444

SEQ ID NO: 844447 - protein, 144 aa, Homo sapiens
APPWLPWSAGRAARSSRKCPRSRFPVQVGKMAVSTVFSTSSLMLALSRHSLLSPLLSVTSFRRFYRGDSPTDSQKDMIEIPLPPWQERTDESIETKRARLLYESRKRGMLENCILLSLFAKEHLQHMTEKQLNLYDRLINEPRS

SEQ ID NO: 844448 - protein, 196 aa, Homo sapiens; identical to SEQ ID NO: 844444

SEQ ID NO: 844449 - protein, 196 aa, Homo sapiens; identical to SEQ ID NO: 844444

SEQ ID NO: 844450 - protein, 258 aa, Homo sapiens
APPWLPWSAGRAARSSRKCPRSRFPVQVGKMAVSTVFSTSSLMLALSRHSLLSPLLSVTSFRRFYRGDSPTDSQKDMIEIPLPPWQERTDESIETKRARLLYESRKRGMLENCILLSLFAKEHLQHMTEKQLNLYDRLINEPSNDWDIYYWATGPLVALPNSIMMGKLPLGVVSPYVKMSSGGYTDPLKFYATSYCNSLRSGRISKPRVGSHVGTGYKSNYQPRGTHAKASLEALDNPDRQENKPRTIYRLWPAETIA

SEQ ID NO: 844451 - protein, 194 aa, Homo sapiens
MLSLCAQDLTQMLALSRHSLLSPLLSVTSFRRFYRGDSPTDSQKDMIEIPLPPWQERTDESIETKRARLLYESRKRGMLENCILLSLFAKEHLQHMTEKQLNLYDRLINEPSNDWDIYYWATEANPAKKKKKKKKKFWGRPARKFKPLLAPAPGGTATVQEPGRLGVSQKPGAGSHPGVGPVPAAIPPPAGGTQ

SEQ ID NO: 844452 - protein, 196 aa, Homo sapiens; identical to SEQ ID NO: 844444

SEQ ID NO: 844453 - protein, 165 aa, Homo sapiens
MLSLCAQDLTQMLALSRHSLLSPLLSVTSFRRFYRGDSPTDSQKDMIEIPLPPWQERTDESIETKRARLLYESRKRGMLENCILLSLFAKEHLQHMTEKQLNLYDRLINEPSNDWDIYYWATEAKPAPEIFENEVMALLRDFAKNKNKEQRLRAPDLEYLFEKPR

SEQ ID NO: 844454 - protein, 196 aa, Homo sapiens; identical to SEQ ID NO: 844444

SEQ ID NO: 844455 - protein, 196 aa, Homo sapiens; identical to SEQ ID NO: 844444

SEQ ID NO: 844456 - protein, 117 aa, Homo sapiens
APPWLPWSAGRAARSSRKCPRSRFPVQVGKMAVSTVFSTSSLMLALSRHSLLSPLLSVTSFRRFYRGDSPTDSQKDMIEIPLPPWQERTDESIETKRARLLYESRKRGMLENCILRS

SEQ ID NO: 844457 - protein, 175 aa, Homo sapiens
APPWLPWSAGRAARSSRKCPRSRFPVQVGKMAVSTVFSTSSLMLALSRHSLLSPLLSVTSFRRFYRGDSPTDSQKDMIEIPLPPWQERTDESIETKRARLLYESRKRGMLENCILLSLFAKEHLQHMTEKQLNLYDRLINEPSNDWDIYYWATGDWVPGYVIEYSSGCFYEDVFG

SEQ ID NO: 844458 - protein, 192 aa, Homo sapiens
MRHNYYKLHLPTTNRPKIAHCILFNQPHSPRSNSHSHPNPLKLHRRSHSHNPHGPRDPRGSEQLAESILHEGSTGCRVVEKFLKILQVVVQEPGQVFKPFLPSIIALCMEQVYPIIAERPSPDVKAELFELLFRTLHHNWRYFFKSTVLASVQRGIAEEQMENEPQFSAIMQLSDSPFSSPDRPPFQQDIVI

SEQ ID NO: 844459 - protein, 1111 aa, Homo sapiens
MTEFFHDCTTNERKREIEELLNNFAQQIGAWRFCLYFLSSTRNDYVMMYSLTVFENLINKMWLGVPSQDKMEIRSCLPKLLLAHHKTLPYFIRNKLCKVIVDIGRQDWPMFYHDFFTNILQLIQSPVTTPLGLIMLKTTSEELACPREDLSVARKEELRKLLLDQVQTVLGLLTGILETVWDKHSVTAATPPPSPTSGESGDLLSNLLQSPSSAKLLNQPIPILDVESEYICSLALECLAHLFSWIPLSASITPSLLTTIFHFARFGCDIRARKMASVNGSSQNCVSGQERGRLGVLAMSCINELMSKNCVPMEFEEYLLRMFQQTFYLLQKITKDNNAHTVKSRLEELDESYIEKFTDFLRLFVSVHLRRIESYSQFPVVEFLTLLFKYTFHQPTHEGYFSCLDIWTLFLDYLTSKIKSRLGDKEAVLNRYEDALVLLLTEVLNRIQFRYNQAQLEELDDETLDDDQQTEWQRYLRQSLEVVAKVMELLPTHAFSTLFPVLQDNLEVYLGLQQFIVTSGSGHRLNITAENDCRRLHCSLRDLSSLLQAVGRLAEYFIGDVFAARFNDALTVVERLVKVTLYGSQIKLYNIETAVPSVLKPDLIDVHAQSLAALQAYSHWLAQYCSEVHRQNTQQFVTLISTTMDAITPLISTKVQDKLLLSACHLLVSLATTVRPVFLISIPAVQKVFNRITDASALRLVDKAQVLVCRALSNILLLPWPNLPENEQQWPVRSINHASLISALSRDYRNLKPSAVAPQRKMPLDDTKLIIHQTLSVLEDIVENISGESTKSRQICYQSLQESVQVSLALFPAFIHQSDVTDEMLSFFLTLFRGLRVQMGVPFTEQIIQTFLNMFTREQLAESILHEGSTGCRVVEKFLKILQVVVQEPGQVFKPFLPSIIALCMEQVYPIIAERPSPDVKAELFELLFRTLHHNWRYFFKSTVLASVQRGIAEEQMENEPQFSAIMQAFGQSFLQPDIHLFKQNLFYLETLNTKQKLYHKKIFRTAMLFQFVNVLLQVLVHKSHDLLQEEIGIAIYNMASVDFDGFFAAFLPEFLTSCDGVDANQKSVLGRNFKMDRDLPSFTQNVHRLVNDLRYYRLCNDSLPPGTVKL

SEQ ID NO: 844460 - protein, 945 aa, Homo sapiens
VSWVEIGEGILETVWDKHSVTAATPPPSPTSGESGDLLSNLLQSPSSAKLLNQPIPILDVESEYICSLALECLAHLFSWIPLSASITPSLLTTIFHFARFGCDIRARKMASVNGSSQNCVSGQERGRLGVLAMSCINELMSKNCVPMEFEEYLLRMFQQTFYLLQKITKDNNAHTVKSRLEELDESYIEKFTDFLRLFVSVHLRRIESYSQFPVVEFLTLLFKYTFHQPTHEGYFSCLDIWTLFLDYLTSKIKSRLGDKEAVLNRYEDALVLLLTEVLNRIQFRYNQAQLEELDDETLDDDQQTEWQRYLRQSLEVVAKVMELLPTHAFSTLFPVLQDNLEVYLGLQQFIVTSGSGHRLNITAENDCRRLHCSLRDLSSLLQAVGRLAEYFIGDVFAARFNDALTVVERLVKVTLYGSQIKLYNIETAVPSVLKPDLIDVHAQSLAALQAYSHWLAQYCSEVHRQNTQQFVTLISTTMDAITPLISTKVQDKLLLSACHLLVSLATTVRPVFLISIPAVQKVFNRITDASALRLVDKAQVLVCRALSNILLLPWPNLPENEQQWPVRSINHASLISALSRDYRNLKPSAVAPQRKMPLDDTKLIIHQTLSVLEDIVENISGESTKSRQICYQSLQESVQVSLALFPAFIHQSDVTDEMLSFFLTLFRGLRVQMGVPFTEQIIQTFLNMFTREQLAESILHEGSTGCRVVEKFLKILQVVVQEPGQVFKPFLPSIIALCMEQVYPIIAERPSPDVKAELFELLFRTLHHNWRYFFKSTVLASVQRGIAEEQMENEPQFSAIMQAFGQSFLQPDIHLFKQNLFYLETLNTKQKLYHKKIFRTAMLFQFVNVLLQVLVHKSHDLLQEEIGIAIYNMASVDFDGFFAAFLPEFLTSCDGVDANQKSVLGRNFKMDRDLPSFTQNVHRLVNDLRYYRLCNDSLPPGTVKL

SEQ ID NO: 844461 - protein, 1137 aa, Homo sapiens
MASEEASLRALESLMTEFFHDCTTNERKREIEELLNNFAQQIGAWRFCLYFLSSTRNDYVMMYSLTVFENLINKMWLGVPSQDKMEIRSCLPKLLLAHHKTLPYFIRNKLCKVIVDIGRQDWPMFYHDFFTNILQLIQSPVTTPLGLIMLKTTSEELACPREDLSVARKEELRKLLLDQVQTVLGLLTGILETVWDKHSVTAATPPPSPTSGESGDLLSNLLQSPSSAKLLNQPIPILDVESEYICSLALECLAHLFSWIPLSASITPSLLTTIFHFARFGCDIRARKMASVNGSSQNCVSGQERGRLGVLAMSCINELMSKNCVPMEFEEYLLRMFQQTFYLLQKITKDNNAHTVKSRLEELDERWFNGMKGCLSCSYIEKFTDFLRLFVSVHLRRIESYSQFPVVEFLTLLFKYTFHQPTHEGYFSCLDIWTLFLDYLTSKIKSRLGDKEAVLNRYEDALVLLLTEVLNRIQFRYNQAQLEELDDETLDDDQQTEWQRYLRQSLEVVAKVMELLPTHAFSTLFPVLQDNLEVYLGLQQFIVTSGSGHRLNITAENDCRRLHCSLRDLSSLLQAVGRLAEYFIGDVFAARFNDALTVVERLVKVTLYGSQIKLYNIETAVPSVLKPDLIDVHAQSLAALQAYSHWLAQYCSEVHRQNTQQFVTLISTTMDAITPLISTKVQDKLLLSACHLLVSLATTVRPVFLISIPAVQKVFNRITDASALRLVDKAQVLVCRALSNILLLPWPNLPENEQQWPVRSINHASLISALSRDYRNLKPSAVAPQRKMPLDDTKLIIHQTLSVLEDIVENISGESTKSRQICYQSLQESVQVSLALFPAFIHQSDVTDEMLSFFLTLFRGLRVQMGVPFTEQIIQTFLNMFTREQLAESILHEGSTGCRVVEKFLKILQVVVQEPGQVFKPFLPSIIALCMEQVYPIIAERPSPDVKAELFELLFRTLHHNWRYFFKSTVLASVQRGIAEEQMENEPQFSAIMQAFGQSFLQPDIHLFKQNLFYLETLNTKQKLYHKKIFRTAMLFQFVNVLLQVLVHKSHDLLQEEIGIAIYNMASVDFDGFFAAFLPEFLTSCDGVDANQKSVLGRNFKMDRDLPSFTQNVHRLVNDLRYYRLCNDSLPPGTVKL

SEQ ID NO: 844462 - protein, 830 aa, Homo sapiens
RARYPSKTTVNFTCQIVQTQRPDIQTREVTFMSRLMKCELELKCQKLHHRELGVRLDSSEVNTHQEPKKVSKLLDIALIELFKPALHCVGIVILGDFLQEEKVCWNIRSKYSSHSIGTQFLDMSSLMLFLDYLTSKIKSRLGDKEAVLNRYEDALVLLLTEVLNRIQFRYNQAQLEELDDETLDDDQQTEWQRYLRQSLEVVAKVMELLPTHAFSTLFPVLQDNLEVYLGLQQFIVTSGSGHRLNITAENDCRRLHCSLRDLSSLLQAVGRLAEYFIGDVFAARFNDALTVVERLVKVTLYGSQIKLYNIETAVPSVLKPDLIDVHAQSLAALQAYSHWLAQYCSEVHRQNTQQFVTLISTTMDAITPLISTKVQDKLLLSACHLLVSLATTVRPVFLISIPAVQKVFNRITDASALRLVDKAQVLVCRALSNILLLPWPNLPENEQQWPVRSINHASLISALSRDYRNLKPSAVAPQRKMPLDDTKLIIHQTLSVLEDIVENISGESTKSRQICYQSLQESVQVSLALFPAFIHQSDVTDEMLSFFLTLFRGLRVQMGVPFTEQIIQTFLNMFTREQLAESILHEGSTGCRVVEKFLKILQVVVQEPGQVFKPFLPSIIALCMEQVYPIIAERPSPDVKAELFELLFRTLHHNWRYFFKSTVLASVQRGIAEEQMENEPQFSAIMQAFGQSFLQPDIHLFKQNLFYLETLNTKQKLYHKKIFRTAMLFQFVNVLLQVLVHKSHDLLQEEIGIAIYNMASVDFDGFFAAFLPEFLTSCDGVDANQKSVLGRNFKMDRDLPSFTQNVHRLVNDLRYYRLCNDSLPPGTVKL

SEQ ID NO: 844463 - protein, 732 aa, Homo sapiens
MASEEASLRALESLMTEFFHDCTTNERKREIEELLNNFAQQIGAWRFCLYFLSSTRNDYVMMYSLTVFENLINKMWLGVPSQDKMEIRQQTEWQRYLRQSLEVVAKVMELLPTHAFSTLFPVLQDNLEVYLGLQQFIVTSGSGHRLNITAENDCRRLHCSLRDLSSLLQAVGRLAEYFIGDVFAARFNDALTVVERLVKVTLYGSQIKLYNIETAVPSVLKPDLIDVHAQSLAALQAYSHWLAQYCSEVHRQNTQQFVTLISTTMDAITPLISTKVQDKLLLSACHLLVSLATTVRPVFLISIPAVQKVFNRITDASALRLVDKAQVLVCRALSNILLLPWPNLPENEQQWPVRSINHASLISALSRDYRNLKPSAVAPQRKMPLDDTKLIIHQTLSVLEDIVENISGESTKSRQICYQSLQESVQVSLALFPAFIHQSDVTDEMLSFFLTLFRGLRVQMGVPFTEQIIQTFLNMFTREQLAESILHEGSTGCRVVEKFLKILQVVVQEPGQVFKPFLPSIIALCMEQVYPIIAERPSPDVKAELFELLFRTLHHNWRYFFKSTVLASVQRGIAEEQMENEPQFSAIMQAFGQSFLQPDIHLFKQNLFYLETLNTKQKLYHKKIFRTAMLFQFVNVLLQVLVHKSHDLLQEEIGIAIYNMASVDFDGFFAAFLPEFLTSCDGVDANQKSVLGRNFKMDRDLPSFTQNVHRLVNDLRYYRLCNDSLPPGTVKL

SEQ ID NO: 844464 - protein, 634 aa, Homo sapiens
PPVLIRPRVMELLSHAAFSTLFPVLQDNLEVYLGLQQFIVTSGSGHRLNITAENDCRRLHCSLRDLSSLLQAVGRLAEYFIGDVFAARFNDALTVVERLVKVTLYGSQIKLYNIETAVPSVLKPDLIDVHAQSLAALQAYSHWLAQYCSEVHRQNTQQFVTLISTTMDAITPLISTKVQDKLLLSACHLLVSLATTVRPVFLISIPAVQKVFNRITDASALRLVDKAQVLVCRALSNILLLPWPNLPENEQQWPVRSINHASLISALSRDYRNLKPSAVAPQRKMPLDDTKLIIHQTLSVLEDIVENISGESTKSRQICYQSLQESVQVSLALFPAFIHQSDVTDEMLSFFLTLFRGLRVQMGVPFTEQIIQTFLNMFTREQLAESILHEGSTGCRVVEKFLKILQVVVQEPGQVFKPFLPSIIALCMEQVYPIIAERPSPDVKAELFELLFRTLHHNWRYFFKSTVLASVQRGIAEEQMENEPQFSAIMQAFGQSFLQPDIHLFKQNLFYLETLNTKQKLYHKKIFRTAMLFQFVNVLLQVLVHKSHDLLQEEIGIAIYNMASVDFDGFFAAFLPEFLTSCDGVDANQKSVLGRNFKMDRDLPSFTQNVHRLVNDLRYYRLCNDSLPPGTVKL

SEQ ID NO: 844465 - protein, 1125 aa, Homo sapiens
MASEEASLRALESLMTEFFHDCTTNERKREIEELLNNFAQQIGAWRFCLYFLSSTRNDYVMMYSLTVFENLINKMWLGVPSQDKMEIRSCLPKLLLAHHKTLPYFIRNKLCKVIVDIGRQDWPMFYHDFFTNILQLIQSPVTTPLGLIMLKTTSEELACPREDLSVARKEELRKLLLDQVQTVLGLLTGILETVWDKHSVTAATPPPSPTSGESGDLLSNLLQSPSSAKLLNQPIPILDVESEYICSLALECLAHLFSWIPLSASITPSLLTTIFHFARFGCDIRARKMASVNGSSQNCVSGQERGRLGVLAMSCINELMSKNCVPMEFEEYLLRMFQQTFYLLQKITKDNNAHTVKSRLEELDESYIEKFTDFLRLFVSVHLRRIESYSQFPVVEFLTLLFKYTFHQPTHEGYFSCLDIWTLFLDYLTSKIKSRLGDKEAVLNRYEDALVLLLTEVLNRIQFRYNQAQLEELDDETLDDDQQTEWQRYLRQSLEVVAKVMELLPTHAFSTLFPVLQDNLEVYLGLQQFIVTSGSGHRLNITAENDCRRLHCSLRDLSSLLQAVGRLAEYFIGDVFAARFNDALTVVERLVKVTLYGSQIKLYNIETAVPSVLKPDLIDVHAQSLAALQAYSHWLAQYCSEVHRQNTQQFVTLISTTMDAITPLISTKVQDKLLLSACHLLVSLATTVRPVFLISIPAVQKVFNRITDASALRLVDKAQVLVCRALSNILLLPWPNLPENEQQWPVRSINHASLISALSRDYRNLKPSAVAPQRKMPLDDTKLIIHQTLSVLEDIVENISGESTKSRQICYQSLQESVQVSLALFPAFIHQSDVTDEMLSFFLTLFRGLRVQMGVPFTEQIIQTFLNMFTREQLAESILHEGSTGCRVVEKFLKILQVVVQEPGQVFKPFLPSIIALCMEQVYPIIAERPSPDVKAELFELLFRTLHHNWRYFFKSTVLASVQRGIAEEQMENEPQFSAIMQAFGQSFLQPDIHLFKQNLFYLETLNTKQKLYHKKIFRTAMLFQFVNVLLQVLVHKSHDLLQEEIGIAIYNMASVDFDGFFAAFLPEFLTSCDGVDANQKSVLGRNFKMDRDLPSFTQNVHRLVNDLRYYRLCNDSLPPGTVKL

SEQ ID NO: 844466 - protein, 591 aa, Homo sapiens
MSTVHEILCKLSLEGDHSTPPSAYGSVKAYTNFDAERDALNIETAIKTKGVDEVTLVKVTLYGSQIKLYNIETAVPSVLKPDLIDVHAQSLAALQAYSHWLAQYCSEVHRQNTQQFVTLISTTMDAITPLISTKVQDKLLLSACHLLVSLATTVRPVFLISIPAVQKVFNRITDASALRLVDKAQVLVCRALSNILLLPWPNLPENEQQWPVRSINHASLISALSRDYRNLKPSAVAPQRKMPLDDTKLIIHQTLSVLEDIVENISGESTKSRQICYQSLQESVQVSLALFPAFIHQSDVTDEMLSFFLTLFRGLRVQMGVPFTEQIIQTFLNMFTREQLAESILHEGSTGCRVVEKFLKILQVVVQEPGQVFKPFLPSIIALCMEQVYPIIAERPSPDVKAELFELLFRTLHHNWRYFFKSTVLASVQRGIAEEQMENEPQFSAIMQAFGQSFLQPDIHLFKQNLFYLETLNTKQKLYHKKIFRTAMLFQFVNVLLQVLVHKSHDLLQEEIGIAIYNMASVDFDGFFAAFLPEFLTSCDGVDANQKSVLGRNFKMDRDLPSFTQNVHRLVNDLRYYRLCNDSLPPGTVKL

SEQ ID NO: 844467 - protein, 1145 aa, Homo sapiens
MASEEASLRALESLMTEFFHDCTTNERKREIEELLNNFAQQIGAWRFCLYFLSSTRNDYVMMYSLTVFENLINKMWLGVPSQDKMEIRSCLPKLLLAHHKTLPYFIRNKLCKVIVDIGRQDWPMFYHDFFTNILQLIQSPVTTPLGLIMLKTTSEELACPREDLSVARKEELRKLLLDQVQTVLGLLTGILETVWDKHSVTAATPPPSPTSGESGDLLSNLLQSPSSAKLLNQPIPILDVESEYICSLALECLAHLFSWIPLSASITPSLLTTIFHFARFGCDIRARKMASVNGSSQNCVSGQERGRLGVLAMSCINELMSKNCVPMEFEEYLLRMFQQTFYLLQKITKDNNAHTVKSRLEELDESYIEKFTDFLRLFVSVHLRRIESYSQFPVVEFLTLLFKYTFHQPTHEGYFSCLDIWTLFLDYLTSKIKSRLGDKEAVLNRYEDALVLLLTEVLNRIQFRYNQAQLEELDDETLDDDQQTEWQRYLRQSLEVVAKVMELLPTHAFSTLFPVLQDNLEVYLGLQQFIVTSGSGHRLNITAENDCRRLHCSLRDLSSLLQAVGRLAEYFIGDVFAARFNDALTVVERLVKVTLYGSQIKLYNIETAVPSVLKPDLIDVHAQSLAALQAYSHWLAQYCSEVHRQNTQQFVTLISTTMDAITPLISTKVQDKLLLSACHLLVSLATTVRPVFLISIPAVQKVFNRITDASALRLVDKAQVLVCRALSNILLLPWPNLPENEQQWPVRSINHASLISALSRDYRNLKPSAVAPQRKMPLDDTKLIIHQTLSVLEDIVENISGESTKSRQICYQSLQESVQVSLALFPAFIHQSDVTDEMLSFFLTLFRGLRVQMGVPFTEQIIQTFLNMFTREQLAESILHEGSTGCRVVEKFLKILQVVVQEPGQVFKPFLPSIIALCMEQVYPIIAERPSPDVKAELFELLFRTLHHNWRYFFKSTVLASVQRGIAEEQMENEPQFSAIMQAFGQSFLQPDIHLFKQNLFYLETLNTKQKLYHKKIFRTAMLFQFVNVLLQVLVHKSHDLLQEEIGIAIYNMASVDFDGFFAAFLPEFLTSCDGVDANQKSVLGRNFKMDRVRRERGRAKRRAEWARKPGTCAARRGHIEASGRGLCPPCSLAAAHEMPADLVL

SEQ ID NO: 844468 - protein, 258 aa, Homo sapiens
MYTREQLAESILHEGSTGCRVVEKFLKILQVVVQEPGQVFKPFLPSIIALCMEQVYPIIAERPSPDVKAELFELLFRTLHHNWRYFFKSTVLASVQRGIAEEQMENEPQFSAIMQAFGQSFLQPDIHLFKQNLFYLETLNTKQKLYHKKIFRTAMLFQFVNVLLQVLVHKSHDLLQEEIGIAIYNMASVDFDGFFAAFLPEFLTSCDGVDANQKSVLGRNFKMDRDLPSFTQNVHRLVNDLRYYRLCNDSLPPGTVKL

SEQ ID NO: 844469 - protein, 482 aa, Homo sapiens
MASEEASLRALESLMTEFFHDCTTNERKREIEELLNNFAQQIGAWRFCLYFLSSTRNDYVMMYSLTVFENLINKMWLGVPSQDKMEIRSCLPKLLLAHHKTLPYFIRNKLCKVIVDIGRQDWPMFYHDFFTNILQLIQSPVTTPLGLIMLKTTSEELACPREDLSVARKEELRKLLLDQVQTVLGLLTGILETVWDKHSVTAATPPPSPTSGESGDLLSNLLQSPSSAKLLNQPIPILDVESEYICSLALECLAHLFSWIPLSASITPSLLTTIFHFARFGCDIRARKMASVNGSSQNCVSGQERGRLGVLAMSCINELMSKNCVPMEFEEYLLRMFQQTFYLLQKITKDNNAHTVKSRLEELDESYIEKFTDFLRLFVSVHLRRIESYSQFPVVEFLTLLFKYTFHQPTHEGYFSCLDIWTLFLDYLTSKIKSRLGELSDSPFSSPTSTFLNKISSTWRLSTPSRSCTTRRSSGLPCCSSL

SEQ ID NO: 844470 - protein, 230 aa, Homo sapiens [sequence omitted]

SEQ ID NO: 844471 - protein, 620 aa, Homo sapiens
MASEEASLRALESLMTEFFHDCTTNERKREIEELLNNFAQQIGAWRFCLYFLSSTRNDYVMMYSLTVFENLINKMWLGVPSQDKMEIRSCLPKLLLAHHKTLPYFIRNKLCKVIVDIGRQDWPMFYHDFFTNILQLIQSPVTTPLGLIMLKTTSEELACPREDLSVARKEELRKLLLDQVQTVLGLLTGILETVWDKHSVTAATPPPSPTSGESGDLLSNLLQSPSSAKLLNQPIPILDVESEYICSLALECLAHLFSWIPLSASITPSLLTTIFHFARFGCDIRARKMASVNGSSQNCVSGQERGRLGVLAMSCINELMSKNCVPMEFEEYLLRMFQQTFYLLQKITKDNNAHTVKSRLEELDESYIEKFTDFLRLFVSVHLRRIESYSQFPVVEFLTLLFKYTFHQPTHEGYFSCLDIWTLFLDYLTSKIKSRLGDKEAVLNRYEDALVLLLTEVLNRIQFRYNQAQLEELDDETLDDDQQTEWQRYLRQSLEVVAKVMELLPTHAFSTLFPVLQDNLEVYLGLQQFIVTSGSGHRLNITAENDCRRLHCSLRDLSSLLQAVGRLAEYFIGDVFAARFNDALTVVERLVKVTLYGSQIKLYNIETAVPSVLKPDLIDV

SEQ ID NO: 844472 - protein, 630 aa, Homo sapiens
MASEEASLRALESLMTEFFHDCTTNERKREIEELLNNFAQQIGAWRFCLYFLSSTRNDYVMMYSLTVFENLINKMWLGVPSQDKMEIRSCLPKLLLAHHKTLPYFIRNKLCKVIVDIGRQDWPMFYHDFFTNILQLIQSPVTTPLGLIMLKTTSEELACPREDLSVARKEELRKLLLDQVQTVLGLLTGILETVWDKHSVTAATPPPSPTSGESGDLLSNLLQSPSSAKLLNQPIPILDVESEYICSLALECLAHLFSWIPLSASITPSLLTTIFHFARFGCDIRARKMASVNGSSQNCVSGQERGRLGVLAMSCINELMSKNCVPMEFEEYLLRMFQQTFYLLQKITKDNNAHTVKSRLEELDESYIEKFTDFLRLFVSVHLRRIESYSQFPVVEFLTLLFKYTFHQPTHEGYFSCLDIWTLFLDYLTSKIKSRLGDKEAVLNRYEDALVLLLTEVLNRIQFRYNQAQLEELDDETLDDDQQTEWQRYLRQSLEVVAKVMELLPTHAFSTLFPVLQDNLEVYLGLQQFIVTSGSGHRLNITAENDCRRLHCSLRDLSSLLQAVGRLAEYFIGDVFAARFNDALTVVERLVKVTLYGSQIKLYNIETAVPSVLKPDLIDVHAHHKDGPSS

SEQ ID NO: 844473 - protein, 414 aa, Homo sapiens
MASEEASLRALESLMTEFFHDCTTNERKREIEELLNNFAQQIGAWRFCLYFLSSTRNDYVMMYSLTVFENLINKMWLGVPSQDKMEIRSCLPKLLLAHHKTLPYFIRNKLCKVIVDIGRQDWPMFYHDFFTNILQLIQSPVTTPLGLIMLKTTSEELACPREDLSVARKEELRKLLLDQVQTVLGLLTGILETVWDKHSVTAATPPPSPTSGESGDLLSNLLQSPSSAKLLNQPIPILDVESEYICSLALECLAHLFSWIPLSASITPSLLTTIFHFARFGCDIRARKMASVNGSSQNCVSGQERGRLGVLAMSCINELMSKNCVPMEFEEYLLRMFQQTFYLLQKITKDNNAHTVKSRLEELDESYIEKFTDFLRLFVSVHLRRIESYSQFPVVEFLTLLFKYTFHQSTHEGY

SEQ ID NO: 844474 - protein, 217 aa, Homo sapiens
  misc_feature (206)..(206): Xaa can be any naturally occurring amino acid
MASEEASLRALESLMTEFFHDCTTNERKREIEELLNNFAQQIGAWRFCLYFLSSTRNDYVMMYSLTVFENLINKMWLGVPSQDKMEIRSCLPKLLLAHHKTLPYFIRNKLCKVIVDIGRQDWPMFYHDFFTNILQLIQSPVTTPLGLIMLKTTSEELACPREDLSVARKEELRKLLLDQVQTVLGLLTEMGQALQSQGTDILTLHXQGWELLIQQFG

SEQ ID NO: 844475 - protein, 39 aa, Homo sapiens
MGKWNWSPLPSWGALPEGWEWAPGLLSHRCSPHGGERRV

SEQ ID NO: 844476 - protein, 801 aa, Homo sapiens
LNLSSKEVAGFLIVTFCLVSFSYIEKFTDFLRLFVSVHLRRIESYSQFPVVEFLTLLFKYTFHQPTHEGYFSCLDIWTLFLDYLTSKIKSRLGDKEAVLNRYEDALVLLLTEVLNRIQFRYNQAQLEELDDETLDDDQQTEWQRYLRQSLEVVAKVMELLPTHAFSTLFPVLQDNLEVYLGLQQFIVTSGSGHRLNITAENDCRRLHCSLRDLSSLLQAVGRLAEYFIGDVFAARFNDALTVVERLVKVTLYGSQIKLYNIETAVPSVLKPDLIDVHAQSLAALQAYSHWLAQYCSEVHRQNTQQFVTLISTTMDAITPLISTKVQDKLLLSACHLLVSLATTVRPVFLISIPAVQKVFNRITDASALRLVDKAQVLVCRALSNILLLPWPNLPENEQQWPVRSINHASLISALSRDYRNLKPSAVAPQRKMPLDDTKLIIHQTLSVLEDIVENISGESTKSRQICYQSLQESVQVSLALFPAFIHQSDVTDEMLSFFLTLFRGLRVQMGVPFTEQIIQTFLNMFTREQLAESILHEGSTGCRVVEKFLKILQVVVQEPGQVFKPFLPSIIALCMEQVYPIIAERPSPDVKAELFELLFRTLHHNWRYFFKSTVLASVQRGIAEEQMENEPQFSAIMQAFGQSFLQPDIHLFKQNLFYLETLNTKQKLYHKKIFRTAMLFQFVNVLLQVLVHKSHDLLQEEIGIAIYNMASVDFDGFFAAFLPEFLTSCDGVDANQKSVLGRNFKMDRVRRERGRAKRRAEWARKPGTCAARRGHIEASGRGLCPPCSLAAAHEMPADLVL

SEQ ID NO: 844477 - protein, 1125 aa, Homo sapiens; identical to SEQ ID NO: 844465

SEQ ID NO: 844478 - protein, 891 aa, Homo sapiens
YGAGVNCYEFVVRFTWTCLAHLFSWIPLSASITPSLLTTIFHFARFGCDIRARKMASVNGSSQNCVSGQERGRLGVLAMSCINELMSKNCVPMEFEEYLLRMFQQTFYLLQKITKDNNAHTVKSRLEELDESYIEKFTDFLRLFVSVHLRRIESYSQFPVVEFLTLLFKYTFHQPTHEGYFSCLDIWTLFLDYLTSKIKSRLGDKEAVLNRYEDALVLLLTEVLNRIQFRYNQAQLEELDDETLDDDQQTEWQRYLRQSLEVVAKVMELLPTHAFSTLFPVLQDNLEVYLGLQQFIVTSGSGHRLNITAENDCRRLHCSLRDLSSLLQAVGRLAEYFIGDVFAARFNDALTVVERLVKVTLYGSQIKLYNIETAVPSVLKPDLIDVHAQSLAALQAYSHWLAQYCSEVHRQNTQQFVTLISTTMDAITPLISTKVQDKLLLSACHLLVSLATTVRPVFLISIPAVQKVFNRITDASALRLVDKAQVLVCRALSNILLLPWPNLPENEQQWPVRSINHASLISALSRDYRNLKPSAVAPQRKMPLDDTKLIIHQTLSVLEDIVENISGESTKSRQICYQSLQESVQVSLALFPAFIHQSDVTDEMLSFFLTLFRGLRVQMGVPFTEQIIQTFLNMFTREQLAESILHEGSTGCRVVEKFLKILQVVVQEPGQVFKPFLPSIIALCMEQVYPIIAERPSPDVKAELFELLFRTLHHNWRYFFKSTVLASVQRGIAEEQMENEPQFSAIMQAFGQSFLQPDIHLFKQNLFYLETLNTKQKLYHKKIFRTAMLFQFVNVLLQVLVHKSHDLLQEEIGIAIYNMASVDFDGFFAAFLPEFLTSCDGVDANQKSVLGRNFKMDRDLPSFTQNVHRLVNDLRYYRLCNDSLPPGTVKL

SEQ ID NO: 844479 - protein, 774 aa, Homo sapiens [sequence omitted]

SEQ ID NO: 844480 - protein, 743 aa, Homo sapiens
MASEEASLRALESLMTEFFHDCTTNERKREIEELLNNFAQQIGAWRFCLYFLSSTRNDYVMMYSLTVFENLINKMWLGVPSQDKMEIRSCLPKLLLAHHKTLPYFIRNKLCKVIVDIGRQDWPMFYHDFFTNILQLIQSPVTTPLGLIMLKTTSEELACPREDLSVARKEELRKLLLDQVQTVLGLLTGILETVWDKHSVTAATPPPSPTSGESGDLLSNLLQSPSSAKLLNQPIPILDVESEYICSLALECLAHLFSWIPLSASITPSLLTTIFHFARFGCDIRARKMASVNGSSQNCVSGQERGRLGVLAMSCINELMSKNCVPMEFEEYLLRMFQQTFYLLQKITKDNNAHTVKSRLEELDESYIEKFTDFLRLFVSVHLRRIESYSQFPVVEFLTLLFKYTFHQPTHEGYFSCLDIWTLFLDYLTSKIKSRLGDKEAVLNRYEDALVLLLTEVLNRIQFRYNQAQLEELDDETLDDDQQTEWQRYLRQSLEVVAKVMELLPTHAFSTLFPVLQDNLEVYLGLQQFIVTSGSGHRLNITAENDCRRLHCSLRDLSSLLQAVGRLAEYFIGDVFAARFNDALTVVERLVKVTLYGSQIKLYNIETAVPSVLKPDLIDVHAQSLAALQAYSHWLAQYCSEVHRQNTQQFVTLISTTMDAITPLISTKVQDKLLLSACHLLVSLATTVRPVFLISIPAVQKVFNRITDASALRLVDKRMSSSGPCAPSTTPASSLHSPGTIAT

SEQ ID NO: 844481 - protein, 1118 aa, Homo sapiens
MASEEASLRALESLMTEFFHDCTTNERKREIEELLNNFAQQIGAWRFCLYFLSSTRNDYVMMYSLTVFENLINKMWLGVPSQDKMEIRSCLPKLLLAHHKTLPYFIRNKLCKVIVDIGRQDWPMFYHDFFTNILQLIQSPVTTPLGLIMLKTTSEELACPREDLSVARKEELRKLLLDQVQTVLGLLTGILETVWDKHSVTAATPPPSPTSGESGDLLSNLLQSPSSAKLLNQPIPILDVESEYICSLALECLAHLFSWIPLSASITPSLLTTIFHFARFGCDIRARKMASVNGSSQNCVSGQERGRLGVLAMSCINELMSKNCVPMEFEEYLLRMFQQTFYLLQKITKDNNAHTVKSRLEELDESYIEKFTDFLRLFVSVHLRRIESYSQFPVVEFLTLLFKYTFHQPTHEGYFSCLDIWTLFLDYLTSKIKSRLGDKEAVLNRYEDALVLLLTEVLNRIQFRYNQAQLEELDDETLDDDQQTEWQRYLRQSLEVVAKVMELLPTHAFSTLFPVLQDNLEVYLGLQQFIVTSGSGHRLNITAENDCRRLHCSLRDLSSLLQAVGRLAEYFIGDVFAARFNDALTVVERLVKVTLYGSQIKLYNIETAVPSVLKPDLIDVHAQSLAALQAYSHWLAQYCSEVHRQNTQQFVTLISTTMDAITPLISTKVQDKLLLSACHLLVSLATTVRPVFLISIPAVQKVFNRITDASALRLVDKAQVLVCRALSNILLLPWPNLPENEQQWPVRSINHASLISALSRDYRNLKPSAVAPQRKMPLDDTKLIIHQTLSVLEDIVENISGESTKSRQICYQSLQESVQVSLALFPAFIHQSDVTDEMLSFFLTLFRGLRVQMGVPFTEQIIQTFLNMFTREQLAESILHEGSTGCRVVEKFLKILQVVVQEPGQVFKPFLPSIIALCMEQVYPIIAERPSPDVKAELFELLFRTLHHNWRYFFKSTVLASVQRGIAEEQMENEPQFSAIMQAFGQSFLQPDIHLFKQNLFYLETLNTKQKLYHKKIFRTAMLFQFVNVLLQVLVHKSHDLLQEEIGIAIYNMASVDFDGFFAAFLPEFLTSCDGVDANQKSVLGRNFKMDRNVHRLVNDLRYYRLCNDSLPPGTVKL

SEQ ID NO: 844482 - protein, 602 aa, Homo sapiens
KGGRGRAAEDVSTGRAVTPAENDCRRLHCSLRDLSSLLQAVGRLAEYFIGDVFAARFNDALTVVERLVKVTLYGSQIKLYNIETAVPSVLKPDLIDVHAQSLAALQAYSHWLAQYCSEVHRQNTQQFVTLISTTMDAITPLISTKVQDKLLLSACHLLVSLATTVRPVFLISIPAVQKVFNRITDASALRLVDKAQVLVCRALSNILLLPWPNLPENEQQWPVRSINHASLISALSRDYRNLKPSAVAPQRKMPLDDTKLIIHQTLSVLEDIVENISGESTKSRQICYQSLQESVQVSLALFPAFIHQSDVTDEMLSFFLTLFRGLRVQMGVPFTEQIIQTFLNMFTREQLAESILHEGSTGCRVVEKFLKILQVVVQEPGQVFKPFLPSIIALCMEQVYPIIAERPSPDVKAELFELLFRTLHHNWRYFFKSTVLASVQRGIAEEQMENEPQFSAIMQAFGQSFLQPDIHLFKQNLFYLETLNTKQKLYHKKIFRTAMLFQFVNVLLQVLVHKSHDLLQEEIGIAIYNMASVDFDGFFAAFLPEFLTSCDGVDANQKSVLGRNFKMDRDLPSFTQNVHRLVNDLRYYRLCNDSLPPGTVKL

SEQ ID NO: 844483 - protein, 397 aa, Homo sapiens
CCAPAVLRSRRCALPPVVRSINHASLISALSRDYRNLKPSAVAPQRKMPLDDTKLIIHQTLSVLEDIVENISGESTKSRQICYQSLQESVQVSLALFPAFIHQSDVTDEMLSFFLTLFRGLRVQMGVPFTEQIIQTFLNMFTREQLAESILHEGSTGCRVVEKFLKILQVVVQEPGQVFKPFLPSIIALCMEQVYPIIAERPSPDVKAELFELLFRTLHHNWRYFFKSTVLASVQRGIAEEQMENEPQFSAIMQAFGQSFLQPDIHLFKQNLFYLETLNTKQKLYHKKIFRTAMLFQFVNVLLQVLVHKSHDLLQEEIGIAIYNMASVDFDGFFAAFLPEFLTSCDGVDANQKSVLGRNFKMDRDLPSFTQNVHRLVNDLRYYRLCNDSLPPGTVKL

SEQ ID NO: 844484 - protein, 1145 aa, Homo sapiens; identical to SEQ ID NO: 844467

SEQ ID NO: 844485 - protein, 942 aa, Homo sapiens
MASEEASLRALESLMTEFFHDCTTNERKREIEELLNNFAQQIGAWRFCLYFLSSTRNDYVMMYSLTVFENLINKMWLGVPSQDKMEIRSCLPKLLLAHHKTLPYFIRNKLCKVIVDIGRQDWPMFYHDFFTNILQLIQSPVTTPLGLIMLKTTSEELACPREDLSVARKEELRKLLLDQVQTVLGLLTGILETVWDKHSVTAATPPPSPTSGESGDLLSNLLQSPSSAKLLNQPIPILDVESEYICSLALECLAHLFSWIPLSASITPSLLTTIFHFARFGCDIRARKMASVNGSSQNCVSGQERGRLGVLAMSCINELMSKNCVPMEFEEYLLRMFQQTFYLLQKITKDNNAHTVKSRLEELDESYIEKFTDFLRLFVSVHLRRIESYSQFPVVEFLTLLFKYTFHQPTHEGYFSCLDIWTLFLDYLTSKIKSRLGDKEAVLNRYEDALVLLLTEVLNRIQFRYNQAQLEELDDETLDDDQQTEWQRYLRQSLEVVAKVMELLPTHAFSTLFPVLQDNLEVYLGLQQFIVTSGSGHRLNITAENDCRRLHCSLRDLSSLLQAVGRLAEYFIGDVFAARFNDALTVVERLVKVTLYGSQIKLYNIETAVPSVLKPDLIDVHAQSLAALQAYSHWLAQYCSEVHRQNTQQFVTLISTTMDAITPLISTKVQDKLLLSACHLLVSLATTVRPVFLISIPAVQKVFNRITDASALRLVDKAQVLVCRALSNILLLPWPNLPENEQQWPVRSINHASLISALSRDYRNLKPSAVAPQRKMPLDDTKLIIHQTLSVLEDIVENISGESTKSRQICYQSLQESVQVSLALFPAFIHQSDVTDEMLSFFLTLFRGLRVQMGVPFTEQIIQTFLNMFTREQLAESILHEGSTGCRVVEKFLKILQVVVQEPGQVFKPFLPSIIALCMEQVYPIIAERPSLMEASRMVPSY

SEQ ID NO: 844486 - protein, 137 aa, Homo sapiens
RPRGTSGRLQGGRAQGCSRGRRQWPCGLRLRGQRGPPGLSPEPAAWAARSRPVSLRPFSLGAGAAATSARGGRGAPAWARSLPRGGRARAGVPSSCPPRRHPSLISCFFSFLGEGRVGLDELSRGPPMRRPGRPCPF

SEQ ID NO: 844487 - protein, 743 aa, Homo sapiens; identical to SEQ ID NO: 844480

SEQ ID NO: 844488 - protein, 693 aa, Homo sapiens
MASEEASLRALESLMTEFFHDCTTNERKREIEELLNNFAQQIGAWRFCLYFLSSTRNDYVMMYSLTVFENLINKMWLGVPSQDKMEIRSCLPKLLLAHHKTLPYFIRNKLCKVIVDIGRQDWPMFYHDFFTNILQLIQSPVTTPLGLIMLKTTSEELACPREDLSVARKEELRKLLLDQVQTVLGLLTGILETVWDKHSVTAATPPPSPTSGESGDLLSNLLQSPSSAKLLNQPIPILDVESEYICSLALECLAHLFSWIPLSASITPSLLTTIFHFARFGCDIRARKMASVNGSSQNCVSGQERGRLGVLAMSCINELMSKNCVPMEFEEYLLRMFQQTFYLLQKITKDNNAHTVKSRLEELDESYIEKFTDFLRLFVSVHLRRIESYSQFPVVEFLTLLFKYTFHQPTHEGYFSCLDIWTLFLDYLTSKIKSRLGDKEAVLNRYEDALVLLLTEVLNRIQFRYNQAQLEELDDETLDDDQQTEWQRYLRQSLEVVAKVMELLPTHAFSTLFPVLQDNLEVYLGLQQFIVTSGSGHRLNITAENDCRRLHCSLRDLSSLLQAVGRLAEYFIGDVFAARFNDALTVVERLVKVTLYGSQIKLYNIETAVPSVLKPDLIDVHAQSLAALQAYSHWLAQYCSEVHRQNTQQFVTLISTTMDAITPLISTKSRKLCYRWHYGSGTTWRFGQSGQVP

SEQ ID NO: 844489 - protein, 545 aa, Homo sapiens
MASEEASLRALESLMTEFFHDCTTNERKREIEELLNNFAQQIGAWRFCLYFLSSTRNDYVMMYSLTVFENLINKMWLGVPSQDKMEIRSCLPKLLLAHHKTLPYFIRNKLCKVIVDIGRQDWPMFYHDFFTNILQLIQSPVTTPLGLIMLKTTSEELACPREDLSVARKEELRKLLLDQVQTVLGLLTGILETVWDKHSVTAATPPPSPTSGESGDLLSNLLQSPSSAKLLNQPIPILDVESEYICSLALECLAHLFSWIPLSASITPSLLTTIFHFARFGCDIRARKMASVNGSSQNCVSGQERGRLGVLAMSCINELMSKNCVPMEFEEYLLRMFQQTFYLLQKITKDNNAHTVKSRLEELDESYIEKFTDFLRLFVSVHLRRIESYSQFPVVEFLTLLFKYTFHQPTHEGYFSCLDIWTLFLDYLTSKIKSRLGDKEAVLNRYEDALVLLLTEVLNRIQFRYNQAQLEELDDETLDDDQQTEWQRYLRQSLEVVAKVMELLPTHAFSTLFPVLQDNLEVYLGFDDKCQHQGQETNDYRYRAD

SEQ ID NO: 844490 - protein, 371 aa, Homo sapiens
MASEEASLRALESLMTEFFHDCTTNERKREIEELLNNFAQQIGAWRFCLYFLSSTRNDYVMMYSLTVFENLINKMWLGVPSQDKMEIRSCLPKLLLAHHKTLPYFIRNKLCKVIVDIGRQDWPMFYHDFFTNILQLIQSPVTTPLGLIMLKTTSEELACPREDLSVARKEELRKLLLDQVQTVLGLLTGILETVWDKHSVTAATPPPSPTSGESGDLLSNLLQSPSSAKLLNQPIPILDVESEYICSLALECLAHLFSWIPLSASITPSLLTTIFHFARFGCDIRARKMASVNGSSQNCVSGQERGRLGVLAMSCINELMSKNCVPMEFEEYLLRMFQQTFYLLQKITKDNNAHTVKSRLEELDERIWGSW

SEQ ID NO: 844491 - protein, 568 aa, Homo sapiens
AVAVAAASRRQSCYLCDLPRMPWAMIWDFTEPVCRGCVNYEGADRVEFVIETARQLKRAHGCFPEGRSPPGAAAPAAAKPPPLSAKDILLQQQQQLGHGGPEAAPRAPQALERYPLAAAAERPPRLGSDFGSSRPAASLAQPPTPQPPPVNGILVPNGFSKLEEPPELNRQSPNPRRGHAVPPTLVPLMNGSATPLPTALGLGGRAAASLAAVSGTAAASLGSAQPTDLGAHKRPASVSSSAAVEHEQREAAAKEKQPPPPAHRGPADSLSTAAGAAELSAEGAGKSRGSGEQDWVNRPKTVRDTLLALHQHGHSGPFESKFKKEPALTAVARTARKRKPSPEPEGEVGPPKINGEAQPWLSTSTEGLKIPMTPTSSFVSPPPPTASPHSNRTTPPEAAQNGQSPMAALILVADNAGGSHASKDANQVHSTTRRNSNSPPSPSSMNQRRLGPREVGGQGAGNTGGLEPVHPASLPDSSLATSAPLCCTLCHERLEDTHFVQCPSVPSHKFCFPCSRQSIKQQGASGEVYCPSGEKCPLVGSNVPWAFMQGEIATILAGDVKVKKERDS

SEQ ID NO: 844492 - protein, 532 aa, Homo sapiens
GWPLTLALESGDARSCERALKRAHGCFPEGRSPPGAAAPAAAKPPPLSAKDILLQQQQQLGHGGPEAAPRAPQALERYPLAAAAERPPRLGSDFGSSRPAASLAQPPTPQPPPVNGILVPNGFSKLEEPPELNRQSPNPRRGHAVPPTLVPLMNGSATPLPTALGLGGRAAASLAAVSGTAAASLGSAQPTDLGAHKRPASVSSSAAVEHEQREAAAKEKQPPPPAHRGPADSLSTAAGAAELSAEGAGKSRGSGEQDWVNRPKTVRDTLLALHQHGHSGPFESKFKKEPALTAVARTARKRKPSPEPEGEVGPPKINGEAQPWLSTSTEGLKIPMTPTSSFVSPPPPTASPHSNRTTPPEAAQNGQSPMAALILVADNAGGSHASKDANQVHSTTRRNSNSPPSPSSMNQRRLGPREVGGQGAGNTGGLEPVHPASLPDSSLATSAPLCCTLCHERLEDTHFVQCPSVPSHKFCFPCSRQSIKQQGASGEVYCPSGEKCPLVGSNVPWAFMQGEIATILAGDVKVKKERDS

SEQ ID NO: 844493 - protein, 584 aa, Homo sapiens
AVAVAAASRRQSCYLCDLPRMPWAMIWDFTEPVCRGCVNYEGADRVEFVIETARQLKRAHGCFPEGRSPPGAAAPAAAKPPPLSAKDILLQQQQQLGHGGPEAAPRAPQALERYPLAAAAERPPRLGSDFGSSRPAASLAQPPTPQPPPVNGILVPNGFSKLEEPPELNRQSPNPRRGHAVPPTLVPLMNGSATPLPTALGLGGRAAASLAAVSGTAAASLGSAQPTDLGAHKRPASVSSSAAVEHEQREAAAKEKQPPPPAHRGPADSLSTAAGAAELSAEGAGKSRGSGEQDWVNRPKTVRDTLLALHQHGHSGPFESKFKKEPALTAGRLLGFEANGANGSKAVARTARKRKPSPEPEGEVGPPKINGEAQPWLSTSTEGLKIPMTPTSSFVSPPPPTASPHSNRTTPPEAAQNGQSPMAALILVADNAGGSHASKDANQVHSTTRRNSNSPPSPSSMNQRRLGPREVGGQGAGNTGGLEPVHPASLPDSSLATSAPLCCTLCHERLEDTHFVQCPSVPSHKFCFPCSRQSIKQQGASGEVYCPSGEKCPLVGSNVPWAFMQGEIATILAGDVKVKKERDS

SEQ ID NO: 844494 - protein, 568 aa, Homo sapiens; identical to SEQ ID NO: 844491

SEQ ID NO: 844495 - protein, 197 aa, Homo sapiens [sequence omitted]

SEQ ID NO: 844496 - protein, 260 aa, Homo sapiens
  misc_feature (13)..(13): Xaa can be any naturally occurring amino acid
EKKKEKRKEKERXSTKKTGLVAVARTARKRKPSPEPEGEVGPPKINGEAQPWLSTSTEGLKIPMTPTSSFVSPPPPTASPHSNRTTPPEAAQNGQSPMAALILVADNAGGSHASKDANQVHSTTRRNSNSPPSPSSMNQRRLGPREVGGQGAGNTGGLEPVHPASLPDSSLATSAPLCCTLCHERLEDTHFVQCPSVPSHKFCFPCSRQSIKQQGASGEVYCPSGEKCPLVGSNVPWAFMQGEIATILAGDVKVKKERDS

SEQ ID NO: 844497 - protein, 568 aa, Homo sapiens; identical to SEQ ID NO: 844491

SEQ ID NO: 844498 - protein, 568 aa, Homo sapiens; identical to SEQ ID NO: 844491

SEQ ID NO: 844499 - protein, 568 aa, Homo sapiens; identical to SEQ ID NO: 844491

SEQ ID NO: 844500 - protein, 568 aa, Homo sapiens; identical to SEQ ID NO: 844491

SEQ ID NO: 844501 - protein, 568 aa, Homo sapiens; identical to SEQ ID NO: 844491

SEQ ID NO: 844502 - protein, 533 aa, Homo sapiens
AVAVAAASRRQSCYLCDLPRMPWAMIWDFTEPVCRGCVNYEGADRVEFVIETARQLKRAHGCFPEGRSPPGAAAPAAAKPPPLSAKDILLQQQQQLGHGGPEAAPRAPQALERYPLAAAAERPPRLGSDFGSSRPAASLAQPPTPQPPPVNGILVPNGFSKLEEPPELNRQSPNPRRGHAVPPTLVPLMNGSATPLPTALGLGGRAAASLAAVSGTAAASLGSAQPTDLGAHKRPASVSSSAAVEHEQREAAAKEKQPPPPAHRGPADSLSTAAGAAELSAEGAGKSRGSGEQDWVNRPKTVRDTLLALHQHGHSGPFESKFKKEPALTAVARTARKRKPSPEPEGEVGPPKINGEAQPWLSTSTEGLKIPMTPTSSFVSPPPPTASPHSNRTTPPEAAQNGQSPMAALILVADNAGGSHASKDANQVHSTTRRNSNSPPSPSSMNQRRLGPREVGGQGAGNTGGLEPVHPASLPDSSLATSAPLCCTLCHERLEDTHFVQCPSVPSHKFCFPCSRQSIKQQGCLPNQATLYT

SEQ ID NO: 844503 - protein, 568 aa, Homo sapiens; identical to SEQ ID NO: 844491

SEQ ID NO: 844504 - protein, 568 aa, Homo sapiens; identical to SEQ ID NO: 844491

SEQ ID NO: 844505 - protein, 473 aa, Homo sapiens
AVAVAAASRRQSCYLCDLPRMPWAMIWDFTEPVCRGCVNYEGADRVEFVIETARQLKRAHGCFPEGRSPPGAAAPAAAKPPPLSAKDILLQQQQQLGHGGPEAAPRAPQALERYPLAAAAERPPRLGSDFGSSRPAASLAQAADAAAAARERHPGAQRLLQARGAARLSAEGAGKSRGSGEQDWVNRPKTVRDTLLALHQHGHSGPFESKFKKEPALTAGRLLGFEANGANGSKAVARTARKRKPSPEPEGEVGPPKINGEAQPWLSTSTEGLKIPMTPTSSFVSPPPPTASPHSNRTTPPEAAQNGQSPMAALILVADNAGGSHASKDANQVHSTTRRNSNSPPSPSSMNQRRLGPREVGGQGAGNTGGLEPVHPASLPDSSLATSAPLCCTLCHERLEDTHFVQCPSVPSHKFCFPCSRQSIKQQGASGEVYCPSGEKCPLVGSNVPWAFMQGEIATILAGDVKVKKERDS

SEQ ID NO: 844506 - protein, 383 aa, Homo sapiens
AVAVAAASRRQSCYLCDLPRMPWAMIWDFTEPVCRGCVNYEGADRVEFVIETARQLKRAHGCFPEGRSPPGAAAPAAAKPPPLSAKDILLQQQQQLGHGGPEAAPRAPQALERYPLAAAAERPPRLGSDFGSSRPAASLAQPPTPQPPPVNGILVPNGFSKLEEPPELNRQSPNPRRGHAVPPTLVPLMNGSATPLPTALGLGGRAAASLAAVSGTAAASLGSAQPTDLGAHKRPASVSSSAAVEHEQREAAAKEKQPPPPAHRGPADSLSTAAGAAELSAEGAGKSRGSGEQDWVNRPKTVRDTLLALHQHGHSGPFESKFKKEPALTAGRLLGFEANGANGSKAVAVHIHRGAQDPHDSYILFCVSATTHCLTSFQPDHTA

SEQ ID NO: 844507 - protein, 197 aa, Homo sapiens [sequence omitted]

SEQ ID NO: 844508 - protein, 163 aa, Homo sapiens
MAALILVADNAGGSHASKDANQVHSTTRRNSNSPPSPSSMNQRRLGPREVGGQGAGNTGGLEPVHPASLPDSSLATSAPLCCTLCHERLEDTHFVQCPSVPSHKFCFPCSRQSIKQQGASGEVYCPSGEKCPLVGSNVPWAFMQGEIATILAGDVKVKKERDS

SEQ ID NO: 844509 - protein, 568 aa, Homo sapiens; identical to SEQ ID NO: 844491

SEQ ID NO: 844510 - protein, 601 aa, Homo sapiens
AVAVAAASRRQSCYLCDLPRMPWAMIWDFTEPVCRGCVNYEGADRVEFVIETARQLKRAHGCFPEGRSPPGAAAPAAAKPPPLSAKDILLQQQQQLGHGGPEAAPRAPQALERYPLAAAAERPPRLGSDFGSSRPAASLAQPPTPQPPPVNGILVPNGFSKLEEPPELNRQSPNPRRGHAVPPTLVPLMNGSATPLPTALGLGGRAAASLAAVSGTAAASLGSAQPTDLGAHKRPASVSSSAAVEHEQREAAAKEKQPPPPAHRGPADSLSTAAGAAELSAEGAGKSRGSGEQDWVNRPKTVRDTLLALHQHGHSGPFESKFKKEPALTAVARTARKRKPSPEPEGEVGPPKINGEAQPWLSTSTEGLKIPMTPTSSFVSPPPPTASPHSNRTTPPEAAQNGQSPMAALILVADNAGGSHASKDANQVHSTTRRNSNSPPSPSSMNQRRLGPREVGGQGAGNTGGLEPVHPASLPDSSLATSAPLCCTLCHERLEDTHFVQCPSVPSHKFCFPCSRQSIKQQGASGEVYCPSGEKCPLVGSNVPWAFMQGEIATILAGDVKVKNKKKTSRLVLSLLSQPYGPEPSLLTGADLSRSGVQAAG

SEQ ID NO: 844511 - protein, 413 aa, Homo sapiens
AVAVAAASRRQSCYLCDLPRMPWAMIWDFTEPVCRGCVNYEGADRVEFVIETARQLKRAHGCFPEGRSPPGAAAPAAAKPPPLSAKDILLQQQQQLGHGGPEAAPRAPQALERYPLAAAAERPPRLGSDFGSSRPAASLAQPPTPQPPPVNGILVPNGFSKLEEPPELNRQSPNPRRGHAVPPTLVPLMNGSATPLPTALGLGGRAAASLAAVSGTAAASLGSAQPTDLGAHKRPASVSSSAAVEHEQREAAAKEKQPPPPAHRGPADSLSTAAGAAELSAEGAGKSRGSGEQDWVNRPKTVRDTLLALHQHGHSGPFESKFKKEPALTAGRLLGFEANGANGSKAGRGGCEVRGSRGEKGTESRGRVVLWIHHFTPAQKQQTPHFLICLRRNQCLVATCSCLKQHNRDESDW

SEQ ID NO: 844512 - protein, 134 aa, Homo sapiens
MTVISVEKGTVCPRHFAFMLKRVEDSKPAEAGPLHPPVPRWVGGGGLFPGFPSTLSVVTTDYCVDNGKPGAEARSLTTRAWPPLQEDCHQKIDDLFSGKLYLIGIAAIVVAVIMIFEMILSMVLCCGIRNSSVY

SEQ ID NO: 844513 - protein, 159 aa, Homo sapiens
ATFRLIAGDSDFYVVSRIRIVKMISVQGRLMVDIARAALPIRCMSRWPAIIPGLIEAVVDDDANNAKAVVKTFHETLDCCGSSTLTALTTSVLKNNLCPSGSNIISNLFKEDCHQKIDDLFSGKLYLIGIAAIVVAVIMIFEMILSMVLCCGIRNSSVY

SEQ ID NO: 844514 - protein, 273 aa, Homo sapiens
HCAGKARNGGDGGDPTAHPARPPAPSGPRAPAAARAAMGVEGCTKCIKYLLFVFNFVFWLAGGVILGVALWLRHDPQTTNLLYLELGDKPAPNTFYVGIYILIAVGAVMMFVGFLGCYGAIQESQCLLGTFFTCLVILFACEVAAGIWGFVNKDQIAKDVKQFYDQALQQAVVDDDANNAKAVVKTFHETLDCCGSSTLTALTTSVLKNNLCPSGSNIISNLFKEDCHQKIDDLFSGKLYLIGIAAIVVAVIMIFEMILSMVLCCGIRNSSVY

SEQ ID NO: 844515 - protein, 225 aa, Homo sapiens
GGSRWQRGFPQLAGGVILGVALWLRHDPQTTNLLYLELGDKPAPNTFYVGIYILIAVGAVMMFVGFLGCYGAIQESQCLLGTFFTCLVILFACEVAAGIWGFVNKDQIAKDVKQFYDQALQQAVVDDDANNAKAVVKTFHETLDCCGSSTLTALTTSVLKNNLCPSGSNIISNLFKEDCHQKIDDLFSGKLYLIGIAAIVVAVIMIFEMILSMVLCCGIRNSSVY

SEQ ID NO: 844516 - protein, 305 aa, Homo sapiens
ITQRRTRAVACPSSMHPCCGVPVVCVACLSVHPCCGVPVVCVACLSVHPCVACPSSVHPCCGVPFVCSFYCRAGLHPHVQASDGPQVHPFTLAGGVILGVALWLRHDPQTTNLLYLELGDKPAPNTFYVGIYILIAVGAVMMFVGFLGCYGAIQESQCLLGTFFTCLVILFACEVAAGIWGFVNKDQIAKDVKQFYDQALQQAVVDDDANNAKAVVKTFHETLDCCGSSTLTALTTSVLKNNLCPSGSNIISNLFKEDCHQKIDDLFSGKLYLIGIAAIVVAVIMIFEMILSMVLCCGIRNSSVY

SEQ ID NO: 844517 - protein, 231 aa, Homo sapiens
QTQDVPLPAPEAPSPDELAGGVILGVALWLRHDPQTTNLLYLELGDKPAPNTFYVGIYILIAVGAVMMFVGFLGCYGAIQESQCLLGTFFTCLVILFACEVAAGIWGFVNKDQIAKDVKQFYDQALQQAVVDDDANNAKAVVKTFHETLDCCGSSTLTALTTSVLKNNLCPSGSNIISNLFKEDCHQKIDDLFSGKLYLIGIAAIVVAVIMIFEMILSMVLCCGIRNSSVY

SEQ ID NO: 844518 - protein, 242 aa, Homo sapiens
MEEVTEAQKTHQARLGCEVPCCSSLAVSNPTSSQLGGPWWVRHPGPSGVLGCGECVGTHLVSLSPQGIYILIAVGAVMMFVGFLGCYGAIQESQCLLGTFFTCLVILFACEVAAGIWGFVNKDQIAKDVKQFYDQALQQAVVDDDANNAKAVVKTFHETLDCCGSSTLTALTTSVLKNNLCPSGSNIISNLFKEDCHQKIDDLFSGKLYLIGIAAIVVAVIMIFEMILSMVLCCGIRNSSVY

SEQ ID NO: 844519 - protein, 138 aa, Homo sapiens
GRVGRPTRRAADLGLVNKDQIAKDVKQFYDQALQQAVVDDDANNAKAVVKTFHETLDCCGSSTLTALTTSVLKNNLCPSGSNIISNLFKEDCHQKIDDLFSGKLYLIGIAAIVVAVIMIFEMILSMVLCCGIRNSSVY

SEQ ID NO: 844520 - protein, 316 aa, Homo sapiens
IVLERRATAATAATPPRILPGLRRPAAHAPPRPRAPRPFLRAPAPRPARPPCRPPARPRAGPPAAQDRPAPRRPPAARAAMGVEGCTKCIKYLLFVFNFVFWLAGGVILGVALWLRHDPQTTNLLYLELGDKPAPNTFYVGIYILIAVGAVMMFVGFLGCYGAIQESQCLLGTFFTCLVILFACEVAAGIWGFVNKDQIAKDVKQFYDQALQQAVVDDDANNAKAVVKTFHETLDCCGSSTLTALTTSVLKNNLCPSGSNIISNLFKEDCHQKIDDLFSGKLYLIGIAAIVVAVIMIFEMILSMVLCCGIRNSSVY

SEQ ID NO: 844521 - protein, 316 aa, Homo sapiens; identical to SEQ ID NO: 844520

SEQ ID NO: 844522 - protein, 75 aa, Homo sapiens
VDMIESSSVPEHSCPSRQQHISNLFKEDCHQKIDDLFSGKLYLIGIAAIVVAVIMIFEMILSMVLCCGIRNSSVY

SEQ ID NO: 844523 - protein, 316 aa, Homo sapiens
IVLERRATAATAATPPRILPGLRRPAAHAPPRPRAPRPFLRAPAPRPARPPCRPPARPRAGPPAAQDRPAPRRPPAARAAMGVEGCTKCIKYLLFVFNFVFWLAGGVILGVALWLRHDPQTTNLLYLELGDKPAPNTFYVGIYILIAVGAVMMFVGFLGCYGAIQESQCLLGTFFTCLVILFACEVAAGIWGFVNKDQIAKDVKQFYDQALQQAVVDDDANNAKAVVKTFHETLDCCGSSTLTALTTSVLKNNLCPSGSNIISNLFKEDCHQKIDDLFSGKLYLIGIAAIVVAVIMVSGRGRRGCSLGCPFRGALC

SEQ ID NO: 844524 - protein, 229 aa, Homo sapiens
MAPFVHARAGKTKAQLAGGVILGVALWLRHDPQTTNLLYLELGDKPAPNTFYVGIYILIAVGAVMMFVGFLGCYGAIQESQCLLGTFFTCLVILFACEVAAGIWGFVNKDQIAKDVKQFYDQALQQAVVDDDANNAKAVVKTFHETLDCCGSSTLTALTTSVLKNNLCPSGSNIISNLFKEDCHQKIDDLFSGKLYLIGIAAIVVAVIMVSGRGRRGCSLGCPFRGALC

SEQ ID NO: 844525 - protein, 316 aa, Homo sapiens; identical to SEQ ID NO: 844520

SEQ ID NO: 844526 - protein, 316 aa, Homo sapiens; identical to SEQ ID NO: 844520

SEQ ID NO: 844527 - protein, 336 aa, Homo sapiens
IVLERRATAATAATPPRILPGLRRPAAHAPPRPRAPRPFLRAPAPRPARPPCRPPARPRAGPPAAQDRPAPRRPPAARAAMGVEGCTKCIKYLLFVFNFVFWLAGGVILGVALWLRHDPQTTNLLYLELGDKPAPNTFYVGIYILIAVGAVMMFVGFLGCYGAIQESQCLLGTFFTCLVILFACEVAAGIWGFVNKDQIAKDVKQFYDQALQQAVVDDDANNAKAVVKTFHETLDCCGSSTLTALTTSVLKNNLCPSGSNIISNLFKEDCHQKIDDLFSGKLYLIGIAAIVVAVIMIFEMILSMVLNDNLCIIGKVRISGRQGFYPNQQHKRQYNC

SEQ ID NO: 844528 - protein, 346 aa, Homo sapiens
IVLERRATAATAATPPRILPGLRRPAAHAPPRPRAPRPFLRAPAPRPARPPCRPPARPRAGPPAAQDRPAPRRPPAARAAMGVEGCTKCIKYLLFVFNFVFWLAGGVILGVALWLRHDPQTTNLLYLELGDKPAPNTFYVGIYILIAVGAVMMFVGFLGCYGAIQESQCLLGTFFTCLVILFACEVAAGIWGFVNKDQIAKDVKQFYDQALQQAVVDDDANNAKAVVKTFHETLDCCGSSTLTALTTSVLKNNLCPSGSNIISNLFKEDCHQKIETMQARGFGSDQSENVDRGAGSIREAGGAFGKREQAEEERYFRAQSREQLAALKKHHEEEIVHHKKEIERLQ

SEQ ID NO: 844529 - protein, 211 aa, Homo sapiens
IVLERRATAATAATPPRILPGLRRPAAHAPPRPRAPRPFLRAPAPRPARPPCRPPARPRAGPPAAQDRPAPRRPPAARAAMGVEGCTKCIKYLLFVFNFVFWLAGGVILGVALWLRHDPQTTNLLYLELGDKPAPNTFYVGIYILIAVGAVMMFVGFLGCYGAIQESQCLLGTFFTCLVILFACEVAAGIWGFVNKDQTRQGCEAAPAAPQ

SEQ ID NO: 844530 - protein, 316 aa, Homo sapiens; identical to SEQ ID NO: 844520

SEQ ID NO: 844531 - protein, 80 aa, Homo sapiens
MLSPNTFYVGIYILIAVGAVMMFVGFLGCYGAIQESQCLLGTFFTCLVILFACEVAAGIWGFVNKDQIAKDVKQHQQHHN

SEQ ID NO: 844532 - protein, 229 aa, Homo sapiens
MAPFVHARAGKTKAQLAGGVILGVALWLRHDPQTTNLLYLELGDKPAPNTFYVGIYILIAVGAVMMFVGFLGCYGAIQESQCLLGTFFTCLVILFACEVAAGIWGFVNKDQIAKDVKQFYDQALQQAVVDDDANNAKAVVKTFHETLDCCGSSTLTALTTSVLKNNLCPSGSNIISNLFKEDCHQKIDDLFSGKLYLIGIAAIVVAVIMIFEMILSMVLCCGIRNSSVY

SEQ ID NO: 844533 - protein, 274 aa, Homo sapiens
MWCGWSFSWQPVHWVRSACGCSLTWVSWSLASSSSRSLLKVGELGMAPFVHARAGKTKAQLAGGVILGVALWLRHDPQTTNLLYLELGDKPAPNTFYVGIYILIAVGAVMMFVGFLGCYGAIQESQCLLGTFFTCLVILFACEVAAGIWGFVNKDQIAKDVKQFYDQALQQAVVDDDANNAKAVVKTFHETLDCCGSSTLTALTTSVLKNNLCPSGSNIISNLFKEDCHQKIDDLFSGKLYLIGIAAIVVAVIMIFEMILSMVLCCGIRNSSVY

SEQ ID NO: 844534 - protein, 270 aa, Homo sapiens
ATFPVPSSHLCQGVIQVQNIPIVAEEFYQLALGWTTLAKTSWLEDGSPDLVPRGSQLAGGVILGVALWLRHDPQTTNLLYLELGDKPAPNTFYVGIYILIAVGAVMMFVGFLGCYGAIQESQCLLGTFFTCLVILFACEVAAGIWGFVNKDQIAKDVKQFYDQALQQAVVDDDANNAKAVVKTFHETLDCCGSSTLTALTTSVLKNNLCPSGSNIISNLFKEDCHQKIDDLFSGKLYLIGIAAIVVAVIMIFEMILSMVLCCGIRNSSVY

SEQ ID NO: 844535 - protein, 217 aa, Homo sapiens
WHWACHKDQIAKDVKQFYDQALQQAVVDDDADNAKAVVKTFRIYILIAVGAVMMFVGFLGCYGAIQESQCLLGTFFTCLVILFACEVAAGIWGFVNKDQIAKDVKQFYDQALQQAVVDDDANNAKAVVKTFHETLDCCGSSTLTALTTSVLKNNLCPSGSNIISNLFKEDCHQKIDDLFSGKLYLIGIAAIVVAVIMIFEMILSMVLCCGIRNSSVY

SEQ ID NO: 844536 - protein, 111 aa, Homo sapiens
KKLSILVKAVVDDDANNAKAVVKTFHETLDCCGSSTLTALTTSVLKNNLCPSGSNIISNLFKEDCHQKIDDLFSGKLYLIGIAAIVVAVIMIFEMILSMVLCCGIRNSSVY

SEQ ID NO: 844537 - protein, 316 aa, Homo sapiens; identical to SEQ ID NO: 844520

SEQ ID NO: 844538 - protein, 316 aa, Homo sapiens; identical to SEQ ID NO: 844520

SEQ ID NO: 844539 - protein, 316 aa, Homo sapiens; identical to SEQ ID NO: 844520

SEQ ID NO: 844540 - protein, 316 aa, Homo sapiens; identical to SEQ ID NO: 844520

SEQ ID NO: 844541 - protein, 64 aa, Homo sapiens
MACPGREAALERALGTRVEMEVGLWPAGPSGLSQGRGWQLGLGRDCVETLLILSVGDTSRRLPE

SEQ ID NO: 844542 - protein, 103 aa, Homo sapiens
MAPFVHARAGKTKAQVRPLPSAWHSFLPHFSTQGGSRLLLVASGTVEVDRLASPPFPAVPPTPSWPSCSALLKVTWALGSFLVLAQALSGPAGQDQPSLQPSA

SEQ ID NO: 844543 - protein, 172 aa, Homo sapiens
MNRYSVDTSASTFNHRGSLHPSSSLYCKRQNSGDSHLGGGPAATAGGPRTSPMSSGGPSAPGLRPPASSPKRNTTSLEGNRCASSPSQDAQDARRPRSRNPSAWTVEDVVWFVKDADPQALGPHVELFRKHEIDGNALLLLKSDMVMKYLGLKLGPALKLCYHIDKLKQAKF

SEQ ID NO: 844544 - protein, 172 aa, Homo sapiens; identical to SEQ ID NO: 844543

SEQ ID NO: 844545 - protein, 99 aa, Homo sapiens
NDEPLLSGSGDVSKECAEKILETWGELLSKWHLNLNVRPKQLSSLVRNGVPEALRGEVWQLLAGCHNNDHLVEKYRILITKVTVLEYFLLLGPLHDGLL

SEQ ID NO: 844546 - protein, 582 aa, Homo sapiens
NDEPLLSGSGDVSKECAEKILETWGELLSKWHLNLNVRPKQLSSLVRNGVPEALRGEVWQLLAGCHNNDHLVEKYRILITKESPQDSAITRDINRTFPAHDYFKDTGGDGQDSLYKICKAYSVYDEEIGYCQGQSFLAAVLLLHFKMLGKNTTQVMSAKSFGTCYDLYCAEDAEMPEEQAFSVLVKIMFDYGLRELFKQNFEDLHCKFYQLERLMQEYIPDLYNHFLDISLEAHMYASQWFLTLFTAKFPLYMVFHIIDLLLCEGISVIFNVALGLLKTSKDDLLLTDFEGALKFFRVQLPKRYRSEENAKKLMELACNMKISQKKLKKYEKEYHTMREQQAQQEDPIERFERENRRLQEANMRLEQENDDLAHELVTSKIALRKDLDNAEEKADALNKELLMTKQKLIDAEEEKRRLEEESAQLKEMCRRELDKAESEIKKNSSIIGDYKQICSQLSERLEKQQTANKVEIEKIRQKVDDCERCREFFNKEGRVKGISSTKEVLDEDTDEEKETLKNQLREMELELAQTKLQLVEAECKIQDLEHHLGLALNEVQAAKKTWFNRTLSSIKTATGVQGKETC

SEQ ID NO: 844547 - protein, 246 aa, Homo sapiens [sequence omitted]

SEQ ID NO: 844548 - protein, 552 aa, Homo sapiens
NDEPLLSGSGDVSKECAEKILETWGELLSKWHLNLNVRPKQLSSLVRNGVPEALRGEVWQLLAGCHNNDHLVEKYRILITKESPQDSAITRDINRTFPAHDYFKDTGGDGQDSLYKICKAYSVYDEEIGYCQGQSFLAAVLLLHMPEEQAFSVLVKIMFDYGLRELFKQNFEDLHCKFYQLERLMQEYIPDLYNHFLDISLEAHMYASQWFLTLFTAKFPLYMVFHIIDLLLCEGISVIFNVALGLLKTSKDDLLLTDFEGALKFFRVQLPKRYRSEENAKKLMELACNMKISQKKLKKYEKEYHTMREQQAQQEDPIERFERENRRLQEANMRLEQENDDLAHELVTSKIALRKDLDNAEEKADALNKELLMTKQKLIDAEEEKRRLEEESAQLKEMCRRELDKAESEIKKNSSIIGDYKQICSQLSERLEKQQTANKVEIEKIRQKVDDCERCREFFNKEGRVKGISSTKEVLDEDTDEEKETLKNQLREMELELAQTKLQLVEAECKIQDLEHHLGLALNEVQAAKKTWFNRTLSSIKTATGVQGKETC

SEQ ID NO: 844549 - protein, 399 aa, Homo sapiens
NDEPLLSGSGDVSKECAEKILETWGELLSKWHLNLNVRPKQLSSLVRNGVPEALRGEVWQLLAGCHNNDHLVEKYRILITKESPQDSAITRDINRTFPAHDYFKDTGGDGQDSLYKICKAYSVYDEEIGYCQGQSFLAAVLLLHMPEEQAFSVLVKIMFDYGLRELFKQNFEDLHCKFYQLERLMQEYIPDLYNHFLDISLEAHMYASQWFLTLFTAKFPLYMVFHIIDLLLCEGISVIFNVALGLLKTSKDDLLLTDFEGALKFFRVQLPKRYRSEENAKKLMELACNMKISQKKLKKYEKEYHTMREQQAQQEDPIERFERENRRLQEANMRLEQENDDLAHELVTSKIALRKDLDNAEEKADALNKELLMTKQKLIDAEEEKRRTGFVYKDTRVVL

SEQ ID NO: 844550 - protein, 70 aa, Homo sapiens
QEANMRLEQENDDLAHELVTSKIALRKDLDNVSPTGLKGKISLRHLTFPLKRNPGILVIVILATCKVSRL

SEQ ID NO: 844551 - protein, 552 aa, Homo sapiens; identical to SEQ ID NO: 844548

SEQ ID NO: 844552 - protein, 246 aa, Homo sapiens [sequence omitted]

SEQ ID NO: 844553 - protein, 552 aa, Homo sapiens; identical to SEQ ID NO: 844548

SEQ ID NO: 844554 - protein, 147 aa, Homo sapiens [sequence omitted]

SEQ ID NO: 844555 - protein, 302 aa, Homo sapiens
NDEPLLSGSGDVSKECAEKILETWGELLSKWHLNLNVRPKQLSSLVRNGVPEALRGEVWQLLAGCHNNDHLVEKYRILITKESPQDSAITRDINRTFPAHDYFKDTGGDGQDSLYKICKAYSVYDEEIGYCQGQSFLAAVLLLHMPEEQAFSVLVKIMFDYGLRELFKQNFEDLHCKFYQLERLMQEYIPDLYNHFLDISLEAHMYASQWFLTLFTAKFPLYMVFHIIDLLLCEGISVIFNVALGLLKTSKDDLLLTDFEGALKFFRVQLPKRYRSEENAKKLMELACNMKPTHHEDNQDED

SEQ ID NO: 844556 - protein, 161 aa, Homo sapiens
SKAVNRLFGVEASGRRIWIRRAGGRCLWRDDLLEPATKPSIAGKFKVLEPPMLGHDLRLALCLANLTSRAQRVRVNLSGATILYTRKPVAEILHESHAVRLGPQEEKRIPITISYSKYKEDLTEDKKILLAAMCLVTKGEKLLVEKDITLEDFITIKVTSA

SEQ ID NO: 844557 - protein, 377 aa, Homo sapiens
NGPELLPRVAMLRLLTWVIGTGSPRLQVLASDTLTTLCASSSGDDGCAFAEQEEVDVLLCALQSPCASVRETVLRGLMELHMVLPAPDTDEKNGLNLLRRLWVVKFDKEEEIRKLAERLWSMMGLDLQPDLCSLLIDDVIYHEAAVRQAGAEALSQAVARYQRQAAEVMGRLMEIYQEKLYRPPPVLDALGRVISESPPDQWEARCGLALALNKLSQYLDSSQVKPLFQFFVPDALNDRHPDVRKCMLDAALATLNTHGKENVNSLLPVFEEFLKNAPNDASYDAVRQSVVVLMGSLAKHLDKSDPKVKPIVAKLIAALSTPSQQVQESVASCLPPLVPAIKEDAGGMIQRLMQQLLESDKYAERKGAAYGLAGLVK

SEQ ID NO: 844558 - protein, 423 aa, Homo sapiens
GWLANGSTAHPVVFPVADCGNGRVGIVSLGARKNLSERWDAYCFLCASVRETVLRGLMELHMVLPAPDTDEKNGLNLLRRLWVVKFDKEEEIRKLAERLWSMMGLDLQPDLCSLLIDDVIYHEAAVRQAGAEALSQAVARYQRQAAEVMGRLMEIYQEKLYVSDLCSPDAVWVCAVGWVSAHPATAPDRNLGAHGGSEVAAASFLPHNPGAQVIDLPVAKHLPTCLLQRPPPVLDALGRVISESPPDQWEARCGLALALNKLSQYLDSSQVKPLFQFFVPDALNDRHPDVRKCMLDAALATLNTHGKENVNSLLPVFEEFLKNAPNDASYDAVRQSVVVLMGSLAKHLDKSDPKVKPIVAKLIAALSTPSQQVQESVASCLPPLVPAIKEDAGGMIQRLMQQLLESDKYAERKGAAYGLAGLV

SEQ ID NO: 844559 - protein, 85 aa, Homo sapiens
ENVNSLLPVFEEFLKNAPNDASYDAVRQSVVVLMGSLAKHLDKSDPKVKPIVAKLIAALSTPSQQVPAIWPGTHMSVRELGPGCG

SEQ ID NO: 844560 - protein, 356 aa, Homo sapiens
GWLANGSTAHPVVFPVADCGNGRVGIVSLGARKNLSERWDAYCFLCASVRETVLRGLMELHMVLPAPDTDEKNGLNLLRRLWVVKFDKEEEIRKLAERLWSMMGLDLQPDLCSLLIDDVIYHEAAVRQAGAEALSQAVARYQRQAAEVMGRLMEIYQEKLYRPPPVLDALGRVISESPPDQWEARCGLALALNKLSQYLDSSQVKPLFQFFVPDALNDRHPDVRKCMLDAALATLNTHGKENVNSLLPVFEEFLKNAPNDASYDAVRQSVVVLMGSLAKHLDKSDPKVKPIVAKLIAALSTPSQQVQESVASCLPPLVPAIKEDAGGMIQRLMQQLLESDKYAERKGAAYGLAGLV

SEQ ID NO: 844561 - protein, 240 aa, Homo sapiens
MILISTQYHTHHPPKNRARPPQNTTPNPTTTTHSPPPPPPKNHTTTHTTARGHPGTQDNDKTHPCTNPGDHPTDTHAPTPTEHNKDQTTQKLQRKPTERKHKRASSKTPPQSTRRPPRHKTAQTSNTEYKSDSQRTKHSPPPHTTGDQTTAPPAQPRDAQNALQQLSTSRRRGDKKAHNSRQCVRGGEREKSRSAKQRADGGASEQHREDSPGEHNHTDGRQEDLESRRHTTHVTRLRPT

SEQ ID NO: 844562 - protein, 240 aa, Homo sapiens; identical to SEQ ID NO: 844561

SEQ ID NO: 844563 - protein, 39 aa, Homo sapiens
ACNWLNPKVLREATYNRKQNHSTNQRGTGITACCLTPST

SEQ ID NO: 844564 - protein, 40 aa, Homo sapiens
MDQVTVLVPSVLWAKKRWAQNDGNAERKGPTLPGGEDKNS

SEQ ID NO: 844565 - protein, 125 aa, Homo sapiens [sequence omitted]

SEQ ID NO: 844566 - protein, 108 aa, Homo sapiens
MELRRKDQSLRQLNRHLTQLEQDKRRLEENIHDAESALRMAAKDKECVANHMRAVENTLHKVRDQISLSWSAASRNDFTLQLPKLHLETFAMEGLKGGPEVVACQVRV

SEQ ID NO: 844567 - protein, 116 aa, Homo sapiens
SGEYCARMTGRLFIHRDLVQGLTSVIQTGVQQCDLSSLQPPPPRFKRLSCLSLHNNWDHRCVPQHLANFCIFFMETEFYCVGQGGLELLTSNDPPASASQSTGITAHISKIGKILN

SEQ ID NO: 844568 - protein, 140 aa, Homo sapiens [sequence omitted]

SEQ ID NO: 844569 - protein, 176 aa, Homo sapiens
MGVRDPLEEAVCPLAELECCAGRSAALFRADRQERLSLLKLCPQLPPFPQAMIKSFMDVYQLASTRIMTLEKEMTSHRSHIAALKSELHTACLRENASLQSIGSRDHSNLSIPSRAPLPADTTGIGDFLPLKAELDTTYTFLKETFINTVPHALTSSHSSPVTMSANANRPTQIGL

SEQ ID NO: 844570 - protein, 108 aa, Homo sapiens; identical to SEQ ID NO: 844566

SEQ ID NO: 844571 - protein, 567 aa, Homo sapiens
MRSAVLKSLQPGSLPDCKAALGGSGNISTSPFWSRRHSEGQDTGTRAVLLYGAVCASLRQRDALKFWREKRCIWIPAVVGKGQSAEVLGGVMAVPFVEDWDLVQTLGEGAYGEVQLAVNRVTEEAVAVKIVDMKRAVDCPENIKKEICINKMLNHENVVKFYGHRREGNIQYLFLEYCSGGELFDRIEPDIGMPEPDAQRFFHQLMAGVVYLHGIGITHRDIKPENLLLDERDNLKISDFGLATVFRYNNRERLLNKMCGTLPYVAPELLKRREFHAEPVDVWSCGIVLTAMLAGELPWDQPSDSCQEYSDWKEKKTYLNPWKKIDSAPLALLHKILVENPSARITIPDIKKDRWYNKPLKKGAKRPRVTSGGVSESPSGFSKHIQSNLDFSPVNSASSEENVKYSSSQPEPRTGLSLWDTSPSYIDKLVQGISFSQPTCPDHMLLNSQLLGTPGSSQNPWQRLVKRMTRFFTKLDADKSYQCLKETCEKLGYQWKKSCMNQVTISTTDRRNNKLIFKVNLLEMDDKILVDFRLSKGDGLEFKRHFLKIKGKLIDIVSSQKVWLPAT

SEQ ID NO: 844572 - protein, 567 aa, Homo sapiens; identical to SEQ ID NO: 844571

SEQ ID NO: 844573 - protein, 567 aa, Homo sapiens; identical to SEQ ID NO: 844571

SEQ ID NO: 844574 - protein, 567 aa, Homo sapiens; identical to SEQ ID NO: 844571

SEQ ID NO: 844575 - protein, 476 aa, Homo sapiens
MAVPFVEDWDLVQTLGEGAYGEVQLAVNRVTEEAVAVKIVDMKRAVDCPENIKKEICINKMLNHENVVKFYGHRREGNIQYLFLEYCSGGELFDRIEPDIGMPEPDAQRFFHQLMAGVVYLHGIGITHRDIKPENLLLDERDNLKISDFGLATVFRYNNRERLLNKMCGTLPYVAPELLKRREFHAEPVDVWSCGIVLTAMLAGELPWDQPSDSCQEYSDWKEKKTYLNPWKKIDSAPLALLHKILVENPSARITIPDIKKDRWYNKPLKKGAKRPRVTSGGVSESPSGFSKHIQSNLDFSPVNSASSEENVKYSSSQPEPRTGLSLWDTSPSYIDKLVQGISFSQPTCPDHMLLNSQLLGTPGSSQNPWQRLVKRMTRFFTKLDADKSYQCLKETCEKLGYQWKKSCMNQVTISTTDRRNNKLIFKVNLLEMDDKILVDFRLSKGDGLEFKRHFLKIKGKLIDIVSSQKVWLPAT

SEQ ID NO: 844576 - protein, 382 aa, Homo sapiens
MEKPDIGMPEPDAQRFFHQLMAGVVYLHGIGITHRDIKPENLLLDERDNLKISDFGLATVFRYNNRERLLNKMCGTLPYVAPELLKRREFHAEPVDVWSCGIVLTAMLAGELPWDQPSDSCQEYSDWKEKKTYLNPWKKIDSAPLALLHKILVENPSARITIPDIKKDRWYNKPLKKGAKRPRVTSGGVSESPSGFSKHIQSNLDFSPVNSASSEENVKYSSSQPEPRTGLSLWDTSPSYIDKLVQGISFSQPTCPDHMLLNSQLLGTPGSSQNPWQRLVKRMTRFFTKLDADKSYQCLKETCEKLGYQWKKSCMNQVTISTTDRRNNKLIFKVNLLEMDDKILVDFRLSKGDGLEFKRHFLKIKGKLIDIVSSQKVWLPAT

SEQ ID NO: 844577 - protein, 567 aa, Homo sapiens; identical to SEQ ID NO: 844571

SEQ ID NO: 844578 - protein, 567 aa, Homo sapiens
MRSAVLKSLQPGSLPDCKAALGGSGNISTSPFWSRRHSEGQDTGTRAVLLYGAGARVLRQRDALKFWREKRCIWIPAVVGKGQSAEVLGGVMAVPFVEDWDLVQTLGEGAYGEVQLAVNRVTEEAVAVKIVDMKRAVDCPENIKKEICINKMLNHENVVKFYGHRREGNIQYLFLEYCSGGELFDRIEPDIGMPEPDAQRFFHQLMAGVVYLHGIGITHRDIKPENLLLDERDNLKISDFGLATVFRYNNRERLLNKMCGTLPYVAPELLKRREFHAEPVDVWSCGIVLTAMLAGELPWDQPSDSCQEYSDWKEKKTYLNPWKKIDSAPLALLHKILVENPSARITIPDIKKDRWYNKPLKKGAKRPRVTSGGVSESPSGFSKHIQSNLDFSPVNSASSEENVKYSSSQPEPRTGLSLWDTSPSYIDKLVQGISFSQPTCPDHMLLNSQLLGTPGSSQNPWQRLVKRMTRFFTKLDADKSYQCLKETCEKLGYQWKKSCMNQVTISTTDRRNNKLIFKVNLLEMDDKILVDFRLSKGDGLEFKRHFLKIKGKLIDIVSSQKVWLPAT

SEQ ID NO: 844579 - protein, 567 aa, Homo sapiens; identical to SEQ ID NO: 844571

SEQ ID NO: 844580 - protein, 567 aa, Homo sapiens; identical to SEQ ID NO: 844571

SEQ ID NO: 844581 - protein, 492 aa, Homo sapiens
MRSAVLKSLQPGSLPDCKAALGGSGNISTSPFWSRRHSEGQDTGTRAVLLYGAGARVCGSVTPSSFGGKSAAFGFLQWWAKDSPPRCSVESWQCPLWKTGTWCKPWEKVPMEKPDIGMPEPDAQRFFHQLMAGVVYLHGIGITHRDIKPENLLLDERDNLKISDFGLATVFRYNNRERLLNKMCGTLPYVAPELLKRREFHAEPVDVWSCGIVLTAMLAGELPWDQPSDSCQEYSDWKEKKTYLNPWKKIDSAPLALLHKILVENPSARITIPDIKKDRWYNKPLKKGAKRPRVTSGGVSESPSGFSKHIQSNLDFSPVNSASSEENVKYSSSQPEPRTGLSLWDTSPSYIDKLVQGISFSQPTCPDHMLLNSQLLGTPGSSQNPWQRLVKRMTRFFTKLDADKSYQCLKETCEKLGYQWKKSCMNQVTISTTDRRNNKLIFKVNLLEMDDKILVDFRLSKGDGLEFKRHFLKIKGKLIDIVSSQKVWLPAT

SEQ ID NO: 844582 - protein, 332 aa, Homo sapiens
MRSAVLKSLQPGSLPDCKAALGGSGNISTSPFWSRRHSEGQDTGTRAVLLYGAVCASLRQRDALKFWREKRCIWIPAVVGKGQSAEVLGGVMAVPFVEDWDLVQTLGEGAYGEVQLAVNRVTEEAVAVKIVDMKRAVDCPENIKKEICINKMLNHENVVKFYGHRREGNIQYLFLEYCSGGELFDRIEPDIGMPEPDAQRFFHQLMAGVVYLHGIGITHRDIKPENLLLDERDNLKISDFGLATVFRYNNRERLLNKMCGTLPYVAPELLKRREFHAEPVDVWSCGIVLTAMLAGELPWDQPSDSCQEYSDWKEKKTYLNPWKKIDSAPLGN

SEQ ID NO: 844583 - protein, 195 aa, Homo sapiens
MFGGHDTTASGLSWVLYNLARHPEYQERCRQEVQELLKDREPKEIEWDDLAQLPFLTMCLKESLRLHPPIPTFARGCTQDVVLPDSRVIPKGNVCNINIFAIHHNPSVWPDPEVYDPFRFDPENAQKRSPMAFIPFSAGPRNCIGQKFAMAEMKVVLALTLLRFRILPDHREPRRTPEIVLRAEDGLWLRVEPLG

SEQ ID NO: 844584 - protein, 386 aa, Homo sapiens
MGVWDRKPGACLWGSPSWWLGLQGDSEEPRPGPSPAPFSGQAKWQRLAMEGSTCLDVFEHISLMTLDSLQKCIFSFDSNCQEKPSEYITAIMELSALVVKRNNQFFRYKDFLYFLTPCGRRFHRACRLVHDFTDAVIQERRRTLTSQGVDDFLQAKAKSKTLDFIDVLLLSEDKNGKELSDEDIRAEADTFMFGGHDTTASGLSWVLYNLARHPEYQERCRQEVQELLKDREPKEIEWDDLAQLPFLTMCLKESLRLHPPIPTFARGCTQDVVLPDSRVIPKGNVCNINIFAIHHNPSVWPDPEVYDPFRFDPENAQKRSPMAFIPFSAGPRNCIGQKFAMAEMKVVLALTLLRFRILPDHREPRRTPEIVLRAEDGLWLRVEPLG

SEQ ID NO: 844585 - protein, 294 aa, Homo sapiens
MGVWDRKPGACLWGSPSWWLGLQGDSEEPRPGPSPAPFSGQAKWQRLAMEGSTCLDVFEHISLMTLDSLQKCIFSFDSNCQEKPSEYITAIMELSALVVKRNNQFFRYKDFLYFLTPCGRRFHRACRLVHDFTDAVIQERRRTLTSQGVDDFLQAKAKSKTLDFIDVLLLSEDKNGKELSDEDIRAEADTFMFGGHDTTASGLSWVLYNLARHPEYQERCRQEVQELLKDREPKEIEWDDLAQLPFLTMCLKESLRLHPPIPTFARGCTQDVVLPDSRVIPKGTASGRSSRWQR

SEQ ID NO: 844586 - protein, 370 aa, Homo sapiens
MPMMAKLCPGDLGQEAAHREWEAESEVRLQDTPFCMECGPGILAGRCSQAFMWVRSCFLSLDWPCRKPSEYITAIMELSALVVKRNNQFFRYKDFLYFLTPCGRRFHRACRLVHDFTDAVIQERRRTLTSQGVDDFLQAKAKSKTLDFIDVLLLSEDKNGKELSDEDIRAEADTFMFGGHDTTASGLSWVLYNLARHPEYQERCRQEVQELLKDREPKEIEWDDLAQLPFLTMCLKESLRLHPPIPTFARGCTQDVVLPDSRVIPKGNVCNINIFAIHHNPSVWPDPEVYDPFRFDPENAQKRSPMAFIPFSAGPRNCIGQKFAMAEMKVVLALTLLRFRILPDHREPRRTPEIVLRAEDGLWLRVEPLG

SEQ ID NO: 844587 - protein, 189 aa, Homo sapiens
MGLYGRLTVLYNLARHPEYQERCRQEVQELLKDREPKEIEWDDLAQLPFLTMCLKESLRLHPPIPTFARGCTQDVVLPDSRVIPKGNVCNINIFAIHHNPSVWPDPEVYDPFRFDPENAQKRSPMAFIPFSAGPRNCIGQKFAMAEMKVVLALTLLRFRILPDHREPRRTPEIVLRAEDGLWLRVEPLG

SEQ ID NO: 844588 - protein, 522 aa, Homo sapiens
RRMSLLSLSWLGLRPVAASPWLLLLVVGASWLLARILAWTYAFYHNGRRLRCFPQPRKQNWFLGHLGLVTPTEEGLRVLTQLVATYPQGFVRWLGPITPIINLCHPDIVRSVINTSDAITDKDIVFYKTLKPWLGDGLLLSVGDKWRHHRRLLTPAFHFNILKPYIKIFSKSANIMHAKWQRLAMEGSTCLDVFEHISLMTLDSLQKCIFSFDSNCQEKPSEYITAIMELSALVVKRNNQFFRYKDFLYFLTPCGRRFHRACRLVHDFTDAVIQERRRTLTSQGVDDFLQAKAKSKTLDFIDVLLLSEDKNGKELSDEDIRAEADTFMFGGHDTTASGLSWVLYNLARHPEYQERCRQEVQELLKDREPKEIEWDDLAQLPFLTMCLKESLRLHPPIPTFARGCTQDVVLPDSRVIPKGNVCNINIFAIHHNPSVWPDPEVYDPFRFDPENAQKRSPMAFIPFSAGPRNCIGQKFAMAEMKVVLALTLLRFRILPDHREPRRTPEIVLRAEDGLWLRVEPLG

SEQ ID NO: 844589 - protein, 328 aa, Homo sapiens
MPMMAKLCPGDLGQEAAHREWEAESEVRLQDTPFCMECGPGILAGRCSQAFMWVRSCFLSLDWPCRKPSEYITAIMELSALVVKRNNQFFRYKDFLYFLTPCGRRFHRACRLVHDFTDAVIQERRRTLTSQGVDDFLQAKAKSKTLDFIDVLLLSEDKNGKELSDEDIRAEADTFMFGGHDTTASGLSWVLYNLARHPEYQERCRQEVQELLKDREPKEIEWDDLAQLPFLTMCLKESLRLHPPIPTFARGCTQDVVLPDSRVIPKGNVCNINIFAIHHNPSVWPDPELLTLSASDPENARKRSLWSYSYFGGPTDTALGQIPEGDIT

SEQ ID NO: 844590 - protein, 284 aa, Homo sapiens
MGVWDRKPGACLWGSPSWWLGLQGDSEEPRPGPSPAPFSGQAKWQRLAMEGSTCLDVFEHISLMTLDSLQKCIFSFDSNCQEKPSEYITAIMELSALVVKRNNQFFRYKDFLYFLTPCGRRFHRACRLVHDFTDAVIQERRRTLTSQGVDDFLQAKAKSKTLDFIDVLLLSEDKNGKELSDEDIRAEADTFMFGGHDTTASGLSWVLYNLARHPEYQERCRQEVQELLKDREPKEIEWDDLAQLPFLTMCLKESLRLHPPIPTFARGCTQDVVLPDSRVIPKGL

SEQ ID NO: 844591 - protein, 305 aa, Homo sapiens
MKPSEYITAIMELSALVVKRNNQFFRYKDFLYFLTPCGRRFHRACRLVHDFTDAVIQERRRTLTSQGVDDFLQAKAKSKTLDFIDVLLLSEDKNGKELSDEDIRAEADTFMFGGHDTTASGLSWVLYNLARHPEYQERCRQEVQELLKDREPKEIEWDDLAQLPFLTMCLKESLRLHPPIPTFARGCTQDVVLPDSRVIPKGNVCNINIFAIHHNPSVWPDPEVYDPFRFDPENAQKRSPMAFIPFSAGPRNCIGQKFAMAEMKVVLALTLLRFRILPDHREPRRTPEIVLRAEDGLWLRVEPLG

SEQ ID NO: 844592 - protein, 558 aa, Homo sapiens
FPQTRKRIAWSEGHAAARLTSKESCCDEKAQKRRKRKAKESGMALPQGHLTFRDVAIEFSQAEWKCLDPAQRALYKDVMLENYRNLVSLGISLPDLNINSMLEQRREPWSGESEVKIAKNSDGRECIKGVNTGSSYALGSNAEDKPIKKQLGVSFHLHLSELELFPDERVINGCNQVENFINHSSSVSCLQEMSSSVKTPIFNRNDFDDSSFLPQEQKVHLREKPYECNEHSKVFRVSSSLTKHQVIHTVEKPYKCNSCGKVFSRNSHLAEHCRIHTGEKPYKCNVCGKVFSYNSNFARHQRIHTREKPYECNECGKVFSNNSYLARHQRIHAEEKPYKCNECGKGFSHKSSLANHWRIYTGEKPYKCDECGKAFYRIALLVRHQKIHTGEKPYKCNECGKVFIQNSHLAQHWRIHTGEKPYKCNECGKVFNQLSNLARHRRIHTGEKPYKCNECGKAFSEYSGLSAHLVIHTGEKPYKCSECGKAFRHKLSLTNHQRIHTGERPYKCNECGKVFNRIAHLARHRKIHTGEKPYKCNECGKAFSRISYLAQHWTIHMG

SEQ ID NO: 844593 - protein, 358 aa, Homo sapiens
HVPYAMFVIMLLAATCGNGHPKEKPYECNEHSKVFRVSSSLTKHQVIHTVEKPYKCNSCGKVFSRNSHLAEHCRIHTGEKPYKCNVCGKVFSYNSNFARHQRIHTREKPYECNECGKVFSNNSYLARHQRIHAEEKPYKCNECGKGFSHKSSLANHWRIYTGEKPYKCDECGKAFYRIALLVRHQKIHTGEKPYKCNECGKVFIQNSHLAQHWRIHTGEKPYKCNECGKVFNQLSNLARHRRIHTGEKPYKCNECGKAFSEYSGLSAHLVIHTGEKPYKCSECGKAFRHKLSLTNHQRIHTGERPYKCNECGKVFNRIAHLARHRKIHTGEKPYKCNECGKAFSRISYLAQHWTIHMG

SEQ ID NO: 844594 - protein, 401 aa, Homo sapiens
MDLTQQAKDIQNITVQETNKNNSESIECSKITMDLKFNNSRKYISITVPSKTQTMSPHIKSVDDVVVLGMNLSKFNKLTQFFICVAGVFVFYLIYGYLQELIFSVEGFKSCGWYLTLVQFAFYSIFGLIELQLIQDKRRRIPGKTYMIIAFLTVGTMGLSNTSLGYLNYPTQVIFKCCKLIPVMLGGVFIQGKRYNVADVSAAICMSLGLIWFTLADSTTAPNFNLTGVVLISLALCADAVIGNVQEKAMKLHNASNSEMVLYSYSIGFVYILLGLTCTSGLGPAVTFCAKNPVRTYGYAFLFSLTGYFGISFVLALIKIFGALIAVTVTTGRKAMTIVLSFIFFAKPFTFQYVWSGLLVVLGIFLNVYSKNMDKIRLPSLYDLINKSVEARKSRTLAQTV

SEQ ID NO: 844595 - protein, 401 aa, Homo sapiens; identical to SEQ ID NO: 844594

SEQ ID NO: 844596 - protein, 403 aa, Homo sapiens
MDEDLTQQAKDIQNITVQETNKNNSESIECSKITMDLKFNNSRKYISITVPSKTQTMSPHIKSVDDVVVLGMNLSKFNKLTQFFICVAGVFVFYLIYGYLQELIFSVEGFKSCGWYLTLVQFAFYSIFGLIELQLIQDKRRRIPGKTYMIIAFLTVGTMGLSNTSLGYLNYPTQVIFKCCKLIPVMLGGVFIQGKRYNVADVSAAICMSLGLIWFTLADSTTAPNFNLTGVVLISLALCADAVIGNVQEKAMKLHNASNSEMVLYSYSIGFVYILLGLTCTSGLGPAVTFCAKNPVRTYGYAFLFSLTGYFGISFVLALIKIFGALIAVTVTTGRKAMTIVLSFIFFAKPFTFQYVWSGLLVVLGIFLNVYSKNMDKIRLPSLYDLINKSVEARKSRTLAQTV

SEQ ID NO: 844597 - protein, 369 aa, Homo sapiens
MDLKFNNSRKYISITVPSKTQTMSPHIKSVDDVVVLGMNLSKFNKLTQFFICVAGVFVFYLIYGYLQELIFSVEGFKSCGWYLTLVQFAFYSIFGLIELQLIQDKRRRIPGKTYMIIAFLTVGTMGLSNTSLGYLNYPTQVIFKCCKLIPVMLGGVFIQGKRYNVADVSAAICMSLGLIWFTLADSTTAPNFNLTGVVLISLALCADAVIGNVQEKAMKLHNASNSEMVLYSYSIGFVYILLGLTCTSGLGPAVTFCAKNPVRTYGYAFLFSLTGYFGISFVLALIKIFGALIAVTVTTGRKAMTIVLSFIFFAKPFTFQYVWSGLLVVLGIFLNVYSKNMDKIRLPSLYDLINKSVEARKSRTLAQTV

SEQ ID NO: 844598 - protein, 401 aa, Homo sapiens; identical to SEQ ID NO: 844594

SEQ ID NO: 844599 - protein, 394 aa, Homo sapiens
MDLTQQAKDIQNITVQETNKNNSESIECSKITMDLKFNNSRKYISITVPSKTQTMSPHIKSVDDVVVLGMNLSKFNKLTQFFICVAGVFVFYLIYGYLQELIFSVEGFKSCGWYLTLVQFAFYSIFGLIELQLIQDKRRRIPGKTYMIIAFLTVGTMGLSNTSLGYLNYPTQVIFKCCKLIPVMLGGVFIQGKRYNVADVSAAICMSLGLIWFTLADSTTAPNFNLTGVVLISLALCADAVIGNVQEKAMKLHNASNSEMVLYSYSIGFVYILLGLTCTSGLGPAVTFCAKNPVRTYGYAFLFSLTGYFGISFVLALIKIFGALIAVTVTTGRKAMTIVLSFIFFAKPFTFQYNRACIMEGSSMRNSDWFSFAHLLKYSHCFFPSGNHLKFFLA

SEQ ID NO: 844600 - protein, 161 aa, Homo sapiens
AGTHRRKWPAGAGVESAFRGGDRRGGKCRSGRGGGGRGGDGDGPGEGEMLRLAQTPRRLPSPFRVTYRPWGTRAFGAFPVFGTQISSPPENLDTAHLPHPEGAFEEWMRSGWKKRVIPFFERAETGRAVSREEHLFLLARFSPSGWRELPQVPIRGLAGVR

SEQ ID NO: 844601 - protein, 369 aa, Homo sapiens; identical to SEQ ID NO: 844597

SEQ ID NO: 844602 - protein, 369 aa, Homo sapiens; identical to SEQ ID NO: 844597

SEQ ID NO: 844603 - protein, 246 aa, Homo sapiens
MDLTQQAKDIQNITVQETNKNNSESIECSKITMDLKFNNSRKYISITVPSKTQTMSPHIKSVDDVVVLGMNLSKFNKLTQFFICVAGVFVFYLIYGYLQELIFSVEGFKSCGWYLTLVQFAFYSIFGLIELQLIQDKRRRIPGKTYMIIAFLTVGTMGLSNTSLGYLNYPTQVIFKCCKLIPVMLGGVFIQGKRYNVADVSAAICMSLGLIWFTLADSTTAPNFNLTGIVFVFNWFCIHFTGIDMH

SEQ ID NO: 844604 - protein, 171 aa, Homo sapiens
AGTHRRKWPAGAGVESAFRGGDRRGGKCRSGRGGGGRGGDGDGPGEGEMLRLAQTPRRLPSPFRVTYRPWGTRAFGAFPVFGTQISSPPENLDTAHLPHPEGAFEEWMRSGWKKRVIPFFERAETGRAVSREEHLFLLARFSPSGWRELPQVPIRGLAGAMIDSGAQLIKA

SEQ ID NO: 844605 - protein, 141 aa, Homo sapiens
PHLVTFLVHLFGQQPSGCSQPAPTLCFSSLCTFKCQRDRTPGALLSAQEAGPLCKPCSWCWALRSSPSSRALGNSAQGVLKVGALEARMSNNPSVARIGLHQHHSNCLYLLHPPLPPSARGGILRLGCGGGENDGFQKGLG

SEQ ID NO: 844606 - protein, 73 aa, Homo sapiens
SSSWMQRQDNASGLPKFLLPWISWCWVKMQPLSEAFLGLEPLTAVAVCQVEAGFLVKSLCIDGTLVLEEAGWK

SEQ ID NO: 844607 - protein, 724 aa, Homo sapiens
MDDDKPFQPKNISKMAELFMECEEEELEPWQKKVEETQDEDDDELIFVGEISSSKPAISNILNRGHSSSSSKGIKSEPHSPGIPEIFRTASQRCRDPPSNPVAASPRFHLVSKSSQSSVTVENASKPDFTKNSQVGSDNSSILLFDSTQESLPPSQDIPAIFREGMKNTSYVLKHPSTSKVNSVTPKKPKTSEDVPQINPSTSLPLIGSPPVTSSQVMLSKGTNTSSPYDAGADYLRACPKCNVQFNLLDPLKYHMKHCCPDMITKFLGVIVKSERPCDEDKTDSETGKLIMLVNEFYYGRHEGVTEKEPKTYTTFKCFSCSKVLKNNIRFMNHMKHHLELEKQNNESWENHTTCQHCYRQYPTPFQLQCHIESTHTPHEFSTICKICELSFETEHILLQHMKDTHKPGEMPYVCQVCQFRSSTFSDVEAHFRAAHENTKNLLCPFCLKVSKMATPYMNHYMKHQKKGVHRCPKCRLQFLTSKEKAEHKAQHRTFIKPKELEGLPPGAKVTIRASLGPLQSKLPTAPFGCAPGTSFLQVTPPTSQNTTARNPRKSNASRSKTSKLHATTSTASKVNTSKPRGRIAKSKAKPSYKQKRQRNRKNKMSLALKNIRCRRGIHKCIECHSKIKDFASHFSIYIHCSFCKYNTNCNKAFVNHMMSSHSNHPGKRFCIFKKHSGTLRGITLVCLKCDFLADSSGLDRMAKHLSQRKTHTCQVIIENGTYI

SEQ ID NO: 844608 - protein, 393 aa, Homo sapiens
MNHMKHHLELEKQNNESWENHTTCQHCYRQYPTPFQLQCHIESTHTPHEFSTICKICELSFETEHILLQHMKDTHKPGEMPYVCQVCQFRSSTFSDVEAHFRAAHENTKNLLCPFCLKVSKMATPYMNHYMKHQKKGVHRCPKCRLQFLTSKEKAEHKAQHRTFIKPKELEGLPPGAKVTIRASLGPLQSKLPTAPFGCAPGTSFLQVTPPTSQNTTARNPRKSNASRSKTSKLHATTSTASKVNTSKPRGRIAKSKAKPSYKQKRQRNRKNKMSLALKNIRCRRGIHKCIECHSKIKDFASHFSIYIHCSFCKYNTNCNKAFVNHMMSSHSNHPGKRFCIFKKHSGTLRGITLVCLKCDFLADSSGLDRMAKHLSQRKTHTCQVIIENGTYI

SEQ ID NO: 844609 - protein, 710 aa, Homo sapiens
MAELFMECEEEELEPWQKKVEETQDEDDDELIFVGEISSSKPAISNILNRGHSSSSSKGIKSEPHSPGIPEIFRTASQRCRDPPSNPVAASPRFHLVSKSSQSSVTVENASKPDFTKNSQVGSDNSSILLFDSTQESLPPSQDIPAIFREGMKNTSYVLKHPSTSKVNSVTPKKPKTSEDVPQINPSTSLPLIGSPPVTSSQVMLSKGTNTSSPYDAGADYLRACPKCNVQFNLLDPLKYHMKHCCPDMITKFLGVIVKSERPCDEDKTDSETGKLIMLVNEFYYGRHEGVTEKEPKTYTTFKCFSCSKVLKNNIRFMNHMKHHLELEKQNNESWENHTTCQHCYRQYPTPFQLQCHIESTHTPHEFSTICKICELSFETEHILLQHMKDTHKPGEMPYVCQVCQFRSSTFSDVEAHFRAAHENTKNLLCPFCLKVSKMATPYMNHYMKHQKKGVHRCPKCRLQFLTSKEKAEHKAQHRTFIKPKELEGLPPGAKVTIRASLGPLQSKLPTAPFGCAPGTSFLQVTPPTSQNTTARNPRKSNASRSKTSKLHATTSTASKVNTSKPRGRIAKSKAKPSYKQKRQRNRKNKMSLALKNIRCRRGIHKCIECHSKIKDFASHFSIYIHCSFCKYNTNCNKAFVNHMMSSHSNHPGKRFCIFKKHSGTLRGITLVCLKCDFLADSSGLDRMAKHLSQRKTHTCQVIIENGTYI

SEQ ID NO: 844610 - protein, 675 aa, Homo sapiens
MDDDKPFQPKNISKMAELFMECEEEELEPWQKKVEETQDEDDDELIFVGEISSSKPAISNILNRGHSSSSSKGIKSEPHSPGIPEIFRTASQRCRDPPSNPVAASPRFHLVSKSSQSSVTVENASKPDFTKNSQVGSDNSSILLFDSTQESLPPSQDIPAIFREGMKNTSYVLKHPSTSKVNSVTPKKPKTSEDVPQINPSTSLPLIGSPPVTSSQVMLSKGTNTSSPYDAGADYLRACPKCNVQFNLLDPLKYHMKHCCPDMITKFLGVIVKSERPCDEDKTDSETGKLIMLVNEFYYGRHEGVTEKEPKTYTTFKCFSCSKVLKNNIRFMNHMKHHLELEKQNNESWENHTTCQHCYRQYPTPFQLQCHIESTHTPHEFSTICKICELSFETEHILLQHMKDTHKPGEMPYVCQKKGVHRCPKCRLQFLTSKEKAEHKAQHRTFIKPKELEGLPPGAKVTIRASLGPLQSKLPTAPFGCAPGTSFLQVTPPTSQNTTARNPRKSNASRSKTSKLHATTSTASKVNTSKPRGRIAKSKAKPSYKQKRQRNRKNKMSLALKNIRCRRGIHKCIECHSKIKDFASHFSIYIHCSFCKYNTNCNKAFVNHMMSSHSNHPGKRFCIFKKHSGTLRGITLVCLKCDFLADSSGLDRMAKHLSQRKTHTCQVIIENGTYI

SEQ ID NO: 844611 - protein, 133 aa, Homo sapiens
MEAPQRQQATLGKNTQPDWSKVPGFRSQFRSSPKTSELLEGLCDAVMSFALLRSFLILWKQLEVLKEHWGRLKLQGQDINSVSLHKRFSELYETDVLYPSMKAIARQMGKEDEFEGFIVNNQSVLPPSGASEV

SEQ ID NO: 844612 - protein, 114 aa, Homo sapiens
MPRPASARARCAHPLTCAHCLALPREMNPVPQMEMQKSPSSASLTLGAVDQSCSYSAILAPYSHYLLELWLRHYNRAPSPLSKSWEMVIVNASPILEAPGCRGPQLAGCGGSGL

SEQ ID NO: 844613 - protein, 131 aa, Homo sapiens
MPRPASARARCAHPLTCAHCLALPREMNPVPQMEMQKSPSSASLTLGAVDQSCSYSAILAPYSHYLLELWLRHYNRAPSPLSKSWEMVIVNASPILEAPGCRGPQLDPSHPWSLTLDLSQKAEKRSSLESL

SEQ ID NO: 844614 - protein, 114 aa, Homo sapiens; identical to SEQ ID NO: 844612

SEQ ID NO: 844615 - protein, 341 aa, Homo sapiens
GAPGPPRCEHCGWALRISRFLPGFHSFAPCTVAPSLRAQPAKQRAPVAGVMQRARPTLWAAALTLLVLLRGPPVARAGASSGGLGPVVRCEPCDARALAQCAPPPAVCAELVREPGCGCCLTCALSEGQPCGIYTERCGSGLRCQPSPDEARPLQALLDGRGLCVNASAVSRLRAYLLPAPPAPGNASESEEDRSAGSVESPSVSSTHRVSDPKFHPLHSKIIIIKKGHAKDSQRYKVDYESQSTDTQNFSSESKRETEYGPCRREMEDTLNHLKFLNVLSPRGVHIPNCDKKGFYKKKQCRPSKGRKRGFCWCVDKYGQPLPGYTTKGKEDVHCYSMQSK

SEQ ID NO: 844616 - protein, 334 aa, Homo sapiens
KARYEAAVFIGRRVPGFHSFAPCTVAPSLRAQPAKQRAPVAGVMQRARPTLWAAALTLLVLLRGPPVARAGASSGGLGPVVRCEPCDARALAQCAPPPAVCAELVREPGCGCCLTCALSEGQPCGIYTERCGSGLRCQPSPDEARPLQALLDGRGLCVNASAVSRLRAYLLPAPPAPGNASESEEDRSAGSVESPSVSSTHRVSDPKFHPLHSKIIIIKKGHAKDSQRYKVDYESQSTDTQNFSSESKRETEYGPCRREMEDTLNHLKFLNVLSPRGVHIPNCDKKGFYKKKQCRPSKGRKRGFCWCVDKYGQPLPGYTTKGKEDVHCYSMQSK

SEQ ID NO: 844617 - protein, 347 aa, Homo sapiens
GAPGPPRCEHCGWALRISRFLPGFHSFAPCTVAPSLRAQPAKQRAPVAGVMQRARPTLWAAALTLLVLLRGPPVARAGASSGGLGPVVRCEPCDARALAQCAPPPAVCAELVREPGCGCCLTCALSEGQPCGIYTERCGSGLRCQPSPDEARPLQALLDGRGLCVNASAVSRLRAYLLPAPPAPGEPPAPGNASESEEDRSAGSVESPSVSSTHRVSDPKFHPLHSKIIIIKKGHAKDSQRYKVDYESQSTDTQNFSSESKRETEYGPCRREMEDTLNHLKFLNVLSPRGVHIPNCDKKGFYKKKQCRPSKGRKRGFCWCVDKYGQPLPGYTTKGKEDVHCYSMQSK

SEQ ID NO: 844618 - protein, 341 aa, Homo sapiens
  misc_feature (251)..(251): Xaa can be any naturally occurring amino acid
GAPGPPRCEHCGWALRISRFLPGFHSFAPCTVAPSLRAQPAKQRAPVAGVMQRARPTLWAAALTLLVLLRGPPVARAGASSGGLGPVVRCEPCDARALAQCAPPPAVCAELVREPGCGCCLTCALSEGQPCGIYTERCGSGLRCQPSPDEARPLQALLDGRGLCVNASAVSRLRAYLLPAPPAPGNASESEEDRSAGSVESPSVSSTHRVSDPKFHPLHSKIIIIKKGHAKDSQRYKVDYESQSTDTQNFXGGGGGGGGGGPCRREMEDTLNHLKFLNVLSPRGVHIPNCDKKGFYKKKQCRPSKGRKRGFCWCVDKYGQPLPGYTTKGKEDVHCYSMQSK

SEQ ID NO: 844619 - protein, 341 aa, Homo sapiens; identical to SEQ ID NO: 844615

SEQ ID NO: 844620 - protein, 84 aa, Homo sapiens
SINYYSINYYSINYYSINYYSINYYSINYYSINYYSINYYSINYYSINYDQQLATASIYISVCGELIFFKPKFRKRFLKCLWFL

SEQ ID NO: 844621 - protein, 84 aa, Homo sapiens
PLPVQCAQGVGVKRVLYIGNTAAYVTKSVVGRFDQHVVSIHGRMKSRVLQCAQALSRIGKPLNPGHPDIPTHAPGAHSLLWCHF

SEQ ID NO: 844622 - protein, 307 aa, Homo sapiens
GAPGPPRCEHCGWALRISRFLPGFHSFAPCTVAPSLRAQPAKQRAPVAGVMQRARPTLWAAALTLLVLLRGPPVARAGASSGGLGPVVRCEPCDARALAQCAPPPAVCAELVREPGCGCCLTCALSEGQPCGIYTERCGSGLRCQPSPDEARPLQALLDGRGLCVNASAVSRLRAYLLPAPPAPGNASESEEDRSAGSVESPSVSSTHRVSDPKFHPLHSKIIIIKKGHAKDSQRYKVDYESQSTDTQNFSSESKRETEYGPCRREMEDTLNHLKFLNVLSPRGVHIPNCDKKVLESRCLQSRRLAG

SEQ ID NO: 844623 - protein, 102 aa, Homo sapiens
RSAGSVESPSVSSTHRVSDPKFHPLHSKIIIIKKGHAKDSQRYKVDYESQSTDTQNFSSESKRETEYVRAFPLVKGGGQDLPSLGTQSLLRAILTQQTPAPG

SEQ ID NO: 844624 - protein, 341 aa, Homo sapiens; identical to SEQ ID NO: 844615

SEQ ID NO: 844625 - protein, 341 aa, Homo sapiens; identical to SEQ ID NO: 844615

SEQ ID NO: 844626 - protein, 301 aa, Homo sapiens
GAPGPPRCEHCGWALRISRFLPGFHSFAPCTVAPSLRAQPAKQRAPVAGVMQRARPTLWAAALTLLVLLRGPPVARAGASSGGLGPVVRCEPCDARALAQCAPPPAVCAELVREPGCGCCLTCALSEGQPCGIYTERCGSGLRCQPSPDEARPLQALLDGRGLCVNASAVSRLRAYLLPAPPAPGNASESEEDRSAGSVESPSVSSTHRVSDPKFHPLHSKIIIIKKGHAKDSQRYKVDYESQSTDTQNFSSESKRETEYCRPSKGRKRGFCWCVDKYGQPLPGYTTKGKEDVHCYSMQSK

SEQ ID NO: 844627 - protein, 341 aa, Homo sapiens; identical to SEQ ID NO: 844615

SEQ ID NO: 844628 - protein, 341 aa, Homo sapiens; identical to SEQ ID NO: 844615

SEQ ID NO: 844629 - protein, 341 aa, Homo sapiens; identical to SEQ ID NO: 844615

SEQ ID NO: 844630 - protein, 107 aa, Homo sapiens
RLGTEAAVFIGRRVPGFHSFAPCTVAPSLRAQPAKQRAPVAGVMQRARPTLWAAALTLLVLLRGPPVARAGASSVGGLCVPVCAAVLMPVLTAASALVPMLLLHILP

SEQ ID NO: 844631 - protein, 336 aa, Homo sapiens [sequence omitted]

SEQ ID NO: 844632 - protein, 435 aa, Homo sapiens
MLRGPWRQLWLFLLLLLPGAPEPRGASRPWEGTDEPGSAWAWPGFQRLQEQLRAAGALSKRYWTLFSCQVWPDDCDEDEEAATGPLGWRLPLLGQRYLDLLTTWYCSFKDCCPRGDCRISNNFTGLEWDLNVRLHGQHLVQQLVLRTVRGYLETPQPEKALALSFHGWSGTGKNFVARMLVENLYRDGLMSDCVRMFIATFHFPHPKYVDLYKEQLMSQIRETQQLCHQTLFIFDEAEKLHPGLLEVLGPHLERRAPEGHRAESPWTIFLFLSTLQNGEGPGVHAPEDGVREYHSVGFHSTLDPAFQPLPSNLRGDIINEVVLKLLKAGWSREEITMEHLEPHLQAEIVETIDNGFGHSRLVKENLIDYFIPFLPLEYRHVRLCARDAFLSQELLYKEETLDEIAQMMVYVPKEEQLFSSQGCKSISQRINYFLS

SEQ ID NO: 844633 - protein, 397 aa, Homo sapiens
MLRGPWRQLWLFLLLLLPGAPEPRGASRPWEGTDEPGSAWAWPGFQRLQEQLRAAGALSKRYWTLFSCQVWPDDCDEDEEAATGPLGWRLPLLGQRYLDLLTTWYCSFKDCCPRGDCRISNNFTGLEWDLNVRLHGQHLVQQLVLRTVRGYLETPQPEKALALSFHGWSGTGKNFVARMLVENLYRDGLMSDCVRMFIATFHFPHPKYVDLYKEQLMSQIRETQQLCHQTLFIFDEAEKLHPGLLEVLGPHLERRAPEGHRAESPWTIFLFLSNLRGDIINEVVLKLLKAGWSREEITMEHLEPHLQAEIVETIDNGFGHSRLVKENLIDYFIPFLPLEYRHVRLCARDAFLSQELLYKEETLDEIAQMMVYVPKEEQLFSSQGCKSISQRINYFLS

SEQ ID NO: 844634 - protein, 449 aa, Homo sapiens
MLRGPWRQLWLFLLLLLPGAPEPRGASRPWEGTDEPGSAWAWPGFQRLQEQLRAAGALSKRYWTLFSCQVWPDDCDEDEEAATGPLGLEDRQWAESGLGVENLSSGCPSVPDKLCGKVAASLYSTGWSPLGLTAPPFPGWRLPLLGQRYLDLLTTWYCSFKDCCPRGDCRISNNFTGLEWDLNVRLHGQHLVQQLVLRTVRGYLETPQPEKALALSFHGWSGTGKNFVARMLVENLYRDGLMSDCVRMFIATFHFPHPKYVDLYKEQLMSQIRETQQLCHQTLFIFDEAEKLHPGLLEVLGPHLERRAPEGHRAESPWTIFLFLSNLRGDIINEVVLKLLKAGWSREEITMEHLEPHLQAEIVETIDNGFGHSRLVKENLIDYFIPFLPLEYRHVRLCARDAFLSQELLYKEETLDEIAQMMVYVPKEEQLFSSQGCKSISQRINYFLS

SEQ ID NO: 844635 - protein, 181 aa, Homo sapiens
MSQIRETQQLCHQTLFIFDEAEKLHPGLLEVLGPHLERRAPEGHRAESPWTIFLFLSNLRGDIINEVVLKLLKAGWSREEITMEHLEPHLQAEIVETIDNGFGHSRLVKENLIDYFIPFLPLEYRHVRLCARDAFLSQELLYKEETLDEIAQMMVYVPKEEQLFSSQGCKSISQRINYFLS

SEQ ID NO: 844636 - protein, 289 aa, Homo sapiens
MLRGPWRQLWLFLLLLLPGAPEPRGASRPWEGTDEPGSAWAWPGFQRLQEQLRAAGALSKRYWTLFSCQVWPDDCDEDEEAATGPLGWRLPLLGQRYLDLLTTWYCSFKDCCPRGDCRISNNFTGLEWDLNVRLHGQHLVQQLVLRTVRGYLETPQPEKALALSFHGWSGTGKNFVARMLVENLYRDGLMSDCVRMFIATFHFPHPKYVDLYKEQLMSQIRETQQLCHQTLFIFDEAEKLHPGLLEVLGPHLERRAPEGHRAESPWTIFLFLRWVLGNNSQEGWGRGRY

SEQ ID NO: 844637 - protein, 281 aa, Homo sapiens
MLRGPWRQLWLFLLLLLPGAPEPRGASRPWEGTDEPGSAWAWPGFQRLQEQLRAAGALSKRYWTLFSCQVWPDDCDEDEEAATGPLGWRLPLLGQRYLDLLTTWYCSFKDCCPRGDCRISNNFTGLEWDLNVRLHGQHLVQQLVLRTVRGYLETPQPEKALALSFHGWSGTGKNFVARMLVENLYRDGLMSDCVRMFIATFHFPHPKYVDLYKEQLMSQIRETQQLCHQTLFIFDEAEKLHPGLLEVLGPHLERRAPEGHRAESPWTIFLFLSNSQGRINF

SEQ ID NO: 844638 - protein, 397 aa, Homo sapiens; identical to SEQ ID NO: 844633

SEQ ID NO: 844639 - protein, 397 aa, Homo sapiens; identical to SEQ ID NO: 844633

SEQ ID NO: 844640 - protein, 397 aa, Homo sapiens; identical to SEQ ID NO: 844633

SEQ ID NO: 844641 - protein, 181 aa, Homo sapiens; identical to SEQ ID NO: 844635

SEQ ID NO: 844642 - protein, 146 aa, Homo sapiens [sequence omitted]

SEQ ID NO: 844643 - protein, 102 aa, Homo sapiens
HEGRGRGKKKKNNMSSGSGKVSLSRKLYLFNMISVASFFQCLSYAINILPFSYVNGTTLGSRTKVCISFFLQSCWVVLSNGTFYSISPSSLAPLVPSSHLCA

SEQ ID NO: 844644 - protein, 1036 aa, Homo sapiens
MPRLKESRSHESLLSPSSAVEALDLSMEEEVVIKPVHSSILGQDYCFEVTTSSGSKCFSCRSAAERDKWMENLRRAVHPNKDNSRRVEHILKLWVIEAKDLPAKKKYLCELCLDDVLYARTTGKLKTDNVFWGEHFEFHNLPPLRTVTVHLYRETDKKKKKERNSYLGLVSLPAASVAGRQFVEKWYPVVTPNPKGGKGPGPMIRIKARYQTITILPMEMYKEFAEHITNHYLGLCAALEPILSAKTKEEMASALVHILQSTGKVKDFLTDLMMSEVDRCGDNEHLIFRENTLATKAIEEYLKLVGQKYLQDALGEFIKALYESDENCEVDPSKCSAADLPEHQGNLKMCCELAFCKIINSYCVFPRELKEVFASWRQECSSRGRPDISERLISASLFLRFLCPAIMSPSLFNLLQEYPDDRTARTLTLIAKVTQNLANFAKFGSKEEYMSFMNQFLEHEWTNMQRFLLEISNPETLSNTAGFEGYIDLGRELSSLHSLLWEAVSQLEQSIVSKLGPLPRILRDVHTALSTPGSGQLPGTNDLASTPGSGSSSISAGLQKMVIENDLSGLIDFTRLPSPTPENKDLFFVTRSSGVQPSPARSSSYSEANEPDLQMANGGKSLSMVDLQDARTLDGEAGSPAGPDVLPTDGQAAAAQLVAGWPARATPVNLAGLATVRRAGQTPTTPGTSEGAPGRPQLLAPLSFQNPVYQMAAGLPLSPRGLGDSGSEGHSSLSSHSNSEELAAAAKLGSFSTAAEELARRPGELARRQMSLTEKGGQPTVPRQNSAGPQRRIDQPPPPPPPPPPAPRGRTPPNLLSTLQYPRPSSGTLASASPDWVGPSTRLRQQSSSSKGDSPELKPRAVHKQGPSPVSPNALDRTAAWLLTMNAQLLEDEGLGPDPPHRDRLRSKDELSQAEKDLAVLQDKLRISTKKLEEYETLFKCQEETTQKLVLEYQARLEEGEERLRRQQEDKDIQMKGIISRLMSVEEELKKDHAEMQAAVDSKQKIIDAQEKRIASLDAANARLMSALTQLKESMH

SEQ ID NO: 844645 - protein, 1065 aa, Homo sapiens
MPRLKESRSHESLLSPSSAVEALDLSMEEEVVIKPVHSSILGQDYCFEVTTSSGSKCFSCRSAAERDKWMENLRRAVHPNKDNSRRVEHILKLWVIEAKDLPAKKKYLCELCLDDVLYARTTGKLKTDNVFWGEHFEFHNLPPLRTVTVHLYRETDKKKKKERNSYLGLVSLPAASVAGRQFVEKWYPVVTPNPKGGKGPGPMIRIKARYQTITILPMEMYKEFAEHITNHYLGLCAALEPILSAKTKEEMASALVHILQSTGKVKDFLTDLMMSEVDRCGDNEHLIFRENTLATKAIEEYLKLVGQKYLQDALGEFIKALYESDENCEVDPSKCSAADLPEHQGNLKMCCELAFCKIINSYCVFPRELKEVFASWRQECSSRGRPDISERLISASLFLRFLCPAIMSPSLFNLLQEYPDDRTARTLTLIAKVTQNLANFAKFGSKEEYMSFMNQFLEHEWTNMQRFLLEISNPETLSNTAGFEGYIDLGRELSSLHSLLWEAVSQLEQSIVSKLGPLPRILRDVHTALSTPGSGQLPGTNDLASTPGSGSSSISAGLQKMVIENDLSGLIDFTRLPSPTPENKDLFFVTRSSGVQPSPARSSSYSEANEPDLQMANGGKSLSMVDLQDARTLDGEAGSPAGPDVLPTDGQAAAAQLVAGWPARATPVNLAGLATVRRAGQTPTTPGTSEGAPGRPQLLAPLSFQNPVYQMAAGLPLSPRGLGDSGSEGHSSLSSHSNSEELAAAAKLGSFSTAAEELARRPGELARRQMSLTEKGGQPTVPRQNSAGPQRRIDQPPPPPPPPPPAPRGRTPPNLLSTLQYPRPSSGTLASASPDWVGPSTRLRQQSSSSKGDSPELKPRAVHKQGPSPVSPNALDRTAAWLLTMNAQLLEDEGLGPDPPHRDRLRSKDELSQAEKDLAVLQDKLRISTKKLEEYETLFKCQEETTQKLVLEYQARLEEGEERLRRQQEDKDIQMKGIISRLMSVEEELKKDHAEMQAAVDSKQKIIDAQEKRIASLDAANARLMSALTQLKERYSMQARNGISPTNPTKLQITENGEFRNSSNC

SEQ ID NO: 844646 - protein, 1065 aa, Homo sapiens; identical to SEQ ID NO: 844645

SEQ ID NO: 844647 - protein, 1065 aa, Homo sapiens; identical to SEQ ID NO: 844645

SEQ ID NO: 844648 - protein, 388 aa, Homo sapiens
MPRLKESRSHESLLSPSSAVEALDLSMEEEVVIKPVHSSILGQDYCFEVTTSSGSKCFSCRSAAERDKWMENLRRAVHPNKDNSRRVEHILKLWVIEAKDLPAKKKYLCELCLDDVLYARTTGKLKTDNVFWGEHFEFHNLPPLRTVTVHLYRETDKKKKKERNSYLGLVSLPAASVAGRQFVEKWYPVVTPNPKGGKGPGPMIRIKARYQTITILPMEMYKEFAEHITNHYLGLCAALEPILSAKTKEEMASALVHILQSTGKVKDFLTDLMMSEVDRCGDNEHLIFRENTLATKAIEEYLKLVGQKYLQDALGEFIKALYESDENCEVDPSKCSAGCAPGQMPSPPWSWHRGWARGLHTAPGSGGDVLSELFVHLHGQDGDGLVTH

SEQ ID NO: 844649 - protein, 1065 aa, Homo sapiens; identical to SEQ ID NO: 844645

SEQ ID NO: 844650 - protein, 986 aa, Homo sapiens
MPRLKESRSHESLLSPSSAVEALDLSMEEEVVIKPVHSSILGQDYCFEVTTSSGSKCFSCRSAAERDKWMENLRRAVHPNKDNSRRVEHILKLWVIEAKDLPAKKKYLCELCLDDVLYARTTGKLKTDNVFWGEHFEFHNLPPLRTVTVHLYRETDKKKKKERNSYLGLVSLPAASVAGRQFVEKWYPVVTPNPKGGKGPGPMIRIKARYQTITILPMEMYKEFAEHITNHYLGLCAALEPILSAKTKEEMASALVHILQSTGKVKDFLTDLMMSEVDRCGDNEHLIFRENTLATKAIEEYLKLVGQKYLQDALGEFIKALYESDENCEVDPSKCSAADLPEHQGNLKMCCELAFCKIINSYCFGSKEEYMSFMNQFLEHEWTNMQRFLLEISNPETLSNTAGFEGYIDLGRELSSLHSLLWEAVSQLEQSIVSKLGPLPRILRDVHTALSTPGSGQLPGTNDLASTPGSGSSSISAGLQKMVIENDLSGLIDFTRLPSPTPENKDLFFVTRSSGVQPSPARSSSYSEANEPDLQMANGGKSLSMVDLQDARTLDGEAGSPAGPDVLPTDGQAAAAQLVAGWPARATPVNLAGLATVRRAGQTPTTPGTSEGAPGRPQLLAPLSFQNPVYQMAAGLPLSPRGLGDSGSEGHSSLSSHSNSEELAAAAKLGSFSTAAEELARRPGELARRQMSLTEKGGQPTVPRQNSAGPQRRIDQPPPPPPPPPPAPRGRTPPNLLSTLQYPRPSSGTLASASPDWVGPSTRLRQQSSSSKGDSPELKPRAVHKQGPSPVSPNALDRTAAWLLTMNAQLLEDEGLGPDPPHRDRLRSKDELSQAEKDLAVLQDKLRISTKKLEEYETLFKCQEETTQKLVLEYQARLEEGEERLRRQQEDKDIQMKGIISRLMSVEEELKKDHAEMQAAVDSKQKIIDAQEKRIASLDAANARLMSALTQLKERYSMQARNGISPTNPTKLQITENGEFRNSSNC

SEQ ID NO: 844651 - protein, 1065 aa, Homo sapiens; identical to SEQ ID NO: 844645

SEQ ID NO: 844652 - protein, 416 aa, Homo sapiens
MPRLKESRSHESLLSPSSAVEALDLSMEEEVVIKPVHSSILGQDYCFEVTTSSGSKCFSCRSAAERDKWMENLRRAVHPNKDNSRRVEHILKLWVIEAKDLPAKKKYLCELCLDDVLYARTTGKLKTDNVFWGEHFEFHNLPPLRTVTVHLYRETDKKKKKERNSYLGLVSLPAASVAGRQFVEKWYPVVTPNPKGGKGPGPMIRIKARYQTITILPMEMYKEFAEHITNHYLGLCAALEPILSAKTKEEMASALVHILQSTGKVKDFLTDLMMSEVDRCGDNEHLIFRENTLATKAIEEYLKLVGQKYLQDALGEFIKALYESDENCEVDPSKCSAADLPEHQGNLKMCCELAFCKIINSYCVFPRELKEVFASWRQECSSRGRPDISERLISASLFLRFLCPAIMSPLPASTEA

SEQ ID NO: 844653 - protein, 70 aa, Homo sapiens
RSLSHDPRSHPHCPQEKRIASLDAANARLMSALTQLKERYSMQARNGISPTNPTKLQITENGEFRNSSNC

SEQ ID NO: 844654 - protein, 144 aa, Homo sapiens
MEFPGGNDNYLTITGPSHPFLSGAETFHTPSLGDEEFEIPPISLDSDPSLAVSDVVGHFDDLADPSSSQDGSFSAQYGVQTLDMPVGMTHGLMEQGGGLLSGGLTMVRGKTLSGLPQLMGMALGETKLLYSLLHLGITCFSSCG

SEQ ID NO: 844655 - protein, 538 aa, Homo sapiens [sequence omitted]

SEQ ID NO: 844656 - protein, 544 aa, Homo sapiens
MEFPGGNDNYLTITGPSHPFLSGAETFHTPSLGDEEFEIPPISLDSDPSLAVSDVVGHFDDLADPSSSQDGSFSAQYGVQTLDMPVGMTHGLMEQGGGLLSGGLTMDLDHSIGTQYSANPPVTIDVPMTDMTSGLMGHSQLTTIDQSELSSQLGLSLGGGTILPPAQSPEDRLSTTPSPTSSLHEDGVEDFRRQLPSQKTVVVEAGKKQKAPKKRKKKDPNEPQKPVSAYALFFRDTQAAIKGQNPNATFGEVSKIVASMWDSLGEEQKQVYKRKTEAAKKEYLKALAAYKDNQECQATVETVELDPAPPSQTPSPPPMATVDPASPAPASIEPPALSPSIVVNSTLSSYVANQASSGAGGQPNITKLIITKQMLPSSITMSQGGMVTVIPATVVTSRGLQLGQTSTATIQPSQQAQIVTRSVLQAAAAAAAAASMQLPPPRLQPPPLQQMPQPPTQQQVTILQQPPPLQAMQQPPPQKVRINLQQQPPPLQIKSVPLPTLKMQTTLVPPTVESSPERPMNNSPEAHTVEEQVTRKEYEKGLEI

SEQ ID NO: 844657 - protein, 317 aa, Homo sapiens
MEFPGGNDNYLTITGPSHPFLSGAETFHTPSLGDEEFEIPPISLDSDPSLAVSDVVGHFDDLADPSSSQDGSFSAQYGVQTLDMPVGMTHGLMEQGGGLLSGGLTMDLDHSIGTQYSANPPVTIDVPMTDMTSGLMGHSQLTTIDQSELSSQLGLSLGGGTILPPAQSPEDRLSTTPSPTSSLHEDGVEDFRRQLPSQKTVVVEAGKKQKAPKKRKKKDPNEPQKPVSAYALFFRDTQAAIKGQNPNATFGEVSKIVASMWDSLGEEQKQVYKRKTEAAKKEYLKALAAYKDNQECQATVETSGIGSSTMSFLLPCK

SEQ ID NO: 844658 - protein, 621 aa, Homo sapiens
MEFPGGNDNYLTITGPSHPFLSGAETFHTPSLGDEEFEIPPISLDSDPSLAVSDVVGHFDDLADPSSSQDGSFSAQYGVQTLDMPVGMTHGLMEQGGGLLSGGLTMDLDHSIGTQYSANPPVTIDVPMTDMTSGLMGHSQLTTIDQSELSSQLGLSLGGGTILPPAQSPEDRLSTTPSPTSSLHEDGVEDFRRQLPSQKTVVVEAGKKQKAPKKRKKKDPNEPQKPVSAYALFFRDTQAAIKGQNPNATFGEVSKIVASMWDSLGEEQKQVYKRKTEAAKKEYLKALAAYKDNQECQATVETVELDPAPPSQTPSPPPMATVDPASPAPASIEPPALSPSIVVNSTLSSYVANQASSGAGGQPNITKLIITKQMLPSSITMSQGGMVTVIPATVVTSRGLQLGQTSTATIQPSQQAQIVTRSVLQAAAAAAAAASMQLPPPRLQPPPLQQMPQPPTQQQVTILQQPPPLQAMQQPPPQKVRINLQQQPPPLQIKSVPLPTLKMQTTLVPPTVESSPERPMNNSPEAHTVEAPSPETICEMITDVVPEVESPSQMDVELVSGSPVALSPQPRCVRSGCENPPIVSKDWDNEYCSNECVVKHCRDVFLAWVASRNSNTVVFVK

SEQ ID NO: 844659 - protein, 621 aa, Homo sapiens; identical to SEQ ID NO: 844658

SEQ ID NO: 844660 - protein, 621 aa, Homo sapiens; identical to SEQ ID NO: 844658

SEQ ID NO: 844661 - protein, 494 aa, Homo sapiens [sequence omitted]

SEQ ID NO: 844662 - protein, 494 aa, Homo sapiens [sequence omitted]

SEQ ID NO: 844663 - protein, 602 aa, Homo sapiens
MEFPGGNDNYLTITGPSHPFLSGAETFHTPSLGDEEFEIPPISLDSDPSLAVSDVVGHFDDLADPSSSQDGSFSAQYGVQTLDMPVGMTHGLMEQGGGLLSGGLTMDLDHSIGTQYSANPPVTIDVPMTDMTSGLMGHSQLTTIDQSELSSQLGLSLGGGTILPPAQSPEDRLSTTPSPTSSLHEDGVEDFRRQLPSQKTVVVEAGKKQKAPKKRKKKDPNEPQKPVSAYALFFRDTQAAIKGQNPNATFGEVSKIVASMWDSLGEEQKQVYKRKTEAAKKEYLKALAAYKDNQECQATVETVELDPAPPSQTPSPPPMATVDPASPAPASIEPPALSPSIVVNSTLSSYVANQASSGAGGQPNITKLIITKQMLPSSITMSQGGMVTVIPATVVTSRGLQLGQTSTATIQPSQQAQIVTRSVLQAAAAAAAAASMQLPPPRLQPPPLQQMPQPPTQQQVTILQQPPPLQAMQQPPPQKVRINLQQQPPPLQIKSVPLPTLKMQTTLVPPTVESSPERPMNNSPEAHTVEAPSPETICEMITDVVPEVESPSQMDVELVSGSPVALSPQPRCVRSGCENPPIVSKDWDNEYCSNECVVKHCR

SEQ ID NO: 844664 - protein, 376 aa, Homo sapiens
MEFPGGNDNYLTITGPSHPFLSGAETFHTPSLGDEEFEIPPISLDSDPSLAVSDVVGHFDDLADPSSSQDGSFSAQYGVQTLDMPVGMTPALSPSIVVNSTLSSYVANQASSGAGGQPNITKLIITKQMLPSSITMSQGGMVTVIPATVVTSRGLQLGQTSTATIQPSQQAQIVTRSVLQAAAAAAAAASMQLPPPRLQPPPLQQMPQPPTQQQVTILQQPPPLQAMQQPPPQKVRINLQQQPPPLQIKSVPLPTLKMQTTLVPPTVESSPERPMNNSPEAHTVEAPSPETICEMITDVVPEVESPSQMDVELVSGSPVALSPQPRCVRSGCENPPIVSKDWDNEYCSNECVVKHCRDVFLAWVASRNSNTVVFVK

SEQ ID NO: 844665 - protein, 367 aa, Homo sapiens
MEFPGGNDNYLTITGPSHPFLSGAETFHTPSLGDEEFEIPPISLDSDPSLAVSDVVGHFDDLADPSSSQDGSFSAQYGVQTLDMPVGMTHGLMEQGGGLLSGGLTMDLDHSIGTQYSANPPVTIDVPMTDMTSGLMGHSQLTTIDQSELSSQLGLSLGGGTILPPAQSPEDRLSTTPSPTSSLHEDGVEDFRRQLPSQKTVVVEAGKKQKAPKKRKKKDPNEPQKPVSAYALFFRDTQAAIKGQNPNATFGEVSKIVASMWDSLGEEQKQVYKRKTEAAKKEYLKALAAYKDNQECQATVETVELDPAPPSQTPSPPPMATVDPASPAPASIEPPALSPSLLKLQKITQTWCPALQPGRRSKTVSKQ

SEQ ID NO: 844666 - protein, 683 aa, Homo sapiens
MALSKRELDELKPWIEKTVKRVLGFSEPTVVTAALNCVGKGMDKKKAADHLKPFLDDSTLRFVDKLFEAVEEGRSSRHSKSSSDRSRKRELKEVFGDDSEISKESSGVKKRRIPRFEEVEEEPEVIPGPPSESPGMLTKLQIKQMMEAATRQIEERKKQLSFISPPTPQPKTPSSSQPERLPIGNTIQPSQAATFMNDAIEKARKAAELQARIQAQLALKPGLIGNANMVGLANLHAMGIAPPKVELKDQTKPTPLILDEQGRTVDATGKEIELTHRMPTLKANIRAVKREQFKQQLKEKPSEDMESNTFFDPRVSIAPSQRQRRTFKFHDKGKFEKIAQRLRTKAQLEKLQAEISQAARKTGIHTSTRLALIAPKKELKEGDIPEIEWWDSYIIPNGFDLTEENPKREDYFGITNLVEHPAQLNPPVDNDTPVTLGVYLTKKEQKKLRRQTRREAQKELQEKVRLGLMPPPEPKVRISNLMRVLGTEAVQDPTKVEAHVRAQMAKRQKAHEEANAARKLTAEQRKVKKIKKLKEDISQGVHISVYRVRNLSNPAKKFKIEANAGQLYLTGVVVLHKDVNVVVVEGGPKAQKKFKRLMLHRIKWDEQTSNTKGDDDEESDEEAVKKTNKCVLVWEGTAKDRSFGEMKFKQCPTENMAREHFKKHGAEHYWDLALSESVLESTD

SEQ ID NO: 844667 - protein, 683 aa, Homo sapiens; identical to SEQ ID NO: 844666

SEQ ID NO: 844668 - protein, 120 aa, Homo sapiens
MALSKRELDELKPWIEKTVKRVLGFSEPTVVTAALNCVGKGMDKKKAADHLKPFLDDSTLRFVDKLFEAVEEGRSSRHSKSSSDRSRKRELKEVFGDDSEISKESSGVKKRRIPRFEEVE

SEQ ID NO: 844669 - protein, 683 aa, Homo sapiens; identical to SEQ ID NO: 844666

SEQ ID NO: 844670 - protein, 715 aa, Homo sapiens
MALSKRELDELKPWIEKTVKRVLGFSEPTVVTAALNCVGKGMDKKKAADHLKPFLDDSTLRFVDKLFEAVEEGRSSRHSKSSSDRSRKRELKEFQEALAPGRGYVLAKHEPSYEEGMSPKAYHLEVFGDDSEISKESSGVKKRRIPRFEEVEEEPEVIPGPPSESPGMLTKLQIKQMMEAATRQIEERKKQLSFISPPTPQPKTPSSSQPERLPIGNTIQPSQAATFMNDAIEKARKAAELQARIQAQLALKPGLIGNANMVGLANLHAMGIAPPKVELKDQTKPTPLILDEQGRTVDATGKEIELTHRMPTLKANIRAVKREQFKQQLKEKPSEDMESNTFFDPRVSIAPSQRQRRTFKFHDKGKFEKIAQRLRTKAQLEKLQAEISQAARKTGIHTSTRLALIAPKKELKEGDIPEIEWWDSYIIPNGFDLTEENPKREDYFGITNLVEHPAQLNPPVDNDTPVTLGVYLTKKEQKKLRRQTRREAQKELQEKVRLGLMPPPEPKVRISNLMRVLGTEAVQDPTKVEAHVRAQMAKRQKAHEEANAARKLTAEQRKVKKIKKLKEDISQGVHISVYRVRNLSNPAKKFKIEANAGQLYLTGVVVLHKDVNVVVVEGGPKAQKKFKRLMLHRIKWDEQTSNTKGDDDEESDEEAVKKTNKCVLVWEGTAKDRSFGEMKFKQCPTENMAREHFKKHGAEHYWDLALSESVLESTD

SEQ ID NO: 844671 - protein, 488 aa, Homo sapiens
MNDAIEKARKAAELQARIQAQLALKPGLIGNANMVGLANLHAMGIAPPKVELKDQTKPTPLILDEQGRTVDATGKEIELTHRMPTLKANIRAVKREQFKQQLKEKPSEDMESNTFFDPRVSIAPSQRQRRTFKFHDKGKFEKIAQRLRTKAQLEKLQAEISQAARKTGIHTSTRLALIAPKKELKEGDIPEIEWWDSYIIPNGFDLTEENPKREDYFGITNLVEHPAQLNPPVDNDTPVTLGVYLTKKEQKKLRRQTRREAQKELQEKVRLGLMPPPEPKVRISNLMRVLGTEAVQDPTKVEAHVRAQMAKRQKAHEEANAARKLTAEQRKVKKIKKLKEDISQGVHISVYRVRNLSNPAKKFKIEANAGQLYLTGVVVLHKDVNVVVVEGGPKAQKKFKRLMLHRIKWDEQTSNTKGDDDEESDEEAVKKTNKCVLVWEGTAKDRSFGEMKFKQCPTENMAREHFKKHGAEHYWDLALSESVLESTD

SEQ ID NO: 844672 - protein, 634 aa, Homo sapiens
MALSKRELDELKPWIEKTVKRVLGFSEPTVVTAALNCVGKGMDKKKAADHLKPFLDDSTLRFVDKLFEAVEEGRSSRHSKSSSDRSRKRELKIKQMMEAATRQIEERKKQLSFISPPTPQPKTPSSSQPERLPIGNTIQPSQAATFMNDAIEKARKAAELQARIQAQLALKPGLIGNANMVGLANLHAMGIAPPKVELKDQTKPTPLILDEQGRTVDATGKEIELTHRMPTLKANIRAVKREQFKQQLKEKPSEDMESNTFFDPRVSIAPSQRQRRTFKFHDKGKFEKIAQRLRTKAQLEKLQAEISQAARKTGIHTSTRLALIAPKKELKEGDIPEIEWWDSYIIPNGFDLTEENPKREDYFGITNLVEHPAQLNPPVDNDTPVTLGVYLTKKEQKKLRRQTRREAQKELQEKVRLGLMPPPEPKVRISNLMRVLGTEAVQDPTKVEAHVRAQMAKRQKAHEEANAARKLTAEQRKVKKIKKLKEDISQGVHISVYRVRNLSNPAKKFKIEANAGQLYLTGVVVLHKDVNVVVVEGGPKAQKKFKRLMLHRIKWDEQTSNTKGDDDEESDEEAVKKTNKCVLVWEGTAKDRSFGEMKFKQCPTENMAREHFKKHGAEHYWDLALSESVLESTD

SEQ ID NO: 844673 - protein, 538 aa, Homo sapiens
MEAATRQIEERKKQLSFISPPTPQPKTPSSSQPERLPIGNTIQPSQAATFMNDAIEKARKAAELQARIQAQLALKPGLIGNANMVGLANLHAMGIAPPKVELKDQTKPTPLILDEQGRTVDATGKEIELTHRMPTLKANIRAVKREQFKQQLKEKPSEDMESNTFFDPRVSIAPSQRQRRTFKFHDKGKFEKIAQRLRTKAQLEKLQAEISQAARKTGIHTSTRLALIAPKKELKEGDIPEIEWWDSYIIPNGFDLTEENPKREDYFGITNLVEHPAQLNPPVDNDTPVTLGVYLTKKEQKKLRRQTRREAQKELQEKVRLGLMPPPEPKVRISNLMRVLGTEAVQDPTKVEAHVRAQMAKRQKAHEEANAARKLTAEQRKVKKIKKLKEDISQGVHISVYRVRNLSNPAKKFKIEANAGQLYLTGVVVLHKDVNVVVVEGGPKAQKKFKRLMLHRIKWDEQTSNTKGDDDEESDEEAVKKTNKCVLVWEGTAKDRSFGEMKFKQCPTENMAREHFKKHGAEHYWDLALSESVLESTD

SEQ ID NO: 844674 - protein, 604 aa, Homo sapiens [sequence omitted]

SEQ ID NO: 844675 - protein, 447 aa, Homo sapiens
SCFCLWLCSPASLCFLLLPLILDEQGRTVDATGKEIELTHRMPTLKANIRAVKREQFKQQLKEKPSEDMESNTFFDPRVSIAPSQRQRRTFKFHDKGKFEKIAQRLRTKAQLEKLQAEISQAARKTGIHTSTRLALIAPKKELKEGDIPEIEWWDSYIIPNGFDLTEENPKREDYFGITNLVEHPAQLNPPVDNDTPVTLGVYLTKKEQKKLRRQTRREAQKELQEKVRLGLMPPPEPKVRISNLMRVLGTEAVQDPTKVEAHVRAQMAKRQKAHEEANAARKLTAEQRKVKKIKKLKEDISQGVHISVYRVRNLSNPAKKFKIEANAGQLYLTGVVVLHKDVNVVVVEGGPKAQKKFKRLMLHRIKWDEQTSNTKGDDDEESDEEAVKKTNKCVLVWEGTAKDRSFGEMKFKQCPTENMAREHFKKHGAEHYWDLALSESVLESTD

SEQ ID NO: 844676 - protein, 440 aa, Homo sapiens
MALSKRELDELKPWIEKTVKRVLGFSEPTVVTARMPTLKANIRAVKREQFKQQLKEKPSEDMESNTFFDPRVSIAPSQRQRRTFKFHDKGKFEKIAQRLRTKAQLEKLQAEISQAARKTGIHTSTRLALIAPKKELKEGDIPEIEWWDSYIIPNGFDLTEENPKREDYFGITNLVEHPAQLNPPVDNDTPVTLGVYLTKKEQKKLRRQTRREAQKELQEKVRLGLMPPPEPKVRISNLMRVLGTEAVQDPTKVEAHVRAQMAKRQKAHEEANAARKLTAEQRKVKKIKKLKEDISQGVHISVYRVRNLSNPAKKFKIEANAGQLYLTGVVVLHKDVNVVVVEGGPKAQKKFKRLMLHRIKWDEQTSNTKGDDDEESDEEAVKKTNKCVLVWEGTAKDRSFGEMKFKQCPTENMAREHFKKHGAEHYWDLALSESVLESTD

SEQ ID NO: 844677 - protein, 683 aa, Homo sapiens; identical to SEQ ID NO: 844666

SEQ ID NO: 844678 - protein, 492 aa, Homo sapiens
MALSKRELDELKPWIEKTVKRVLGFSEPTVVTAALNCVGKGMDKKKAADHLKPFLDDSTLRFVDKLFEAVEEGRSSRHSKSSSDRSRKRELKEVFGDDSEISKESSGVKKRRIPRFEEVEEEPEVIPGPPSESPGMLTKLQIKQMMEAATRQIEERKKQLSFISPPTPQPKTPSSSQPERLPIGNTIQPSQAATFMNDAIEKARKAAELQARIQAQLALKPGLIGNANMVGLANLHAMGIAPPKVELKDQTKPTPLILDEQGRTVDATGKEIELTHRMPTLKANIRAVKREQFKQQLKEKPSEDMESNTFFDPRVSIAPSQRQRRTFKFHDKGKFEKIAQRLRTKAQLEKLQAEISQAARKTGIHTSTRLALIAPKKELKEGDIPEIEWWDSYIIPNGFDLTEENPKREDYFGITNLVEHPAQLNPPVDNDTPVTLGVYLTKKEQKKLRRQTRREAQKELQEKVRLGLMPPPEPKVRISKFDADSFEGILLE

SEQ ID NO: 844679 - protein, 702 aa, Homo sapiens
MALSKRELDELKPWIEKTVKRVLGFSEPTVVTAALNCVGKGMDKKKAADHLKPFLDDSTLRFVDKLFEAVEEGRSSRHSKSSSDRSRKRELKEVFGDDSEISKESSGVKKRRIPRFEEVEEEPEVIPGPPSESPGMLTKLQIKQMMEAATRQIEERKKQLSFISPPTPQPKTPSSSQPERLPIGNTIQPSQAATFMNDAIEKARKAAELQARIQAQLALKPGLIGNANMVGLANLHAMGIAPPKVELKDQTKPTPLILDEQGRTVDATGKEIELTHRMPTLKANIRAVKREQFKQQLKEKPSEDMESNTFFDPRVSIAPSQRQRRTFKFHDKGKFEKIAQRLRTKAQLEKLQAEISQAARKTGIHTSTRLALIAPKKELKEGDIPEIEWWDSYIIPNGFDLTEENPKREDYFGITNLVEHPAQLNPPVDNDTPVTLGVYLTKKEQKKLRRQTRREAQKELQEKVRLGLMPPPEPKVRISNLMRVLGTEAVQDPTKVEAHVRAQMAKRQNPASDLQCLSHLWMSFLHDRAHEEANAARKLTAEQRKVKKIKKLKEDISQGVHISVYRVRNLSNPAKKFKIEANAGQLYLTGVVVLHKDVNVVVVEGGPKAQKKFKRLMLHRIKWDEQTSNTKGDDDEESDEEAVKKTNKCVLVWEGTAKDRSFGEMKFKQCPTENMAREHFKKHGAEHYWDLALSESVLESTD

SEQ ID NO: 844680 - protein, 683 aa, Homo sapiens; identical to SEQ ID NO: 844666

SEQ ID NO: 844681 - protein, 260 aa, Homo sapiens
MALSKRELDELKPWIEKTVKRVLGFSEPTVVTAALNCVGKGMDKKKAADHLKPFLDDSTLRFVDKLFEAVEEGRSSRHSKSSSDRSRKRELKEVFGDDSEISKESSGVKKRRIPRFEEVEEEPEVIPGPPSESPGMLTKLQIKQMMEAATRQIEERKKQLSFISPPTPQPKTPSSSQPERLPIGNTIQPSQAATFMNDAIEKARKAAELQARIQAQLALKPGLIGNANMVGLANLHAMGIAPPKVELKDQTKPTPREHGS

SEQ ID NO: 844682 - protein, 202 aa, Homo sapiens
MCRTLAAFPTTCLERAKEFKTRLGIFLHKSELGCDTGSTGKFEWGSKHSKENRNFSEDVLGWRESFDLLLSSKNGVAAFHAFLKTEFSEENLEFWLACEEFKKIRSATKLASRAHQIFEEFICSEAPKEVNIDHETRELTRMNLQTATATCFDAAQGKTRTLMEKDSYPRFLKSPAYRDLAAQASAASATLSSCSLDEPSHT

SEQ ID NO: 844683 - protein, 202 aa, Homo sapiens; identical to SEQ ID NO: 844682

SEQ ID NO: 844684 - protein, 160 aa, Homo sapiens
MCRTLAAFPTTCLERAKEFKTRLGIFLHKSELGCDTGSTGKFEWGSKHSKENRNFSEDVLGWRESFDLLLSSKNGVAAFHAFLKTEFSEENLEFWLACEEFKKIRSATKLASRAHQIFEEFICSEAPKEVNIDHETRELTRMNLQTATLSSCSLDEPSHT

SEQ ID NO: 844685 - protein, 143 aa, Homo sapiens [sequence omitted]

SEQ ID NO: 844686 - protein, 143 aa, Homo sapiens [sequence omitted]

SEQ ID NO: 844687 - protein, 202 aa, Homo sapiens; identical to SEQ ID NO: 844682

SEQ ID NO: 844688 - protein, 238 aa, Homo sapiens
QFCCKEVFCTQAHFCTQAHFCTQAHFCTQAHFCTQAHFCTQAHFSTTCLERAKEFKTRLGIFLHKSELGCDTGSTGKFEWGSKHSKENRNFSEDVLGWRESFDLLLSSKNGVAAFHAFLKTEFSEENLEFWLACEEFKKIRSATKLASRAHQIFEEFICSEAPKEVNIDHETRELTRMNLQTATATCFDAAQGKTRTLMEKDSYPRFLKSPAYRDLAAQASAASATLSSCSLDEPSHT

SEQ ID NO: 844689 - protein, 143 aa, Homo sapiens [sequence omitted]

SEQ ID NO: 844690 - protein, 180 aa, Homo sapiens
MCRTLAAFPTTCLERAKEFKTRLGIFLHKSELGCDTGSTGKFEWGSKHSKENRNFSEDVLGWRESFDLLLSSKNGVAAFHAFLKTEFSEENLEFWLACEEFKKIRSATKLASRAHQIFEEFICSEAPKEVNIDHETRELTRMNLQTATATCFDAAQGKTRTLMEKDSYPRSQVPVSRRRR

SEQ ID NO: 844691 - protein, 56 aa, Homo sapiens
MALKPKVRHVQDATVTKFTPSRMHLTLEADEANDANVYPGSLRSAPNISPSASAGF

SEQ ID NO: 844692 - protein, 30 aa, Homo sapiens
MPTGYLPGGPGPVLTTALNGHHREWSPSSQ

SEQ ID NO: 844693 - protein, 418 aa, Homo sapiens
  misc_feature (7)..(7): Xaa can be any naturally occurring amino acid
QWYQRRXGHYGRGGQCHLQDTDSPPSAQPSQVSYTATMPFGNTHNKFKLNYKPEEEYPDLSKHNNHMAKVLTLELYKKLRDKETPSGFTVDDVIQTGVDNPGHPFIMTVGCVAGDEESYEVFKELFDPIISDRHGGYKPTDKHKTDLNHENLKGGDDLDPNYVLSSRVRTGRSIKGYTLPPHCSRGERRAVEKLSVEALNSLTGEFKGKYYPLKSMTEKEQQQLIDDHFLFDKPVSPLLLASGMARDWPDARGIWHNDNKSFLVWVNEEDHLRVISMEKGGNMKEVFRRFCVGLQKIEEIFKKAGHPFMWNQHLGYVLTCPSNLGTGLRGGVHVKLAHLSKHPKFEEILTRLRLQKRGTGGVDTAAVGSVFDVSNADRLGSSEVEQVQLVVDGVKLMVEMEKKLEKGQSIDDMIPAQK

SEQ ID NO: 844694 - protein, 312 aa, Homo sapiens [sequence omitted]

SEQ ID NO: 844695 - protein, 304 aa, Homo sapiens
MFNGREIFKELFDPIISDRHGGYKPTDKHKTDLNHENLKGGDDLDPNYVLSSRVRTGRSIKGYTLPPHCSRGERRAVEKLSVEALNSLTGEFKGKYYPLKSMTEKEQQQLIDDHFLFDKPVSPLLLASGMARDWPDARGIWHNDNKSFLVWVNEEDHLRVISMEKGGNMKEVFRRFCVGLQKIEEIFKKAGHPFMWNQHLGYVLTCPSNLGTGLRGGVHVKLAHLSKHPKFEEILTRLRLQKRGTGGVDTAAVGSVFDVSNADRLGSSEVEQVQLVVDGVKLMVEMEKKLEKGQSIDDMIPAQK

SEQ ID NO: 844696 - protein, 272 aa, Homo sapiens
FFEENLKGGDDLDPNYVLSSRVRTGRSIKGYTLPPHCSRGERRAVEKLSVEALNSLTGEFKGKYYPLKSMTEKEQQQLIDDHFLFDKPVSPLLLASGMARDWPDARGIWHNDNKSFLVWVNEEDHLRVISMEKGGNMKEVFRRFCVGLQKIEEIFKKAGHPFMWNQHLGYVLTCPSNLGTGLRGGVHVKLAHLSKHPKFEEILTRLRLQKRGTGGVDTAAVGSVFDVSNADRLGSSEVEQVQLVVDGVKLMVEMEKKLEKGQSIDDMIPAQK

SEQ ID NO: 844697 - protein, 277 aa, Homo sapiens
RVQVVSTLEVFMVEVSLVLVSGFVSRVRTGRSIKGYTLPPHCSRGERRAVEKLSVEALNSLTGEFKGKYYPLKSMTEKEQQQLIDDHFLFDKPVSPLLLASGMARDWPDARGIWHNDNKSFLVWVNEEDHLRVISMEKGGNMKEVFRRFCVGLQKIEEIFKKAGHPFMWNQHLGYVLTCPSNLGTGLRGGVHVKLAHLSKHPKFEEILTRLRLQKRGTGGVDTAAVGSVFDVSNADRLGSSEVEQVQLVVDGVKLMVEMEKKLEKGQSIDDMIPAQK

SEQ ID NO: 844698 - protein, 418 aa, Homo sapiens; identical to SEQ ID NO: 844693
  misc_feature (7)..(7): Xaa can be any naturally occurring amino acid

SEQ ID NO: 844699 - protein, 246 aa, Homo sapiens
  misc_feature (7)..(7): Xaa can be any naturally occurring amino acid
QWYQRRXGHYGRGGQCHLQDTDSPPSAQPSQVSYTATMPFGNTHNKFKLNYKPEEEYPDLSKHNNHMAKVLTLELYKKLRDKETPSGFTVDDVIQTGVDNPGHPFIMTVGCVAGDEESYEVFKELFDPIISDRHGGYKPTDKHKTDLNHENLKGGDDLDPNYVLSSRVRTGRSIKGYTLPPHCSRGERRAVEKLSVEALNSAKTEIREKLAQMSDTRMSILCWIRTLWWCRHCFADYDPGVQENDH

SEQ ID NO: 844700 - protein, 185 aa, Homo sapiens
  misc_feature (7)..(7): Xaa can be any naturally occurring amino acid
QWYQRRXGHYGRGGQCHLQDTDSPPSAQPSQVSYTATMPFGNTHNKFKLNYKPEEEYPDLSKHNNHMAKVLTLELYKKLRDKETPSGFTVDDVIQTGVDNPGHPFIMTVGCVAGDEESYEVFKELFDPIISDRHGGYKPTDKHKTDLNHENLKQWAPSSGFWPMKYLPGRVLFFSQSSTPTRSSS

SEQ ID NO: 844701 - protein, 292 aa, Homo sapiens
LEWSKNETVIEKPTDKHKTDLNHENLKGGDDLDPNYVLSSRVRTGRSIKGYTLPPHCSRGERRAVEKLSVEALNSLTGEFKGKYYPLKSMTEKEQQQLIDDHFLFDKPVSPLLLASGMARDWPDARGIWHNDNKSFLVWVNEEDHLRVISMEKGGNMKEVFRRFCVGLQKIEEIFKKAGHPFMWNQHLGYVLTCPSNLGTGLRGGVHVKLAHLSKHPKFEEILTRLRLQKRGTGGVDTAAVGSVFDVSNADRLGSSEVEQVQLVVDGVKLMVEMEKKLEKGQSIDDMIPAQK

SEQ ID NO: 844702 - protein, 132 aa, Homo sapiens
LGAFCVGLQKIEEIFKKAGHPFMWNQHLGYVLTCPSNLGTGLRGGVHVKLAHLSKHPKFEEILTRLRLQKRGTGGVDTAAVGSVFDVSNADRLGSSEVEQVQLVVDGVKLMVEMEKKLEKGQSIDDMIPAQK

SEQ ID NO: 844703 - protein, 286 aa, Homo sapiens
  misc_feature (7)..(7): Xaa can be any naturally occurring amino acid
QWYQRRXGHYGRGGQCHLQDTDSPPSAQPSQVSYTATMPFGNTHNKFKLNYKPEEEYPDLSKHNNHMAKVLTLELYKKLRDKETPSGFTVDDVIQTGVDNPGHPFIMTVGCVAGDEESYEVFKELFDPIISDRHGGYKPTDKHKTDLNHENLKGGDDLDPNYVLSSRVRTGRSIKGYTLPPHCSRGERRAVEKLSVEALNSLTGEFKGKYYPLKSMTEKEQQQLIDDHFLFDKPVSPLLLASGMAGWPSRGLAMTPELRGVTRGPPGTPREGHTKRQRRREMGKRT

SEQ ID NO: 844704 - protein, 68 aa, Homo sapiens
SSIFPSCPAHQVSYTATMPFGNTHNKFKLNYKPEEEYPDLSKHNNHMAKVLTLELYKKLRDKETPSGF

SEQ ID NO: 844705 - protein, 151 aa, Homo sapiens
ICSSLTRVGSKSVCVYLCLYVSVCICVCRRLVEMSTWTFPRVTKTWDRLMLQDNCCGVNGPSDWQKYTSAFRTENNDADYPWPRQCCVMNNLKEPLNLEACKLGVPGFYHNQGCYELISGPMNRHAWGVAWFGFAILCWTFWVLLGTMVLL

SEQ ID NO: 844706 - protein, 282 aa, Homo sapiens
ERALPCAQKEEALAFSLWEIPKMAKDNSTVRCFQGLLIFGNVIIGCCGIALTAECIFFVSDQHSLYPLLEATDNDDIYGAAWIGIFVGICLFCLSVLGIVGIMKSSRKILLAYFILMFIVYAFEVASCITAATQRDFFTPNLFLKQMLERYQNNSPPNNDDQWKNNGVTKTWDRLMLQDNCCGVNGPSDWQKYTSAFRTENNDADYPWPRQCCVMNNLKEPLNLEACKLGVPGFYHNQGCYELISGPMNRHAWGVAWFGFAILCWTFWVLLGTMFYWSRIEY

SEQ ID NO: 844707 - protein, 260 aa, Homo sapiens
MAKDNSTVRCFQGLLIFGNVIIGCCGIALTAECIFFVSDQHSLYPLLEATDNDDIYGAAWIGIFVGICLFCLSVLGIVGIMKSSRKILLAYFILMFIVYAFEVASCITAATQRDFFTPNLFLKQMLERYQNNSPPNNDDQWKNNGVTKTWDRLMLQDNCCGVNGPSDWQKYTSAFRTENNDADYPWPRQCCVMNNLKEPLNLEACKLGVPGFYHNQGCYELISGPMNRHAWGVAWFGFAILCWTFWVLLGTMFYWSRIEY

SEQ ID NO: 844708 - protein, 432 aa, Homo sapiens
MAHLMMFRDVAVDFSQEEWECLDLEQRDLYRDVMLENYSNMVSLGFCIYQPEAFSLLEKGKEPWKILRDETRGPCPDMQSRCQTKKLLPKNGIFEREIAQLEIMRICKNHSLDCLCFRGDWEGNTQFQTLQDNQEECFKQVIRTCEKRPTFNQHTVFNLHQRLNTGDKLNEFKELGKAFISGSDHTQHQLIHTSEKFCGDKECGNTFLPDSEVIQYQTVHTVKKTYECKECGKSFSLRSSLTGHKRIHTGEKPFKCKDCGKAFRFHSQLSVHKRIHTGEKSYECKECGKAFSCGSDLTRHQRIHTGEKPYECNECRKAFSQRSHLIKHQRIHTGEKPYECKECGKAFTRGSHLTQHQRIHTGEKSHECKECGKAFIRGSNLAQHQNVHVGRKPYKCEKCGKAYIWSSHLARHQRIHTGRKPYECKQCGKTFT

SEQ ID NO: 844709 - protein, 110 aa, Homo sapiens
MFLPSYFSDMQSRCQTKKLLPKNGIFEREIAQLEIMRICKNHSLDCLCFRGDWEGNTQFQTLQDNQEECFKQVIRTCEKRPTFNQHTVFNLHQRLNTGDKLNEFKELGKA

SEQ ID NO: 844710 - protein, 355 aa, Homo sapiens
MQSRCQTKKLLPKNGIFEREIAQLEIMRICKNHSLDCLCFRGDWEGNTQFQTLQDNQEECFKQVIRTCEKRPTFNQHTVFNLHQRLNTGDKLNEFKELGKAFISGSDHTQHQLIHTSEKFCGDKECGNTFLPDSEVIQYQTVHTVKKTYECKECGKSFSLRSSLTGHKRIHTGEKPFKCKDCGKAFRFHSQLSVHKRIHTGEKSYECKECGKAFSCGSDLTRHQRIHTGEKPYECNECRKAFSQRSHLIKHQRIHTGEKPYECKECGKAFTRGSHLTQHQRIHTGEKSHECKECGKAFIRGSNLAQHQNVHVGRKPYKCEKCGKAYIWSSHLARHQRIHTGRKPYECKQCGKTFT

SEQ ID NO: 844711 - protein, 255 aa, Homo sapiens
EVLDEVLLCSEPQFPHLNQGDAWQELVRADLEDLGCPAHSLPGVMIALACSARPLPVLSAILTVLLDWHCYACLQMSKLRLEGGGPGSWKWANSNPALSSVPCPVPSMGCPACHLTSSVWHVSGTGPGTPRWGRNGSALPGCSVMGRQLRAPSWVRRSPGENCQHLLARDVGLPLCQALVEAEDGNPDRVLELLLPIRYRIVQLGGSNAQVSRWPPAGVPRAWARESGRPAAPKFLPWCWCQQCGCERVSHTPAV

SEQ ID NO: 844712 - protein, 102 aa, Homo sapiens
MKAEIKDGLEFMQHSETLWKDSDMLACHNYWHWALYLIEKGEYEAALTIYDTHVSCIHTVFGLLQHFAFESQRDQIFEFIRIVPARKTAGARTHFLCKASWG

SEQ ID NO: 844713 - protein, 495 aa, Homo sapiens
PFRDRPAHSQEGPGAQSSRWTPTRRNMAAASPLRDCQAWKDARLPLSTTSNEACKLFDATLTQYVKWTNDKSLGGIEGCLSKLKAADPTFVMGHAMATGLVLIGTGSSVKLDKELDLAVKTMVEISRTQPLTRREQLHVSAVETFANGNFPKACELWEQILQDHPTDMLALKFSHDAYFYLGYQEQMRDSVARIYPFWTPDIPLSSYVKGIYSFGLMETNFYDQAEKLAKEALSINPTDAWSVHTVAHIHEMKAEIKDGLEFMQHSETLWKDSDMLACHNYWHWALYLIEKGEYEAALTIYDTHILPSLQANDAMLDVVDSCSMLYRLQMEGVSVGQRWQDVLPVARKHSRDHILLFNDAHFLMASLGAHDPQTTQELLTTLRDASESPGENCQHLLARDVGLPLCQALVEAEDGNPDRVLELLLPIRYRIVQLGGSNAQRDVFNQLLIHAALNCTSSVHKNVARSLLMERDALKPNSPLTERLIRKAATVHLMQ

SEQ ID NO: 844714 - protein, 400 aa, Homo sapiens [sequence omitted]

SEQ ID NO: 844715 - protein, 437 aa, Homo sapiens
PFRDRPAHSQEGPGAQSSRWTPTRRNMAAASPLRDCQAWKDARLPLSTTSNEACKLFDATLTQYVKWTNDKSLGGIEGCLSKLKAADPTFVMGHAMATGLVLIGTGSSVKLDKELDLAVKTMVEISRTQPLTRREQLHVSAVETFANGYVKGIYSFGLMETNFYDQAEKLAKEALSINPTDAWSVHTVAHIHEMKAEIKDGLEFMQHSETLWKDSDMLACHNYWHWALYLIEKGEYEAALTIYDTHILPSLQANDAMLDVVDSCSMLYRLQMEGVSVGQRWQDVLPVARKHSRDHILLFNDAHFLMASLGAHDPQTTQELLTTLRDASESPGENCQHLLARDVGLPLCQALVEAEDGNPDRVLELLLPIRYRIVQLGGSNAQRDVFNQLLIHAALNCTSSVHKNVARSLLMERDALKPNSPLTERLIRKAATVHLMQ

SEQ ID NO: 844716 - protein, 244 aa, Homo sapiens
MKAEIKDGLEFMQHSETLWKDSDMLACHNYWHWALYLIEKGEYEAALTIYDTHILPSLQANDAMLDVVDSCSMLYRLQMEGVSVGQRWQDVLPVARKHSRDHILLFNDAHFLMASLGAHDPQTTQELLTTLRDASESPGENCQHLLARDVGLPLCQALVEAEDGNPDRVLELLLPIRYRIVQLGGSNAQRDVFNQLLIHAALNCTSSVHKNVARSLLMERDALKPNSPLTERLIRKAATVHLMQ

SEQ ID NO: 844717 - protein, 495 aa, Homo sapiens; identical to SEQ ID NO: 844713

SEQ ID NO: 844718 - protein, 353 aa, Homo sapiens
PFRDRPAHSQEGPGAQSSRWTPTRRNMAAASPLRDCQAWKDARLPLSTTSNEACKLFDATLTQYVKWTNDKSLGGIEGCLSKLKAADPTFVMGHAMATGLVLIGTGSSVKLDKELDLAVKTMVEISRTQPLTRREQLHVSAVETFANGNFPKACELWEQILQDHPTDMLALKFSHDAYFYLGYQEQMRDSVARIYPFWTPDIPLSSYVKGIYSFGLMETNFYDQAEKLAKEALSINPTDAWSVHTVAHIHEMKAEIKDGLEFMQHSETLWKDSDMLACHNYWHWALYLIEKGEYEAALTIYDTHVSCIHTVFGLLQHFAFESQRDQIFEFIRIVPARKTAGARTHFLCKASWG

SEQ ID NO: 844719 - protein, 495 aa, Homo sapiens; identical to SEQ ID NO: 844713

SEQ ID NO: 844720 - protein, 479 aa, Homo sapiens
PFRDRPAHSQEGPGAQSSRWTPTRRNMAAASPLRDCQAWKDARLPLSTTSNEACKLFDATLTQYVKWTNDKSLGGIEGCLSKLKAADPTFVMGHAMATGLVLIGTGSSVKLDKELDLAVKTMVEISRTQPLTRREQLHVSAVETFANGNFPKACELWEQILQDHPTDMLALKFSHDAYFYLGYQEQMRDSVARIYPFWTPDIPLSSYVKGIYSFGLMETNFYDQAEKLAKEALSINPTDAWSVHTVAHIHEMKAEIKDGLEFMQHSETLWKDSDMLACHNYWHWALYLIEKGEYEAALTIYDTHILPSLQANDAMLDVVDSCSMLYRLQMEGVSVGQRWQDVLPVARKHSRDHILLFNDAHFLMASLGAHDPQTTQELLTTLRDASESPGENCQHLLARDVGLPLCQALVEAEDGNPDRVLELLLPIRYRIVQLGGSNAQRDVFNQLLIHAALNCTSSVHKNVARGKVSLGHPGWNAVV

SEQ ID NO: 844721 - protein, 495 aa, Homo sapiens; identical to SEQ ID NO: 844713

SEQ ID NO: 844722 - protein, 400 aa, Homo sapiens [sequence omitted]

SEQ ID NO: 844723 - protein, 255 aa, Homo sapiens
MPPRHRPSTSERRWRPETMCSGVFGLAVLSSRASITLCLLQGLIRRTLFFQGEYEAALTIYDTHILPSLQANDAMLDVVDSCSMLYRLQMEGVSVGQRWQDVLPVARKHSRDHILLFNDAHFLMASLGAHDPQTTQELLTTLRDASESPGENCQHLLARDVGLPLCQALVEAEDGNPDRVLELLLPIRYRIVQLGGSNAQRDVFNQLLIHAALNCTSSVHKNVARSLLMERDALKPNSPLTERLIRKAATVHLMQ

SEQ ID NO: 844724 - protein, 465 aa, Homo sapiens
PFRDRPAHSQEGPGAQSSRWTPTRRNMAAASPLRDCQAWKDARLPLSTTSNEACKLFDATLTQYVKWTNDKSLGGIEGCLSKLKAADPTFVMGHAMATGLVLIGTGSSVKLDKELDLAVKTMVEISRTQPLTRREQLHVSAVETFANGNFPKACELWEQILQDHPTDMLALKFSHDAYFYLGYQEQMRDSVARIYPFWTPDIPLSSYVKGIYSFGLMETNFYDQAEKLAKEALSINPTDAWSVHTVAHIHEMKAEIKDGLEFMQHSETLWKDSDMLACHNYWHWALYLIEKGEYEAALTIYDTHILPSLQANDAMLDVVDSCSMLYRLQMEGVSVGQRWQDVLPVARKHSRDHILLFNDAHFLMASLGAHDPQTTQELLTTLRDASESPGENCQHLLARDVGLPLCQALVEAEDGNPDRVLELLLPIRYRIVQLGGSNAQRDVFNQLLIHAALNCTSSVHKNVAR

SEQ ID NO: 844725 - protein, 284 aa, Homo sapiens
PFRDRPAHSQEGPGAQSSRWTPTRRNMAAASPLRDCQAWKDARLPLSTTSNEACKLFDATLTQYVKWTNDKSLGGIEGCLSKLKAADPTFVMGHAMATGLVLIGTGSSVKLDKELDLAVKTMVEISRTQPLTRREQLHVSAVETFANGNFPKACELWEQILQDHPTDMLALKFSHDAYFYLGYQEQMRDSVARIYPFWTPDIPLSSYVKGIYSFGLMETNFYDQAEKLAKEALSINPTDAWSVHTVAHIHEMKAEIKDGLEFMQHSETLWKGLVRRSEQPLQST

SEQ ID NO: 844726 - protein, 128 aa, Homo sapiens
MATAQLSHCITIHKASKETVFPSQITNEHESLKMVKKLFATSISCITYLRGLFPESSYGERHLDDLSLKILREDKKCPGSLHIIRWIQGCFDALEKRYVRMFLHLHWNQRLVFYSLKKEIRHLFCFCV

SEQ ID NO: 844727 - protein, 307 aa, Homo sapiens
MATAQLSHCITIHKASKETVFPSQITNEHESLKMVKKLFATSISCITYLRGLFPESSYGERHLDDLSLKILREDKKCPGSLHIIRWIQGCFDALEKRYLRMAVLTLYTDPMGSEKVTEMYQFKFKYTKEGATMDFDSHSSSTSFESGTNNEDIKKASVLLIRKLYILMQDLEPLPNNVVLTMKLHYYNAVTPHDYQPLGFKEGVNSHFLLFDKEPINVQVGFVSTGFHSMKVKVMTEATKVIDLENNLFRENSTTEIAHQGLDCDEEEECNDHIQRMNFVCSQQSSECSRKKRKVSEPVKVFIPNRK

SEQ ID NO: 844728 - protein, 219 aa, Homo sapiens
MSRVTAYYQMVSNRNSILYTDPMGSEKVTEMYQFKFKYTKEGATMDFDSHSSSTSFESGTNNEDIKKASVLLIRKLYILMQDLEPLPNNVVLTMKLHYYNAVTPHDYQPLGFKEGVNSHFLLFDKEPINVQVGFVSTGFHSMKVKVMTEATKVIDLENNLFRENSTTEIAHQGLDCDEEEECNDHIQRMNFVCSQQSSECSRKKRKVSEPVKVFIPNRK

SEQ ID NO: 844729 - protein, 92 aa, Homo sapiens
LGVHVKKVSCIGKLGPWRFVIQIISSPRWESSATLRFTDAPCQDVSDAAVSEPRGLLSVSESQHNAGGHGVFGGRYLLNGKRQPAQCLCHWF

SEQ ID NO: 844730 - protein, 1408 aa, Homo sapiens
MPVFKEVKVHLLEDAGIEKDAVTQETRISPSGIDSATTVAAATAAAIATAAPLIKVQSDLEAKVNSVTELLSKLQETDKHLQRVTEQQTSIQRKQEKLHCHDHEKQMNVFMEQHIRHLEKLQQQQIDIQTHFISAALKTSSFQPVSMPSSRAVEKYSVKPEHPNLGSCNPSLYNTFASKQAPLKEVEDTSFDKQKSPLETPAPRRFAPVPVSRDDELSKRENLLEEKENMEVSCHRGNVRLLEQILNNNDSLTRKSESSNTTSLTRSKIGWTPEKTNRFPSCEELETTKVTMQKSDDVLHDLGQKEKETNSMVQPKESLSMLKLPDLPQNSVKLQTTNTTRSVLKDAEKILRGVQNNKKVLEENLEAIIRAKDGAAMYSLINALSTNREMSEKIRIRKTVDEWIKTISAEIQDELSRTDYEQKRFDQKNQRTKKGQNMTKDIRTNTQDKTVNKSVIPRKHSQKQIEEHFRNLPMRGMPASSLQKERKEGLLKATTVIQDEDYMLQVYGKPVYQGHRSTLKKGPYLRFNSPSPKSRPQRPKVIERVKGTKVKSIRTQTDFYATKPKKMDSKMKHSVPVLPHGDQQYLFSPSREMPTFSGTLEGHLIPMAILLGQTQSNSDTMPPAGVIVSKPHPVTVTTSIPPSSRKVETGVKKPNIAIVEMKSEKKDPPQLTVQVLPSVDIDSISNSSADVLSPLSSPKEASPPPVQTWIKTPEIMKVDEEEVKFPGTNFDEIIDVIQEEEKCDEIPDSEPILEFNRSVKADSTKYNGPPFPPVASTFQPTADILDKVIERKETLENSLIQWVEQEIMSRIISGLFPVQQQIAPSISVSVSETSEPLTSDIVEGTSSGALQLFVDAGVPVNSNVIKHFVNEALAETIAVMLGDREAKKQGPVATGVSGDASTNETYLPARVCTPLATPQPTPPCSPSSPAKECVLVKTPDSSPCDSDHDMAFPVKEICAEKGDDMPAIMLVNTPTVTPTTTPPPAAAVFTPTLSDISIDKLKVSSPELPKPWGDGDLPLEEENPNSPQEELHPRAIVMSVAKDEEPESMDFPAQPPPPEPVPFMPFPAGTKAPSPSQMPGSDSSTLESTLSVTVTETETLDKPISEGEILFSCGQKLAPKILEDIGLYLTNLNDSLSSTLHDAVEMEDDPPSEGQVIRMSHKKFHADAILSFAKQNQESAVSQQAVYHSEDLENSVGELSEGQRPQLTAAAENILMGHSLYMQPPVTNTQSLDQQCDPKPLSRQFDTVSGSIYEDSCASHGPMSLGELELEPNSKLVLPTTLLTAQENDVNLPVAAEDFSQYQLKQNQDVKQVEHKPSQSYLRVRNKSDIAPSQQQVSPGDMDRTQIELNPYLTCVFSGGKAVPLSASQMPPAKMSVMLPSVNLEDCSQSLSLSTMQEDMESSGADTF

SEQ ID NO: 844731 - protein, 1386 aa, Homo sapiens
MPVFKEVKVHLLEDAGIEKDAVTQETRISPSGIDSATTVAAATAAAIATAAPLIKVQSDLEAKVNSVTELLSKLQETDKHLQRVTEQQTSIQRKQEKLHCHDHEKQMNVFMEQHIRHLEKLQQQQIDIQTHFISAALKTSSFQPVSMPSSRAVEKYSVKPEHPNLGSCNPSLYNTFASKQAPLKEVEDTSFDKQKSPLETPAPRRFAPVPVSRDDELSKRENLLEEKENMEVSCHRGNVRLLEQILNNNDSLTRKSESSNTTSLTRSKIGWTPEKTNRFPSCEELETTKVTMQKSDDVLHDLGQKEKETNSMVQPKESLSMLKLPDLPQNSVKLQTTNTTRSVLKDAEKILRGVQNNKKVLEENLEAIIRAKDGAAMYSLINALSTNREMSEKIRIRKTVDEWIKTISAEIQDELSRTDYEQKRFDQKNQRTKKGQNMTKDIRTNTQDKTVNKSVIPRKHSQKQIEEHFRNLPMRGMPASSLQKERKEGLLKATTVIQDEDYMLQVYGKPVYQGHRSTLKKGPYLRFNSPSPKSRPQRPKVIERVKGTKVKSIRTQTDFYATKPKKMDSKMKHSVPVLPHGDQQYLFSPSREMPTFSGTLEGHLIPMAILLGQTQSNSDTMPPAGVIVSKPHPVTVTTSIPPSSRKVETGVKKPNIAIVEMKSEKKDPPQLTVQVLPSVDIDSISNSSADVLSPLSSPKEASPPPVQTWIKTPEIMKVDEEEVKFPGTNFDEIIDVIQEEEKCDEIPDSEPILEFNRSVKADSTKYNGPPFPPVASTFQPTADILDKVIERKETLENSLIQWVEQEIMSRIISGLFPVQQQIAPSISVSVSETSEPLTSDIVEGTSSGALQLFVDAGVPVNSNVIKHFVNEALAETIAVMLGDREAKKQGPVATGVSGDASTNETYLPARVCTPLATPQPTPPCSPSSPAKECVLVKTPDSSPCDSDHDMAFPVKEICAEKGDDMPAIMLVNTPTVTPTTTPPPAAAVFTPTLSDISIDKLKVSSPELPKPWGDGDLPLEEENPNSPQEELHPRAIVMSVAKDEEPESMDFPAQPPPPEPVPFMPFPAGTKAPSPSQMPGSDSSTLESTLSVTVTETETLDKPISEGEILFSCGQKLAPKILEDIGLYLTNLNDSLSSTLHDAVEMEDDPPSEGQVIRMSHKKFHADAILSFAKQNQESAVSQQAVYHSEDLENSVGELSEGQRPQLTAAAENILMGHSLYMQPPVTNTQSLDQQCDPKPLSRQFDTVSGSIYEDSCASHGPMSLGELELEPNSKLVLPTTLLTAQENDVNLPVAAEDFSQYQLKQNQDVKQVEHKPSQSYLRVRNKSDIAPSQQQGGKAVPLSASQMPPAKMSVMLPSVNLEDCSQSLSLSTMQEDMESSGADTF

SEQ ID NO: 844732 - protein, 1364 aa, Homo sapiens
MPVFKEVKVHLLEDAGIEKDAVTQETRISPSGIDSATTVAAATAAAIATAAPLIKVQSDLEAKVNSVTELLSKLQETDKHLQRVTEQQTSIQRKQEKLHCHDHEKQMNVFMEQHIRHLEKLQQQQIDIQTHFISAALKTSSFQPVSMPSSRAVEKYSVKPEHPNLGSCNPSLYNTFASKQAPLKEVEDTSFDKQKSPLETPAPRRFAPVPVSRDDELSKRENLLEEKENMEVSCHRGNVRLLEQILNNNDSLTRKSESSNTTSLTRSKIGWTPEKTNRFPSCEELETTKVTMQKSDDVLHDLGQKEKETNSMVQPKESLSMLKLPDLPQNSVKLQTTNTTRSVLKDAEKILRGVQNNKKVLEENLEAIIRAKDGAAMYSLINALSTNREMSEKIRIRKTVDEWIKTISAEIQDELSRTDYEQKRFDQKNQRTKKGQNMTKDIRTNTQDKTVNKSVIPRKHSQKQIEEHFRNLPMRGMPASSLQKERKEGLLKATTVIQDEDYMLQVYGKPVYQGHRSTLKKGPYLRFNSPSPKSRPQRPKVIERVKGTKVKSIRTQTDFYATKPKKMDSKMKHSVPVLPHGDQQYLFSPSREMPTFSGTLEGHLIPMAILLGQTQSNSDTMPPAGVIVSKPHPVTVTTSIPPSSRKVETGVKKPNIAIVEMKSEKKDPPQLTVQVLPSVDIDSISNSSADVLSPLSSPKEASPPPVQTWIKTPEIMKVDEEEVKFPGTNFDEIIDVIQEEEKCDEIPDSEPILEFNRSVKADSTKYNGPPFPPVASTFQPTADILDKVIERKETLENSLIQWVEQEIMSRIISGLFPVQQQIAPSISVSVSETSEPLTSDIVEGTSSGALQLFVDAGVPVNSNVIKHFVNEALAETIAVMLGDREAKKQGPVATGVSGDASTNETYLPARVCTPLATPQPTPPCSPSSPAKECVLVKTPDSSPCDSDHDMAFPVKEICAEKGDDMPAIMLVNTPTVTPTTTPPPAAAVFTPTLSDISIDKLKVSSPELPKPWGDGDLPLEEENPNSPQEELHPRAIVMSVAKDEEPESMDFPAQPPPPEPVPFMPFPAGTKAPSPSQMPGSDSSTLESTLSVTVTETETLDKPISEGEILFSCGQKLAPKILEDIGLYLTNLNDSLSSTLHDAVEMDLENSVGELSEGQRPQLTAAAENILMGHSLYMQPPVTNTQSLDQQCDPKPLSRQFDTVSGSIYEDSCASHGPMSLGELELEPNSKLVLPTTLLTAQENDVNLPVAAEDFSQYQLKQNQDVKQVEHKPSQSYLRVRNKSDIAPSQQQVSPGDMDRTQIELNPYLTCVFSGGKAVPLSASQMPPAKMSVMLPSVNLEDCSQSLSLSTMQEDMESSGADTF

SEQ ID NO: 844733 - protein, 1337 aa, Homo sapiens
MPVFKEVKVHLLEDAGIEKDAVTQETRISPSGIDSATTVAAATAAAIATAAPLIKVQSDLEAKVNSVTELLSKLQETDKHLQRVTEQQTSIQRKQEKLHCHDHEKQMNVFMEQHIRHLEKLQQQQIDIQTHFISAALKTSSFQPVSMPSSRAVEKYSVKPEHPNLGSCNPSLYNTFASKQAPLKEVEDTSFDKQKSPLETPAPRRFAPVPVSRDDELSKRENLLEEKENMEVSCHRGNVRLLEQILNNNDSLTRKSESSNTTSLTRSKIGWTPEKTNRFPSCEELETTKVTMQKSDDVLHDLGQKEKETNSMVQPKESLSMLKLPDLPQNSVKLQTTNTTRSVLKDAEKILRGVQNNKKVLEENLEAIIRAKDGAAMYSLINALSTNREMSEKIRIRKTVDEWIKTISAEIQDELSRTDYEQKRFDQKNQRTKKGQNMTKDIRTNTQDKTVNKSVIPRKHSQKQIEEHFRNLPMRGMPASSLQKERKEGLLKATTVIQDEDYMLQVYGKPVYQGHRSTLKKGPYLRFNSPSPKSRPQRPKVIERVKGTKVKSIRTQTDFYATKPKKMDSKMKHSVPVLPHGDQQYLFSPSREMPTFSGTLEGHLIPMAILLGQTQSNSDTMPPAGVIVSKPHPVTVTTSIPPSSRKVETGVKKPNIAIVEMKSEKKDPPQLTVQVLPSVDIDSISNSSADVLSPLSSPKEASPPPVQTWIKTPEIMKVDEEEVKFPGTNFDEIIDVIQEEEKCDEIPDSEPILEFNRSVKADSTKYNGPPFPPVASTFQPTADILDKVIERKETLENSLIQWVEQEIMSRIISGLFPVQQQIAPSISVSVSETSEPLTSDIVEGTSSGALQLFVDAGVPVNSNVIKHFVNEALAETIAVMLGDREAKKQGPVATGVSGDASTNETYLPARVCTPLATPQPTPPCSPSSPAKECVLVKTPDSSPCDSDHDMAFPVKEICAEKGDDMPAIMLVNTPTVTPTTTPPPAAAVFTPTLSDISIDKLKVSSPELPKPWGDGDLPLEEENPNSPQEELHPRAIVMSVAKDEEPESMDFPAQPPPPEPVPFMPFPAGTKAPSPSQMPGSDSSTLESTLSVTVTETETLDKPISEGEILFSCGQKLAPKILEDIGLYLTNLNDSLSSTLHDAVEMEDDPPSEGQVIRMSHKKFHADAILSFAKQNQESAVSQQAVYHSEDLENSVGELSEGQRPQLTAAAENILMGHSLYMQPPVTNTQSLDQQCDPKPLSRQFDTVSGSIYEDSCASHGPMSLGELELEPNSKLVLPTTLLTAQENDVNLPVAAEDFSQYQLKQNQDVKQVEHKPSQSYLRVRNKSDIAPSQQQG

SEQ ID NO: 844734 - protein, 75 aa, Homo sapiens
IISQSIKHVNTQVTHVELNELLLCAGGKAVPLSASQMPPAKMSVMLPSVNLEDCSQSLSLSTMQEDMESSGADTF

SEQ ID NO: 844735 - protein, 1533 aa, Homo sapiens [sequence omitted]

SEQ ID NO: 844736 - protein, 1408 aa, Homo sapiens; identical to SEQ ID NO: 844730

SEQ ID NO: 844737 - protein, 1311 aa, Homo sapiens
MPVFKEVKVHLLEDAGIEKDAVTQETRISPSGIDSATTVAAATAAAIATAAPLIKVQSDLEAKVNSVTELLSKLQETDKHLQRVTEQQTSIQRKQEKLHCHDHEKQMNVFMEQHIRHLEKLQQQQIDIQTHFISAALKTSSFQPVSMPSSRAVEKYSVKPEHPNLGSCNPSLYNTFASKQAPLKEVEDTSFDKQKSPLETPAPRRFAPVPVSRDDELSKRENLLEEKENMEVSCHRGNVRLLEQILNNNDSLTRKSESSNTTSLTRSKIGWTPEKTNRFPSCEELETTKVTMQKSDDVLHDLGQKEKETNSMVQPKESLSMLKLPDLPQNSVKLQTTNTTRSVLKDAEKILRGVQNNKKVLEENLEAIIRAKDGAAMYSLINALSTNREMSEKIRIRKTVDEWIKTISAEIQDELSRTDYEQKRFDQKNQRTKKGQNMTKDIRTNTQDKTVNKSVIPRKHSQKQIEEHFRNLPMRGMPASSLQKERKEGLLKATTVIQDEDYMLQVYGKPVYQGHRSTLKKGPYLRFNSPSPKSRPQRPKVIERVKGTKVKSIRTQTDFYATKPKKMDSKMKHSVPVLPHGDQQYLFSPSREMPTFSGTLEGHLIPMAILLGQTQSNSDTMPPAGVIVSKPHPVTVTTSIPPSSRKVETGVKKPNIAIVEMKSEKKDPPQLTVQVLPSVDIDSISNSSADVLSPLSSPKEASPPPVQTWIKTPEIMKVDEEEVKFPGTNFDEIIDVIQEEEKCDEIPDSEPILEFNRSVKADSTKYNGPPFPPVASTFQPTADILDKVIERKETLENSLIQWVEQEIMSRIISGLFPVQQQIAPSISVSVSETSEPLTSDIVEGTSSGALQLFVDAGVPVNSNVIKHFVNEALAETIAVMLGDREAKKQGPVATGVSGDASTNETYLPARVCTPLATPQPTPPCSPSSPAKECVLVKTPDSSPCDSDHDMAFPVKEICAEKGDDMPAIMLVNTPTVTPTTTPPPAAAVFTPTLSDISIDKLKVSSPELPKPWGDGDLPLEEENPNSPQEELHPRAIVMSVAKDEEPESMDFPAQPPPPEPVPFMPFPAGTKAPSPSQMPGSDSSTLESTLSVTVTETETLDKPISEGEILFSCGQKLAPKILEDIGLYLTNLNDSLSSTLHDAVEMEDDPPSEGQVIRMSHKKFHADAILSFAKQNQESAVSQQAVYHSEDLENSVGELSEGQRPQLTAAAENILMGHSLYMQPPVTNTQSLDQQCDPKPLSRQFDTVSGSIYEDSCASHGPMSLGELELEPRGLLSVSESQHNAGGHGVFGGRYLLNGKRQPAQCLCHWF

SEQ ID NO: 844738 - protein, 1347 aa, Homo sapiens [sequence omitted]

SEQ ID NO: 844739 - protein, 92 aa, Homo sapiens; identical to SEQ ID NO: 844729

SEQ ID NO: 844740 - protein, 102 aa, Homo sapiens
LGTVLRWICRLQECMLIWLPCSTTSGLLSMGAAPTIILVPSLCAKGSPAFRTGHLCSLSFSPSLHLAWALEVLTSQYILECAPVCHASVPLFFKASGISRIT

SEQ ID NO: 844741 - protein, 179 aa, Homo sapiens
KGPPSGYAVMQKERMDSRWSACREVCSQHTHRDQDTHKHVYPFIHKQTRPHKLTGQEKQRHRYIHRHTNIHTFKCTSADGHRPGHTPAMTHTCRGTYVHVNPRHTHTRPESIYFEAQTEGAAHRNTAEISSSALELPPAGRVTPGVMSPFCASILSSAKRDDNGLSLIGCGAGDMSHFT

SEQ ID NO: 844742 - protein, 170 aa, Homo sapiens
GQDDILGSSLSKWGEVCSQHTHRDQDTHKHVYPFIHKQTRPHKLTGQEKQRHRYIHRHTNIHTFKCTSADGHRPGHTPAMTHTCRGTYVHVNPRHTHTRPESIYFEAQTEGAAHRNTAEISSSALELPPAGRVTPGVMSPFCASILSSAKRDDNGLSLIGCGAGDMSHFT

SEQ ID NO: 844743 - protein, 74 aa, Homo sapiens
MWNLLHETDSAVATARRPRWLCAGALVLAGGFFLLGFLFGWFIKSSNEATNITPKHNMKAFLDELKAENIKKFL

SEQ ID NO: 844744 - protein, 270 aa, Homo sapiens
MVTAMNVSHEVNQLFQPYNFELSKDMRPFFEEYWATSFPIALIYLVLIAVGQNYMKERKGFNLQGPLILWSFCLAIFSILGAVRMWGIMGTVLLTGGLKQTVCFINFIDNSTVKFWSWVFLLSKVIELGDTAFIILRKRPLIFIHWYHHSTVLVYTSFGYKNKVPAGGWFVTMNFGVHAIMYTYYTLKAANVKPPKMLPMLITSLQILQMFVGAIVSILTYIWRQDQGCHTTMEHLFWSFILYMTYFILFAHFFCQTYIRPKVKAKTKSQ

SEQ ID NO: 844745 - protein, 151 aa, Homo sapiens
MVTAMNVSHEVNQLFQPYNFELSKDMRPFFEEYWATSFPIALIYLVLIAVGQNYMKERKGFNLQGPLILWSFCLAIFSILGAVRMWGIMGTVLLTGGLKQTVCFINFIDNSTVKFWSWVFLLSKVIELAQCSCTQALDTRTKCLQEAGSSP

SEQ ID NO: 844746 - protein, 305 aa, Homo sapiens
MAAGLARLLLLLGLSAGGPAPAGAAKMKVVEEPNAFGVNNPFLPQASRLQAKRDPSPVSGPVHLFRLSGKCFSLVESTYKYEFCPFHNVTQHEQTFRWNAYSGILGIWHEWEIANNTFTGMWMRDGDACRSRSRQSKVELACGKSNRLAHVSEPSTCVYALTFETPLVCHPHALLVYPTLPEALQRQWDQVEQDLADELITPQGHEKLLRTLFEDAGYLKTPEENEPTQLEGGPDSLGFETLENCRKAHKELSKEIKRLKGLLTQHGIPYTRPTETSNLEHLGHETPRAKSPEQLRGDPGLRGSL

SEQ ID NO: 844747 - protein, 305 aa, Homo sapiens; identical to SEQ ID NO: 844746

SEQ ID NO: 844748 - protein, 309 aa, Homo sapiens
MSSTQAPSGAAPCCSSWLSAGGPAPAGAAKMKVVEEPNAFGVNNPFLPQASRLQAKRDPSPVSGPVHLFRLSGKCFSLVESTYKYEFCPFHNVTQHEQTFRWNAYSGILGIWHEWEIANNTFTGMWMRDGDACRSRSRQSKVELACGKSNRLAHVSEPSTCVYALTFETPLVCHPHALLVYPTLPEALQRQWDQVEQDLADELITPQGHEKLLRTLFEDAGYLKTPEENEPTQLEGGPDSLGFETLENCRKAHKELSKEIKRLKGLLTQHGIPYTRPTETSNLEHLGHETPRAKSPEQLRGDPGLRGSL

SEQ ID NO: 844749 - protein, 185 aa, Homo sapiens
MWMRDGDACRSRSRQSKVELACGKSNRLAHVSEPSTCVYALTFETPLVCHPHALLVYPTLPEALQRQWDQVEQDLADELITPQGHEKLLRTLFEDAGYLKTPEENEPTQLEGGPDSLGFETLENCRKAHKELSKEIKRLKGLLTQHGIPYTRPTETSNLEHLGHETPRAKSPEQLRGDPGLRGSL

SEQ ID NO: 844750 - protein, 299 aa, Homo sapiens
MAAGLARLLLLLGLSAGGPAPAGAAKMKVVEEPNAFGVNNPFLPQASRLQAKRDPSPVSGPVHLFRLSGKCFSLVESTYKYEFCPFHNVTQHEQTFRWNAYSGILGIWHEWEIANNTFTGMWMRDGDACRSRSRQSKVELACGKSNRLAHVSEPSTCVYALTFETPLVCHPHALLEALQRQWDQVEQDLADELITPQGHEKLLRTLFEDAGYLKTPEENEPTQLEGGPDSLGFETLENCRKAHKELSKEIKRLKGLLTQHGIPYTRPTETSNLEHLGHETPRAKSPEQLRGDPGLRGSL

SEQ ID NO: 844751 - protein, 283 aa, Homo sapiens
MAAGLARLLLLLGLSAGGPAPAGAAKMKVVEEPNAFGVNNPFLPQASRLQAKRDPSPVSGPVHLFRLSGKCFSLVESTYKYEFCPFHNVTQHEQTFRWNAYSGILGIWHEWEIANNTFTGMWMRDGDACRSRSRQSKALTFETPLVCHPHALLVYPTLPEALQRQWDQVEQDLADELITPQGHEKLLRTLFEDAGYLKTPEENEPTQLEGGPDSLGFETLENCRKAHKELSKEIKRLKGLLTQHGIPYTRPTETSNLEHLGHETPRAKSPEQLRGDPGLRGSL

SEQ ID NO: 844752 - protein, 81 aa, Homo sapiens
ADWDLARGDFAQAAQQLWLALRALGRPCPPPNLDLACSLLWNLSPYTRPTETSNLEHLGHETPRAKSPEQLRGDPGLRGSL

SEQ ID NO: 844753 - protein, 248 aa, Homo sapiens
MAAGLARLLLLLGLSAGGPAPAGAAKMKVVEEPNAFGVNNPFLPQASRLQAKRDPSPVSGPVHLFRLSGKCFSLVESTYKYEFCPFHNVTQHEQTFRWNAYSGILGIWHEWEIANNTFTGMWMRDGDACRSRSRQSKVELACGKSNRLAHVSEPSTCVYALTFETPLVCHPHALLVYPTLPEALQRQWDQVEQDLADELITPQGHEKLLRTLFEDAGYLKNLRDPKHFKSEKTGRAQLREGWRDSHQP

SEQ ID NO: 844754 - protein, 140 aa, Homo sapiens
RPSAGTPTVGSSGEWGRGRDPKAAAQLPTRPHVPCPCLPSIWHEWEIANNTFTGMWMRDGDACRSRSRQSKGASDGSPGRGAPVSPTHLPTFPPQVELACGKSNRLAHVSEPSTCVYALTFETPLVCHPHALLGRGAGRS

SEQ ID NO: 844755 - protein, 305 aa, Homo sapiens; identical to SEQ ID NO: 844746

SEQ ID NO: 844756 - protein, 305 aa, Homo sapiens; identical to SEQ ID NO: 844746

SEQ ID NO: 844757 - protein, 331 aa, Homo sapiens
MAAGLARLLLLLGLSAGGPAPAGAAKMKVVEEPNAFGEQPRGLAARAGDGPGPFPADLAASRRVNNPFLPQASRLQAKRDPSPVSGPVHLFRLSGKCFSLVESTYKYEFCPFHNVTQHEQTFRWNAYSGILGIWHEWEIANNTFTGMWMRDGDACRSRSRQSKVELACGKSNRLAHVSEPSTCVYALTFETPLVCHPHALLVYPTLPEALQRQWDQVEQDLADELITPQGHEKLLRTLFEDAGYLKTPEENEPTQLEGGPDSLGFETLENCRKAHKELSKEIKRLKGLLTQHGIPYTRPTETSNLEHLGHETPRAKSPEQLRGDPGLRGSL

SEQ ID NO: 844758 - protein, 349 aa, Homo sapiens
MAAGLARLLLLLGLSAGGPAPAGAAKMKVVEEPNAFGVNNPFLPQASRLQAKRDPSPVSETGFHRVSQDGLDLLTCDLPASASHSAGMTVMSHRAWPRLYYYYGPVHLFRLSGKCFSLVESTYKYEFCPFHNVTQHEQTFRWNAYSGILGIWHEWEIANNTFTGMWMRDGDACRSRSRQSKVELACGKSNRLAHVSEPSTCVYALTFETPLVCHPHALLVYPTLPEALQRQWDQVEQDLADELITPQGHEKLLRTLFEDAGYLKTPEENEPTQLEGGPDSLGFETLENCRKAHKELSKEIKRLKGLLTQHGIPYTRPTETSNLEHLGHETPRAKSPEQLRGDPGLRGSL

SEQ ID NO: 844759 - protein, 150 aa, Homo sapiens
MAAGLARLLLLLGLSAGGPAPAGAAKMKVVEEPNAFGVNNPFLPQASRLQAKRDPSPVSGPVHLFRLSGKCFSLVESTYKYEFCPFHNVTQHEQTFRWNAYSGILGIWHEWEIANNTFTGMWMRDGDACRSRSRQSKWPMCPSRAPASTR

SEQ ID NO: 844760 - protein, 150 aa, Homo sapiens
  misc_feature (141)..(141): Xaa can be any naturally occurring amino acid
MAAGLARLLLLLGLSAGGPAPAGAAKMKVVEEPNAFGVNNPFLPQASRLQAKRDPSPVSGPVHLFRLSGKCFSLVESTYKYEFCPFHNVTQHEQTFRWNAYSGILGIWHEWEIANNTFTGMWMRDGDACRSRSRQSKSWRXRARATASKG

SEQ ID NO: 844761 - protein, 92 aa, Homo sapiens
WGSRRGECPGWSWLSRALCSTRRGCVCWAWLAANRDGRAVGRGREVLHPRGDSEAQPQQEHLADPAPQGVRFDQISGRASWWGRSFKGTSWR

SEQ ID NO: 844762 - protein, 72 aa, Homo sapiens
  misc_feature (8)..(8): Xaa can be any naturally occurring amino acid
  misc_feature (14)..(14): Xaa can be any naturally occurring amino acid
RERRPGPXGLYLEXRFVFLKRFHPGGEEVLREQAGGDATENFEDVGHSTDAREMSCPKHSSLGSSIQMTDQS

SEQ ID NO: 844763 - protein, 92 aa, Homo sapiens; identical to SEQ ID NO: 844761

SEQ ID NO: 844764 - protein, 92 aa, Homo sapiens; identical to SEQ ID NO: 844761

SEQ ID NO: 844765 - protein, 138 aa, Homo sapiens
WGSRRGECPGWSWLSRALCSTRRGCVCWAWLAANRDGRAVGRGREVLHPRGDSEAQPQQEHLADPAPQGVRFDQISGRVSKTFIIGELHPDDRPKLNKPPETLITTIDSSSSWWTNWVIPAISAVAVALMYRLYMAED

SEQ ID NO: 844766 - protein, 92 aa, Homo sapiens; identical to SEQ ID NO: 844761

SEQ ID NO: 844767 - protein, 92 aa, Homo sapiens; identical to SEQ ID NO: 844761

SEQ ID NO: 844768 - protein, 143 aa, Homo sapiens
MAEQSDEAVKYYTLEEIQKHNHSKSTWLILHHKVYDLTKFLEEHPGGEEVLREQAGGDATENFEDVGHSTDAREMSCPKHSSLGSSIQMTDQSYTSLQNLTGGVPPALITTIDSSSSWWTNWVIPAISAVAVALMYRLYMAED

SEQ ID NO: 844769 - protein, 122 aa, Homo sapiens
MAEQSDEAVKYYTLEEIQKHNHSKSTWLILHHKVYDLTKFLEEHPGGEEVLREQAGGDATENFEDVGHSTDAREMSCPKHSSLGSSIQGQTKVKQASRNSSHYYVILFQLVDQLGDTAIPDR

SEQ ID NO: 844770 - protein, 92 aa, Homo sapiens; identical to SEQ ID NO: 844761

SEQ ID NO: 844771 - protein, 66 aa, Homo sapiens
FGEKIHLTIDLFQLVDQLGDPCHLCSGRRLDVSPIHGRGLNTSSEVSAGRACFGHGRKEAIANYFN

SEQ ID NO: 844772 - protein, 115 aa, Homo sapiens
MAEQSDEAVKYYTLEEIQKHNHSKSTWLILHHKVYDLTKFLEEHPGGEEVLREQAGGDATENFEDVGHSTDAREMSPPALITTIDSSSSWWTNWVIPAISAVAVALMYRLYMAED

SEQ ID NO: 844773 - protein, 92 aa, Homo sapiens; identical to SEQ ID NO: 844761

SEQ ID NO: 844774 - protein, 491 aa, Homo sapiens
QSSFATGFGDFRKLPALHCETLIPELNSSDSTASFGENIDIFLRKMDSDFSHAFQKELTCVICLNYLVDPVTICCGHSFCRPCLCLSWEEAQSPANCPACREPSPKMDFKTNILLKNLVTIARKASLWQFLSSEKQICGTHRQTKKMFCDMDKSLLCLLCSNSQEHGAHKHHPIEEAAEEHREKLLKQMRILWKKIQENQRNLYEEGRTAFLWRGNVVLRAQMIRNEYRKLHPVLHKEEKQHLERLNKEYQEIFQQLQRSWVKMDQKSKHLKEMYQELMEMCHKPDVELLQDLGDIVARSESVLLHMPQPVNPELTAGPITGLVYRLNRFRVEISFHFEVTNHNIRLFEDVRSWMFRRGPLNSDRSDYFAAWGARVFSFGKHYWELDVDNSCDWALGVCNNSWIRKNSTMVNSEDIFLLLCLKVDNHFNLLTTSPVFPHYIEKPLGRVGVFLDFESGSVSFLNVTKSSLIWSYPAGSLTFPVRPFFYTGHR

SEQ ID NO: 844775 - protein, 491 aa, Homo sapiens; identical to SEQ ID NO: 844774

SEQ ID NO: 844776 - protein, 2186 aa, Homo sapiens
AELTGIKWRRYNFGGHGDCGPIISAPAQDDPILLSFIRCLQANLLCVWRRDVKPDCKELWIFWWGDEPNLVGVIHHELQVVEEGLWENGLSYECRTLLFKAIHNLLERCLMDKNFVRIGKWFVRPYEKDEKPVNKSEHLSCAFTFFLHGESNVCTSVEIAQHQPIYLINEEHIHMAQSSPAPFQVLVSPYGLNGTLTGQAYKMSDPATRKLIEEWQYFYPMVLKKKEESKEEDELGYDDDFPVAVEVIVGGVRMVYPSAFVLISQNDIPVPQSVASAGGHIAVGQQGLGSVKDPSNCGMPLTPPTSPEQAILGESGGMQSAASHLVSQDGGMITMHSPKRSGKIPPKLHNHMVHRVWKECILNRTQSKRSQMSTPTLEEEPASNPATWDFVDPTQRVSCSCSRHKLLKRCAVGPNRPPTVSQPGFSAGPSSSSSLPPPASSKHKTAERQEKGDKLQKRPLIPFHHRPSVAEELCMEQDTPGQKLGLAGIDSSLEVSSSRKYDKQMAVPSRNTSKQMNLNPMDSPHSPISPLPPTLSPQPRGQETESLDPPSVPVNPALYGNGLELQQLSTLDDRTVLVGQRLPLMAEVSETALYCGIRPSNPESSEKWWHSYRLPPSDDAEFRPPELQGERCDAKMEVNSESTALQRLLAQPNKRFKIWQDKQPQLQPLHFLDPLPLSQQPGDSLGEVNDPYTFEDGDIKYIFTANKKCKQGTEKDSLKKNKSEDGFGTKDVTTPGHSTPVPDGKNAMSIFSSATKTDVRQDNAAGRAGSSSLTQVTDLAPSLHDLDNIFDNSDDDELGAVSPALRSSKMPAVGTEDRPLGKDGRAAVPYPPTVADLQRMFPTPPSLEQHPAFSPVMNYKDGISSETVTALGMMESPMVSMVSTQLTEFKMEVEDGLGSPKPEEIKDFSYVHKVPSFQPFVGSSMFAPLKMLPSHCLLPLKIPDACLFRPSWAIPPKIEQLPMPPAATFIRDGYNNVPSVGSLADPDYLNTPQMNTPVTLNSAAPASNSGAGVLPSPATPRFSVPTPRTPRTPRTPRGGGTASGQGSVKYDSTDQGSPASTPSTTRPLNSVEPATMQPIPEAHSLYVTLILSDSVMNIFKDRNFDSCCICACNMNIKGADVGLYIPDSSNEDQYRCTCGFSAIMNRKLGYNSGLFLEDELDIFGKNSDIGQAAERRLMMCQSTFLPQVEGTKKPQEPPISLLLLLQNQHTQPFASLNFLDYISSNNRQTLPCVSWSYDRVQADNNDYWTECFNALEQGRQYVDNPTGGKVDEALVRSATVHSWPHSNVLDISMLSSQDVVRMLLSLQPFLQDAIQKKRTGRTWENIQHVQGPLTWQQFHKMAGRGTYGSEESPEPLPIPTLLVGYDKDFLTISPFSLPFWERLLLDPYGGHRDVAYIVVCPENEALLEGAKTFFRDLSAVYEMCRLGQHKPICKVLRDGIMRVGKTVAQKLTDELVSEWFNQPWSGEENDNHSRLKLYAQVCRHHLAPYLATLQLDSSLLIPPKYQTPPAAAQGQATPGNAGPLAPNGSAAPPAGSAFNPTSNSSSTNPAASSSASGSSVPPVSSSASAPGISQISTTSSSGFSGSVGGQNPSTGGISADRTQGNIGCGGDTDPGQSSSQPSQDGQESVTERERIGIPTEPDSADSHAHPPAVVIYMVDPFTYAAEEDSTSGNFWLLSLMRCYTEMLDNLPEHMRNSFILQIVPCQYMLQTMKDEQVFYIQYLKSMAFSVYCQCRRPLPTQIHIKSLTGFGPAASIEMTLKNPERPSPIQLYSPPFILAPIKDKQTELGETFGEASQKYNVLFVGYCLSHDQRWLLASCTDLHGELLETCVVNIALPNRSRRSKVSARKIGLQKLWEWCIGIVQMTSLPWRVVIGRLGRLGHGELKDWSILLGECSLQTISKKLKDVCRMCGISAADSPSILSACLVAMEPQGSFVVMPDAVTMGSVFGRSTALNMQSSQLNTPQDASCTHILVFPTSSTIQVAPANYPNEDGFSPNNDDMFVDLPFPDDMDNDIGILMTGNLHSSPNSSPVPSPGSPSGIGVGSHFQHSRSQGERLLSREAPEELKQQPLALGYFVSTAKAENLPQWFWSSCPQAQNQCPLFLKASLHHHISVAQTDELLPARNSQRVPHPLDSKTTSDVLRFVLEQYNALSWLTCNPATQDRTSCLPVHFVVLTQLYNAIMNIL

SEQ ID NO: 844777 - protein, 2442 aa, Homo sapiens
AELTGIKWRRYNFGGHGDCGPIISAPAQDDPILLSFIRCLQANLLCVWRRDVKPDCKELWIFWWGDEPNLVGVIHHELQVVEEGLWENGLSYECRTLLFKAIHNLLERCLMDKNFVRIGKWFVRPYEKDEKPVNKSEHLSCAFTFFLHGESNVCTSVEIAQHQPIYLINEEHIHMAQSSPAPFQVLVSPYGLNGTLTGQAYKMSDPATRKLIEEWQYFYPMVLKKKEESKEEDELGYDDDFPVAVEVIVGGVRMVYPSAFVLISQNDIPVPQSVASAGGHIAVGQQGLGSVKDPSNCGMPLTPPTSPEQAILGESGGMQSAASHLVSQDGGMITMHSPKRSGKIPPKLHNHMVHRVWKECILNRTQSKRSQMSTPTLEEEPASNPATWDFVDPTQRVSCSCSRHKLLKRCAVGPNRPPTVSQPGFSAGPSSSSSLPPPASSKHKTAERQEKGDKLQKRPLIPFHHRPSVAEELCMEQDTPGQKLGLAGIDSSLEVSSSRKYDKQMAVPSRNTSKQMNLNPMDSPHSPISPLPPTLSPQPRGQETESLDPPSVPVNPALYGNGLELQQLSTLDDRTVLVGQRLPLMAEVSETALYCGIRPSNPESSEKWWHSYRLPPSDDAEFRPPELQGERCDAKMEVNSESTALQRLRQLSAPPTRPPEGHGLPPHLYLLNFRFKIEVGFFFVLLDSRIWKMFNGQMLCPTYRLAHMSFDTWAYKELFMPFKYTPNILIHFVPYCLLIKEYSFIRLSILLSVPSLYVDIFEEGFACIQVYVSCIYYNIYSSFEPPILKLYIDDLIYIFTVPYYYVNFITEKLEAMQLVNDTEEFETRQSVLRTCALEVELMDPETKTYILTKYANFYLIMNINCKSKHYIGEFLVVFTKSLNFVNALRHEMLFFFFFFLYFRLLAQPNKRFKIWQDKQPQLQPLHFLDPLPLSQQPGDSLGEVNDPYTFEDGDIKYIFTANKKCKQGTEKDSLKKNKSEDGFGTKDVTTPGHSTPVPDGKNAMSIFSSATKTDVRQDNAAGRAGSSSLTQVTDLAPSLHDLDNIFDNSDDDELGAVSPALRSSKMPAVGTEDRPLGKDGRAAVPYPPTVADLQRMFPTPPSLEQHPAFSPVMNYKDGISSETVTALGMMESPMVSMVSTQLTEFKMEVEDGLGSPKPEEIKDFSYVHKVPSFQPFVGSSMFAPLKMLPSHCLLPLKIPDACLFRPSWAIPPKIEQLPMPPAATFIRDGYNNVPSVGSLADPDYLNTPQMNTPVTLNSAAPASNSGAGVLPSPATPRFSVPTPRTPRTPRTPRGGGTASGQGSVKYDSTDQGSPASTPSTTRPLNSVEPATMQPIPEAHSLYVTLILSDSVMNIFKDRNFDSCCICACNMNIKGADVGLYIPDSSNEDQYRCTCGFSAIMNRKLGYNSGLFLEDELDIFGKNSDIGQAAERRLMMCQSTFLPQVEGTKKPQEPPISLLLLLQNQHTQPFASLNFLDYISSNNRQTLPCVSWSYDRVQADNNDYWTECFNALEQGRQYVDNPTGGKVDEALVRSATVHSWPHSNVLDISMLSSQDVVRMLLSLQPFLQDAIQKKRTGRTWENIQHVQGPLTWQQFHKMAGRGTYGSEESPEPLPIPTLLVGYDKDFLTISPFSLPFWERLLLDPYGGHRDVAYIVVCPENEALLEGAKTFFRDLSAVYEMCRLGQHKPICKVLRDGIMRVGKTVAQKLTDELVSEWFNQPWSGEENDNHSRLKLYAQVCRHHLAPYLATLQLDSSLLIPPKYQTPPAAAQGQATPGNAGPLAPNGSAAPPAGSAFNPTSNSSSTNPAASSSASGSSVPPVSSSASAPGISQISTTSSSGFSGSVGGQNPSTGGISADRTQGNIGCGGDTDPGQSSSQPSQDGQESVTERERIGIPTEPDSADSHAHPPAVVIYMVDPFTYAAEEDSTSGNFWLLSLMRCYTEMLDNLPEHMRNSFILQIVPCQYMLQTMKDEQVFYIQYLKSMAFSVYCQCRRPLPTQIHIKSLTGFGPAASIEMTLKNPERPSPIQLYSPPFILAPIKDKQTELGETFGEASQKYNVLFVGYCLSHDQRWLLASCTDLHGELLETCVVNIALPNRSRRSKVSARKIGLQKLWEWCIGIVQMTSLPWRVVIGRLGRLGHGELKDWSILLGECSLQTISKKLKDVCRMCGISAADSPSILSACLVAMEPQGSFVVMPDAVTMGSVFGRSTALNMQSSQLNTPQDASCTHILVFPTSSTIQVAPANYPNEDGFSPNNDDMFVDLPFPDDMDNDIGILMTGNLHSSPNSSPVPSPGSPSGIGVGSHFQHSRSQGERLLSREAPEELKQQPLALGYFVSTAKAENLPQWFWSSCPQAQNQCPLFLKASLHHHISVAQTDELLPARNSQRVPHPLDSKTTSDVLRFVLEQYNALSWLTCNPATQDRTSCLPVHFVVLTQLYNAIMNIL

SEQ ID NO: 844778 - protein, 792 aa, Homo sapiens
MAIVEEMESGKSVKQKVVCDDSRSLTNSGLFLEDELDIFGKNSDIGQAAERRLMMCQSTFLPQVEGTKKPQEPPISNHSRLKLYAQVCRHHLAPYLATLQLDSSLLIPPKYQTPPAAAQGQATPGNAGPLAPNGSAAPPAGSAFNPTSNSSSTNPAASSSASGSSVPPVSSSASAPGISQISTTSSSGFSGSVGGQNPSTGGISADRTQGNIGCGGDTDPGQSSSQPSQDGQESVTERERIGIPTEPDSADSHAHPPAVVIYMVDPFTYAAEEDSTSGNFWLLSLMRCYTEMLDNLPEHMRNSFILQIVPCQYMLQTMKDEQVFYIQYLKSMAFSVYCQCRRPLPTQIHIKSLTGFGPAASIEMTLKNPERPSPIQLYSPPFILAPIKDKQTELGETFGEASQKYNVLFVGYCLSHDQRWLLASCTDLHGELLETCVVNIALPNRSRRSKVSARKIGLQKLWEWCIGIVQMTSLPWRVVIGRLGRLGHGELKDWSILLGECSLQTISKKLKDVCRMCGISAADSPSILSACLVAMEPQGSFVVMPDAVTMGSVFGRSTALNMQSSQLNTPQDASCTHILVFPTSSTIQVAPANYPNEDGFSPNNDDMFVDLPFPDDMDNDIGILMTGNLHSSPNSSPVPSPGSPSGIGVGSHFQHSRSQGERLLSREAPEELKQQPLALGYFVSTAKAENLPQWFWSSCPQAQNQCPLFLKASLHHHISVAQTDELLPARNSQRVPHPLDSKTTSDVLRFVLEQYNALSWLTCNPATQDRTSCLPVHFVVLTQLYNAIMNIL

SEQ ID NO: 844779 - protein, 602 aa, Homo sapiens [sequence omitted]

SEQ ID NO: 844780 - protein, 2454 aa, Homo sapiens
AELTGIKWRRYNFGGHGDCGPIISAPAQDDPILLSFIRCLQANLLCVWRRDVKPDCKELWIFWWGDEPNLVGVIHHELQVVEEGLWENGLSYECRTLLFKAIHNLLERCLMDKNFVRIGKWFVRPYEKDEKPVNKSEHLSCAFTFFLHGESNVCTSVEIAQHQPIYLINEEHIHMAQSSPAPFQVLVSPYGLNGTLTGQAYKMSDPATRKLIEEWQYFYPMVLKKKEESKEEDELGYDDDFPVAVEVIVGGVRMVYPSAFVLISQNDIPVPQSVASAGGHIAVGQQGLGSVKDPSNCGMPLTPPTSPEQAILGESGGMQSAASHLVSQDGGMITMHSPKRSGKIPPKLHNHMVHRVWKECILNRTQSKRSQMSTPTLEEEPASNPATWDFVDPTQRVSCSCSRHKLLKRCAVGPNRPPTVSQPGFSAGPSSSSSLPPPASSKHKTAERQEKGDKLQKRPLIPFHHRPSVAEELCMEQDTPGQKLGLAGIDSSLEVSSSRKYDKQMAVPSRNTSKQMNLNPMDSPHSPISPLPPTLSPQPRGQETESLDPPSVPVNPALYGNGLELQQLSTLDDRTVLVGQRLPLMAEVSETALYCGIRPSNPESSEKWWHSYRLPPSDDAEFRPPELQGERCDAKMEVNSESTALQRLRQLSAPPTRPPEGHGLPPHLYLLNFRFKIEVGFFFVLLDSRIWKMFNGQMLCPTYRLAHMSFDTWAYKELFMPFKYTPNILIHFVPYCLLIKEYSFIRLSILLSVPSLYVDIFEEGFACIQVYVSCIYYNIYSSFEPPILKLYIDDLIYIFTVPYYYVNFITEKLEAMQLVNDTEEFETRQSVLRTCALEVELMDPETKTYILTKYANFYLIMNINCKSKHYIGEFLVVFTKSLNFVNALRHEMLFFFFFFLYFRLLAQPNKRFKIWQDKQPQLQPLHFLDPLPLSQQPGDSLGEVNDPYTFEDGDIKYIFTANKKCKQGTEKDSLKKNKSEDGFGTKDVTTPGHSTPVPDGKNAMSIFSSATKTDVRQDNAAGRAGSSSLTQVTDLAPSLHDLDNIFDNSDDDELGAVSPALRSSKMPAVGTEDRPLGKDGRAAVPYPPTVADLQRMFPTPPSLEQHPAFSPVMNYKDGISSETVTALGMMESPMVSMVSTQLTEFKMEVEDGLGSPKPEEIKDFSYVHKVPSFQPFVGSSMFAPLKMLPSHCLLPLKIPDACLFRPSWAIPPKIEQLPMPPAATFIRDGYNNVPSVGSLADPDYLNTPQMNTPVTLNSAAPASNSGAGVLPSPATPRFSVPTPRTPRTPRTPRGGGTASGQGSVKYDSTDQGSPASTPSTTRPLNSVEPATMQPIPEAHSLYVTLILSDSVMNIFKDRNFDSCCICACNMNIKGADVGLYIPDSSNEDQYRCTCGFSAIMNRKLGYNSGLFLEDELDIFGKNSDIGQAAERRLMMCQSTFLPQVEGTKKPQEPPISLLLLLQNQHTQPFASLNFLDYISSNNRQTLPCVSWSYDRVQADNNDYWTECFNALEQGRQYVDNPTGGKVDEALVRSATVHSWPHSNVLDISMLSSQDVVRMLLSLQPFLQDAIQKKRTGRTWENIQHVQGPLTWQQFHKMAGRGTYGSEESPEPLPIPTLLVGYDKDFLTISPFSLPFWERLLLDPYGGHRDVAYIVVCPENEALLEGAKTFFRDLSAVYEMCRLGQHKPICKVLRDGIMRVGKTVAQKLTDELVSEWFNQPWSGEENDNHSRLKLYAQVCRHHLAPYLATLQLDSSLLIPPKYQTPPAAAQGQATPGNAGPLAPNGSAAPPAGSAFNPTSNSSSTNPAASSSASGSSVPPVSSSASAPGISQISTTSSSGFSGSVGGQNPSTGGISADRTQGNIGCGGDTDPGQSSSQPSQDGQESVTERERIGIPTEPDSADSHAHPPAVVIYMVDPFTYAAEEDSTSGNFWLLSLMRCYTEMLDNLPEHMRNSFILQIVPCQYMLQTMKDEQVFYIQYLKSMAFSVYCQCRRPLPTQIHIKSLTGFGPAASIEMTLKNPERPSPIQLYSPPFILAPIKDKQTELGETFGEASQKYNVLFVGYCLSHDQRWLLASCTDLHGELLETCVVNIALPNRDPFPFPISLFVRSRRSKVSARKIGLQKLWEWCIGIVQMTSLPWRVVIGRLGRLGHGELKDWSILLGECSLQTISKKLKDVCRMCGISAADSPSILSACLVAMEPQGSFVVMPDAVTMGSVFGRSTALNMQSSQLNTPQDASCTHILVFPTSSTIQVAPANYPNEDGFSPNNDDMFVDLPFPDDMDNDIGILMTGNLHSSPNSSPVPSPGSPSGIGVGSHFQHSRSQGERLLSREAPEELKQQPLALGYFVSTAKAENLPQWFWSSCPQAQNQCPLFLKASLHHHISVAQTDELLPARNSQRVPHPLDSKTTSDVLRFVLEQYNALSWLTCNPATQDRTSCLPVHFVVLTQLYNAIMNIL

SEQ ID NO: 844781 - protein, 2442 aa, Homo sapiens; identical to SEQ ID NO: 844777

SEQ ID NO: 844782 - protein, 2291 aa, Homo sapiens
AELTGIKWRRYNFGGHGDCGPIISAPAQDDPILLSFIRCLQANLLCVWRRDVKPDCKELWIFWWGDEPNLVGVIHHELQVVEEGLWENGLSYECRTLLFKAIHNLLERCLMDKNFVRIGKWFVRPYEKDEKPVNKSEHLSCAFTFFLHGESNVCTSVEIAQHQPIYLINEEHIHMAQSSPAPFQVLVSPYGLNGTLTGQAYKMSDPATRKLIEEWQYFYPMVLKKKEESKEEDELGYDDDFPVAVEVIVGGVRMVYPSAFVLISQNDIPVPQSVASAGGHIAVGQQGLGSVKDPSNCGMPLTPPTSPEQAILGESGGMQSAASHLVSQDGGMITMHSPKRSGKIPPKLHNHMVHRVWKECILNRTQSKRSQMSTPTLEEEPASNPATWDFVDPTQRVSCSCSRHKLLKRCAVGPNRPPTVSQPGFSAGPSSSSSLPPPASSKHKTAERQEKGDKLQKRPLIPFHHRPSVAEELCMEQDTPGQKLGLAGIDSSLEVSSSRKYDKQMAVPSRNTSKQMNLNPMDSPHSPISPLPPTLSPQPRGQETESLDPPSVPVNPALYGNGLELQQLSTLDDRTVLVGQRLPLMAEVSETALYCGIRPSNPESSEKWWHSYRLPPSDDAEFRPPELQGERCDAKMEVNSESTALQRLRQLSAPPTRPPEGHGLPPHLYLLNFRFKIEVGFFFVLLDSRIWKMFNGQMLCPTYRLAHMSFDTWAYKELFMPFKYTPNILIHFVPYCLLIKEYSFIRLSILLSVPSLYVDIFEEGFACIQVYVSCIYYNIYSSFEPPILKLYIDDLIYIFTVPYYYVNFITEKLEAMQLVNDTEEFETRQSVLRTCALEVELMDPETKTYILTKYANFYLIMNINCKSKHYIGEFLVVFTKSLNFVNALRHEMLFFFFFFLYFRLLAQPNKRFKIWQDKQPQLQPLHFLDPLPLSQQPGDSLGEVNDPYTFEDGDIKYIFTANKKCKQGTEKDSLKKNKSEDGFGTKDVTTPGHSTPVPDGKNAMSIFSSATKTDVRQDNAAGRAGSSSLTQVTDLAPSLHDLDNIFDNSDDDELGAVSPALRSSKMPAVGTEDRPLGKDGRAAVPYPPTVADLQRMFPTPPSLEQHPAFSPVMNYKDGISSETVTALGMMESPMVSMVSTQLTEFKMEVEDGLGSPKPEEIKDFSYVHKVPSFQPFVGSSMFAPLKMLPSHCLLPLKIPDACLFRPSWAIPPKIEQLPMPPAATFIRDGYNNVPSVGSLADPDYLNTPQMNTPVTLNSAAPASNSGAGVLPSPATPRFSVPTPRTPRTPRTPRGGGTASGQGSVKYDSTDQGSPASTPSTTRPLNSVEPATMQPIPEAHSLYVTLILSDSVMNIFKDRNFDSCCICACNMNIKGADVGLYIPDSSNEDQYRCTCGFSAIMNRKLGYNSGLFLEDELDIFGKNSDIGQAAERRLMMCQSTFLPQVEGTKKPQEPPISLLLLLQNQHTQPFASLNFLDYISSNNRQTLPCVSWSYDRVQADNNDYWTECFNALEQGRQYVDNPTGGKVDEALVRSATVHSWPHSNVLDISMLSSQDVVRMLLSLQPFLQDAIQKKRTGRTWENIQHVQGPLTWQQFHKMAGRGTYGSEESPEPLPIPTLLVGYDKDFLTISPFSLPFWERLLLDPYGGHRDVAYIVVCPENEALLEGAKTFFRDLSAVYEMCRLGQHKPICKVLRDGIMRVGKTVAQKLTDELVSEWFNQPWSGEENDNHSRLKLYAQVCRHHLAPYLATLQLDSSLLIPPKYQTPPAAAQGQATPGNAGPLAPNGSAAPPAGSAFNPTSNSSSTNPAASSSASGSSVPPVSSSASAPGISQISTTSSSGFSGSVGGQNPSTGGISADRTQGNIGCGGDTDPGQSSSQPSQDGQESVTERERIGIPTEPDSADSHAHPPAVVIYMVDPFTYAAEEDSTSGNFWLLSLMRCYTEMLDNLPEHMRNSFILQIVPCQYMLQTMKDEQVFYIQYLKSMAFSVYCQCRRPLPTQIHIKSLTGFGPAASIEMTLKNPERPSPIQLYSPPFILAPIKDKQTELGETFGEASQKYNVLFVGYCLSHDQRWLLASCTDLHGELLETCVVNIALPNRSRRSKVSARKIGLQKLWEWCIGIVQMTSLPWRVVIGRLGRLGHGELKDWSILLGECSLQTISKKLKDVCRMCGISAADSPSILSACLVAMEPQGSFVVMPDAVTMGSVFGRSTALNMQSSQLNTPQDASCTHILVFPTSSTIQVAPANYPNEDGFSPNNDDMFVDLPFPDDMDNDIGILMTGNLHSSPRDTGDTLE

SEQ ID NO: 844783 - protein, 1137 aa, Homo sapiens
MLFFFFFFLYFRLLAQPNKRFKIWQDKQPQLQPLHFLDPLPLSQQPGDSLGEVNDPYTFEDGDIKYIFTANKKCKQGTEKDSLKKNKSEDGFGTKDVTTPGHSTPVPDGKNAMSIFSSATKTDVRQDNAAGRAGSSSLTQVTDLAPSLHDLDNIFDNSDDDELGAVSPALRSSKMPAVGTEDRPLGKDGRAAVPYPPTVADLQRMFPTPPSLEQHPAFSPVMNYKDGISSETVTALGMMESPMVSMVSTQLTEFKMEVEDGLGSPKPEEIKDFSYVHKVPSFQPFVGSSMFAPLKMLPSHCLLPLKIPDACLFRPSWAIPPKIEQLPMPPAATFIRDGYNNVPSVGSLADPDYLNTPQMNTPVTLNSAAPASNSGAGVLPSPATPRFSVPTPRTPRTPRTPRGGGTASGQGSVKYDSTDQGSPASTPSTTRPLNSVEPATMQPIPEAHSLYVTLILSDSVMNIFKDRNFDSCCICACNMNIKGADVGLYIPDSSNEDQYRCTCGFSAIMNRKLGYNSGLFLEDELDIFGKNSDIGQAAERRLMMCQSTFLPQVEGTKKPQEPPISLLLLLQNQHTQPFASLNFLDYISSNNRQTLPCVSWSYDRVQADNNDYWTECFNALEQGRQYVDNPTGGKVDEALVRSATVHSWPHSNVLDISMLSSQDVVRMLLSLQPFLQDAIQKKRTGRTWENIQHVQGPLTWQQFHKMAGRGTYGSEESPEPLPIPTLLVGYDKDFLTISPFSLPFWERLLLDPYGGHRDVAYIVVCPENEALLEGAKTFFRDLSAVYEMCRLGQHKPICKVLRDGIMRVGKTVAQKLTDELVSEWFNQPWSGEENDNHSRLKLYAQVCRHHLAPYLATLQLDSSLLIPPKYQTPPAAAQGQATPGNAGPLAPNGSAAPPAGSAFNPTSNSSSTNPAASSSASGSSVPPVSSSASAPGISQISTTSSSGFSGSVGGQNPSTGGISADRTQGNIGCGGDTDPGQSSSQPSQDGQESVTERERIGIPTEPDSADSHAHPPAVVIYMVDPFTYAAEEDSTSGNFWLLSLMRCYTEMLDNLPEHMRNSFILQIVPCQYMLQTMKDEQVFYIQYLKSMAFSVYCQCRRPLPTQIHIKSLTGFGPAASIEMTLKNPEVGIGRTET

SEQ ID NO: 844784 - protein, 1204 aa, Homo sapiens
MLFFFFFFLYFRLLAQPNKRFKIWQDKQPQLQPLHFLDPLPLSQQPGDSLGEVNDPYTFEDGDIKYIFTANKKCKQGTEKDSLKKNKSEDGFGTKDVTTPGHSTPVPDGKNAMSIFSSATKTDVRQDNAAGRAGSSSLTQVTDLAPSLHDLDNIFDNSDDDELGAVSPALRSSKMPAVGTEDRPLGKDGRAAVPYPPTVADLQRMFPTPPSLEQHPAFSPVMNYKDGISSETVTALGMMESPMVSMVSTQLTEFKMEVEDGLGSPKPEEIKDFSYVHKVPSFQPFVGSSMFAPLKMLPSHCLLPLKIPDACLFRPSWAIPPKIEQLPMPPAATFIRDGYNNVPSVGSLADPDYLNTPQMNTPVTLNSAAPASNSGAGVLPSPATPRFSVPTPRTPRTPRTPRGGGTASGQGSVKYDSTDQGSPASTPSTTRPLNSVEPATMQPIPEAHSLYVTLILSDSVMNIFKDRNFDSCCICACNMNIKGADVGLYIPDSSNEDQYRCTCGFSAIMNRKLGYNSGLFLEDELDIFGKNSDIGQAAERRLMMCQSTFLPQVEGTKKPQEPPISLLLLLQNQHTQPFASLNFLDYISSNNRQTLPCVSWSYDRVQADNNDYWTECFNALEQGRQYVDNPTGGKVDEALVRSATVHSWPHSNVLDISMLSSQDVVRMLLSLQPFLQDAIQKKRTGRTWENIQHVQGPLTWQQFHKMAGRGTYGSEESPEPLPIPTLLVGYDKDFLTISPFSLPFWERLLLDPYGGHRDVAYIVVCPENEALLEGAKTFFRDLSAVYEMCRLGQHKPICKVLRDGIMRVGKTVAQKLTDELVSEWFNQPWSGEENDNHSRLKLYAQVCRHHLAPYLATLQLDSSLLIPPKYQTPPAAAQGQATPGNAGPLAPNGSAAPPAGSAFNPTSNSSSTNPAASSSASGSSVPPVSSSASAPGISQISTTSSSGFSGSVGGQNPSTGGISADRTQGNIGCGGDTDPGQSSSQPSQDGQESVTERERIGIPTEPDSADSHAHPPAVVIYMVDPFTYAAEEDSTSGNFWLLSLMRCYTEMLDNLPEHMRNSFILQIVPCQYMLQTMKDEQVFYIQYLKSMAFSVYCQCRRPLPTQIHIKSLTGFGPAASIEMTLKNPERPSPIQLYSPPFILAPIKDKQTELGETFGEASQKYNVLFVGYCLSHDQRWLLASCTDLHGELLETCVVNIALPNR

SEQ ID NO: 844785 - protein, 647 aa, Homo sapiens
AELTGIKWRRYNFGGHGDCGPIISAPAQDDPILLSFIRCLQANLLCVWRRDVKPDCKELWIFWWGDEPNLVGVIHHELQVVEEGLWENGLSYECRTLLFKAIHNLLERCLMDKNFVRIGKWFVRPYEKDEKPVNKSEHLSCAFTFFLHGESNVCTSVEIAQHQPIYLINEEHIHMAQSSPAPFQVLVSPYGLNGTLTGQAYKMSDPATRKLIEEWQYFYPMVLKKKEESKEEDELGYDDDFPVAVEVIVGGVRMVYPSAFVLISQNDIPVPQSVASAGGHIAVGQQGLGSVKDPSNCGMPLTPPTSPEQAILGESGGMQSAASHLVSQDGGMITMHSPKRSGKIPPKLHNHMVHRVWKECILNRTQSKRSQMSTPTLEEEPASNPATWDFVDPTQRVSCSCSRHKLLKRCAVGPNRPPTVSQPGFSAGPSSSSSLPPPASSKHKTAERQEKGDKLQKRPLIPFHHRPSVAEELCMEQDTPGQKLGLAGIDSSLEVSSSRKYDKQMAVPSRNTSKQMNLNPMDSPHSPISPLPPTLSPQPRGQETESLDPPSVPVNPALYGNGLELQQLSTLDDRTVLVGQRLPLMAEVSETALYCGIRPSNPESSEKWWHSYRLPPSDDAEFRPPELQGERCDAKMEVNSESTALQR

SEQ ID NO: 844786 - protein, 2442 aa, Homo sapiens; identical to SEQ ID NO: 844777

SEQ ID NO: 844787 - protein, 479 aa, Homo sapiens [sequence omitted]

SEQ ID NO: 844788 - protein, 2442 aa, Homo sapiens; identical to SEQ ID NO: 844777

SEQ ID NO: 844789 - protein, 1076 aa, Homo sapiens
MLFFFFFFLYFRLLAQPNKRFKIWQDKQPQLQPLHFLDPLPLSQQPGDSLGEVNDPYTFEDGDIKYIFTANKKCKQGTEKDSLKKNKSEDGFGTKDVTTPGHSTPVPDGKNAMSIFSSATKTDVRQDNAAGRAGSSSLTQVTDLAPSLHDLDNIFDNSDDDELGAVSPALRSSKMPAVGTEDRPLGKDGRAAVPYPPTVADLQRMFPTPPSLEQHPAFSPVMNYKDGISSETVTALGMMESPMVSMVSTQLTEFKMEVEDGLGSPKPEEIKDFSYVHKVPSFQPFVGSSMFAPLKMLPSHCLLPLKIPDACLFRPSWAIPPKIEQLPMPPAATFIRDGYNNVPSVGSLADPDYLNTPQMNTPVTLNSAAPASNSGAGVLPSPATPRFSVPTPRTPRTPRTPRGGGTASGQGSVKYDSTDQGSPASTPSTTRPLNSVEPATMQPIPEAHSLYVTLILSDSVMNIFKDRNFDSCCICACNMNIKGADVGLYIPDSSNEDQYRCTCGFSAIMNRKLGYNSGLFLEDELDIFGKNSDIGQAAERRLMMCQSTFLPQVEGTKKPQEPPISLLLLLQNQHTQPFASLNFLDYISSNNRQTLPCVSWSYDRVQADNNDYWTECFNALEQGRQYVDNPTGGKVDEALVRSATVHSWPHSNVLDISMLSSQDVVRMLLSLQPFLQDAIQKKRTGRTWENIQHVQGPLTWQQFHKMAGRGTYGSEESPEPLPIPTLLVGYDKDFLTISPFSLPFWERLLLDPYGGHRDVAYIVVCPENEALLEGAKTFFRDLSAVYEMCRLGQHKPICKVLRDGIMRVGKTVAQKLTDELVSEWFNQPWSGEENDNHSRLKLYAQVCRHHLAPYLATLQLDSSLLIPPKYQTPPAAAQGQATPGNAGPLAPNGSAAPPAGSAFNPTSNSSSTNPAASSSASGSSVPPVSSSASAPGISQISTTSSSGFSGSVGGQNPSTGGISADRTQGNIGCGGDTDPGQSSSQPSQDGQESVTERERIGIPTEPDSADSHAHPPAVVIYMVDPFTYAAEEDSTSGNFWLLSLMRCYTEMLDNLPEHMRNSFILQVTVCKFIIYF

SEQ ID NO: 844790 - protein, 647 aa, Homo sapiens; identical to SEQ ID NO: 844785

SEQ ID NO: 844791 - protein, 339 aa, Homo sapiens
AELTGIKWRRYNFGGHGDCGPIISAPAQDDPILLSFIRCLQANLLCVWRRDVKPDCKELWIFWWGDEPNLVGVIHHELQVVEEGLWENGLSYECRTLLFKAIHNLLERCLMDKNFVRIGKWFVRPYEKDEKPVNKSEHLSCAFTFFLHGESNVCTSVEIAQHQPIYLINEEHIHMAQSSPAPFQVLVSPYGLNGTLTGQAYKMSDPATRKLIEEWQYFYPMVLKKKEESKEEDELGYDDDFPVAVEVIVGGVRMVYPSAFVLISQNDIPVPQSVASAGGHIAVGQQGLGSVKDPSNCGMPLTPPTSPEQAILGESGGMQSAVSVLPPTSPPSLHLQFLP

SEQ ID NO: 844792 - protein, 123 aa, Homo sapiens [sequence omitted]

SEQ ID NO: 844793 - protein, 123 aa, Homo sapiens [sequence omitted]

SEQ ID NO: 844794 - protein, 137 aa, Homo sapiens
AEGDCHMIAKKWHINEAPLQGSFLLLSPLKTIRWFEGGHGGSHLAQRRRGAHSSALRSPNTSLPPSAPGLRSRARPPAGRSRSVADRAARDAAGLTSRAEVRAESNRTRTLRAECASSARRERSGAQRRPPGCGRAT

SEQ ID NO: 844795 - protein, 137 aa, Homo sapiens; identical to SEQ ID NO: 844794

SEQ ID NO: 844796 - protein, 117 aa, Homo sapiens
GLGRQPQAPSSAAPEALAVAAPGVRSEPRLLVVPAPRPPLSGGSVKPGGEGGGGGPAGGELAANMFPMVAGGGTCSRPGLRSHPVRHAQPNSLPPPPPPSPAWCIFWTCPFWKKLLC

SEQ ID NO: 844797 - protein, 83 aa, Homo sapiens
PPAWLPPCSLISDCCASNQRDSVGVGPSEPAPVSPVKHDSNSNSANFQDVEDMPDRCALEESESPGEPRHHSWIAKVCPCKVS

SEQ ID NO: 844798 - protein, 71 aa, Homo sapiens
CRNHPSSASLTLGAVDRSSPVSPVKHDSNSNSANFQDVEDMPDRCALEESESPGEPRHHSWIAKVCPCKVS

SEQ ID NO: 844799 - protein, 130 aa, Homo sapiens
DDLSRVTLPARHATLPQCSSRAALIPVDCGRDGEGEASPGGRQWPGRLSGCCCMAARWRYRTGCCIPERARRGSASSWTASEASAPTSPTTDAGASRSRVRPHRGHAGSLQLQRHRPGLAAAAFCQLVVV

SEQ ID NO: 844800 - protein, 199 aa, Homo sapiens
DDLSRVTLPARHATLPQCSSRAALIPVDCGRDGEGEASPGGRQWPGRLSGCCCMAARWRYRTGCCIPERARRGSASSWTASEASAPTSPTTDAGASRSRGTGDRCRRRGLGAGPGVARKPGGGNGSGPTVDMPVPSSFNDIGQGWRLRHFVSWLWYEREVTLLERWIQDLCTRVVLRIGSAHFYAIVVSQGLLCPEHRL

SEQ ID NO: 844801 - protein, 133 aa, Homo sapiens
DDLSRVTLPARHATLPQCSSRAALIPVDCGRDGEGEASPGGRQWPGRLSGCCCMAARWRYRTGCCIPERARRGSASSWTASEASAPTSPTTDAGASRSRGTGDRCRRRGLGAGPGVARKPGGGNGDWMEDLKT

SEQ ID NO: 844802 - protein, 185 aa, Homo sapiens
DDLSRVTLPARHATLPQCSSRAALIPETAAETGRGKPRLGGGSGLGGSPAAVVWLHVGATGRDAVSPREPVVAAQAAGRPLKLPRRLLRQPTPGLRGAESGPTVDMPVPSSFNDIGQGWRLRHFVSWLWYEREVTLLERWIQDLCTRVVLRIGSAHFYAIVDCCGLCFYTRHPPPTSMTSPSPPA

SEQ ID NO: 844803 - protein, 68 aa, Homo sapiens
RLVLALALVRPRAVGWAPVRAPIYVSSWAVQVSQGNREVERLARKFGFVNLGPVGGTGIDGKWGLGGD

SEQ ID NO: 844804 - protein, 282 aa, Homo sapiens
RLVLALALVRPRAVGWAPVRAPIYVSSWAVQVSQGNREVERLARKFGFVNLGPIFPDGQYFHLRHRGVVQQSLTPHWGHRLHLKKNPKVQWFQQQTLQRRVKRSVVVPTDPWFSKQWYMNSEAQPDLSILQAWSQGLSGQGIVVSVLDDGIEKDHPDLWANYDPLASYDFNDYDPDPQPRYTPSKENRHGTRCAGEVAAMANNGFCGVGVAFNARIGGVRMLDGTITDVIEAQSLSLQPQHIHIYSASWGPEDDGRTVDGPGILTREAFRRGVTKVSGSPRR

SEQ ID NO: 844805 - protein, 316 aa, Homo sapiens
RLVLALALVRPRAVGWAPVRAPIYVSSWAVQVSQGNREVERLARKFGFVNLGPIFPDGQYFHLRHRGVVQQSLTPHWGHRLHLKKNPKLCAFCGSDPPGPQVYTARGGRKTQIRKSWRLPGLVQWFQQQTLQRRVKRSVVVPTDPWFSKQWYMNSEAQPDLSILQAWSQGLSGQGIVVSVLDDGIEKDHPDLWANYDPLASYDFNDYDPDPQPRYTPSKENRHGTRCAGEVAAMANNGFCGVGVAFNARIGGVRMLDGTITDVIEAQSLSLQPQHIHIYSASWGPEDDGRTVDGPGILTREAFRRGVTKVSGSPRR

SEQ ID NO: 844806 - protein, 130 aa, Homo sapiens
ECLTRPPAFGFPAAHPRLAPSGSSSGLTQPPQASALRGLRMHPVSTISLLPGKSVYSALLCLYLFSLHVPPETIILFNHHLSVDNLKLCLQPRAPSAAPAHLPPNSLRDLSKIPSEGHSFSLYFLVVTVP

SEQ ID NO: 844807 - protein, 130 aa, Homo sapiens
MWRGTTDVGGSLAPRYSIKQRGHRPHTYISYHPLRFHGVFALLPAFGKHIIDEDVSKTIMFLVVDSTARRCNYSIRKLASTSQTIVSYITLQTCDRIITTRTLLFIETQQYNNSTIIHYLYSIATTTSTH

SEQ ID NO: 844808 - protein, 121 aa, Homo sapiens
WAPGSRKCCPALRKRFIGPRAPSPSFSVRDVELSDPARERGEMPVAVGPYGQSQPSCFDRVKMGFVMGCAVGMAAGALFGTFSCLRIGMRGRELMGGIGKTMMQSGGTFGTFMAIGMGIRC

SEQ ID NO: 844809 - protein, 98 aa, Homo sapiens
SLPKVAKVELSDPARERGEMPVAVGPYGQSQPSCFDRVKMGFVMGCAVGMAAGALFGTFSCLRIGMRGRELMGGIGKTMMQSGGTFGTFMAIGMGIRC

SEQ ID NO: 844810 - protein, 102 aa, Homo sapiens
  misc_feature (1)..(1): Xaa can be any naturally occurring amino acid
XSELAEVSVRDVELSDPARERGEMPVAVGPYGQSQPSCFDRVKMGFVMGCAVGMAAGALFGTFSCLRIGMRGRELMGGIGKTMMQSGGTFGTFMAIGMGIRC

SEQ ID NO: 844811 - protein, 121 aa, Homo sapiens; identical to SEQ ID NO: 844808

SEQ ID NO: 844812 - protein, 180 aa, Homo sapiens
WAPGSRKCCPALRKRFIGPRAPSPSFSVRDVELSDPARERGEARRRATRGRNAKRVVESGYPLIFLPLLPLSPWAHFPAYRFRPRPTLGPAPGPTLSYPPQMPVAVGPYGQSQPSCFDRVKMGFVMGCAVGMAAGALFGTFSCLRIGMRGRELMGGIGKTMMQSGGTFGTFMAIGMGIRC

SEQ ID NO: 844813 - protein, 102 aa, Homo sapiens; identical to SEQ ID NO: 844810
  misc_feature (1)..(1): Xaa can be any naturally occurring amino acid

SEQ ID NO: 844814 - protein, 121 aa, Homo sapiens; identical to SEQ ID NO: 844808

SEQ ID NO: 844815 - protein, 121 aa, Homo sapiens; identical to SEQ ID NO: 844808

SEQ ID NO: 844816 - protein, 121 aa, Homo sapiens; identical to SEQ ID NO: 844808

SEQ ID NO: 844817 - protein, 102 aa, Homo sapiens; identical to SEQ ID NO: 844810
  misc_feature (1)..(1): Xaa can be any naturally occurring amino acid

SEQ ID NO: 844818 - protein, 121 aa, Homo sapiens; identical to SEQ ID NO: 844808

SEQ ID NO: 844819 - protein, 98 aa, Homo sapiens
NKSGDAVREEKRSTNLAANTPGKGGRLRFASPSGPQVSAAPLCPDDPVTFTRPGCIAALGSHLLWQHLSCCSTLACLECLPHTSQPSRNWLNGGSLSK

SEQ ID NO: 844820 - protein, 110 aa, Homo sapiens [sequence omitted]

SEQ ID NO: 844821 - protein, 219 aa, Homo sapiens
MSETAPAAPAAPAPAEKTPVKKKARKSAGAAKRKASGPPVSELITKAVAASKERSGVSLAALKKALAAAGYDVEKNNSRIKLGLKSLVSKGTLVQTKGTGASGSFKLNKKAASGEAKPKAKKAGAAKAKKPAGAAKKPKKATGAATPKKSAKKTPKKAKKPAAAAGAKKAKSPKKAKAAKPKKAPKSPAKAKAVKPKAAKPKTAKPKAAKPKKAAAKKK

SEQ ID NO: 844822 - protein, 61 aa, Homo sapiens
MSETAPAAPAAPAPAEKTPVKKKARKSAGAAKPQGSQAKEGGSQEKVESSFGQLLRSPTQP

SEQ ID NO: 844823 - protein, 84 aa, Homo sapiens
SFSSPRTLHIDPTLATSTSWTVTTFRGEHNVLQHAFLKVQLATGQHLNSSSAKLFSEYLRYQHDPGTAPASAVLSNSSSLGPLL

SEQ ID NO: 844824 - protein, 668 aa, Homo sapiens
MWLFFGITGLLTAALSGHPSPAPPDQLNTSSAESELWEPGERLPVRLTNGSSSCSGTVEVRLEASWEPACGALWDSRAAEAVCRALGCGGAEAASQLAPPTPELPPPPAAGNTSVAANATLAGAPALLCSGAEWRLCEVVEHACRSDGRRARVTCAENRALRLVDGGGACAGRVEMLEHGEWGSVCDDTWDLEDAHVVCRQLGCGWAVQALPGLHFTPGRGPIHRDQVNCSGAEAYLWDCPGLPGQHYCGHKEDAGVVCSEHQSWRLTGGADRCEGQVEVHFRGVWNTVCDSEWYPSEAKVLCQSLGCGTAVERPKGLPHSLSGRMYYSCNGEELTLSNCSWRFNNSNLCSQSLAARVLCSASRSLHNLSTPEVPASVQTVTIESSVTVKIENKESRELMLLIPSIVLGILLLGSLIFIAFILLRIKGKYALPVMVNHQHLPTTIPAGSNSYQPVPITIPKEVFMLPIQVQAPPPEDSDSGSDSDYEHYDFSAQPPVALTTFYNSQRHRVTDEEVQQSRFQMPPLEEGLEELHASHIPTANPGHCITDPPSLGPQYHPRSNSESSTSSGEDYCNSPKSKLPPWNPQVFSSERSSFLEQPPNLELAGTQPAFSAGPPADDSSSTSSGEWYQNFQPPPQPPSEEQFGCPGSPSPQPDSTDNDDYDDISAA

SEQ ID NO: 844825 - protein, 668 aa, Homo sapiens; identical to SEQ ID NO: 844824

SEQ ID NO: 844826 - protein, 668 aa, Homo sapiens; identical to SEQ ID NO: 844824

SEQ ID NO: 844827 - protein, 592 aa, Homo sapiens [sequence omitted]

SEQ ID NO: 844828 - protein, 146 aa, Homo sapiens
DSWTVQRRWTAQRRLDSTEAVDSTDEEVQQSRFQMPPLEEGLEELHASHIPTANPGHCITDPPSLGPQYHPRSNSESSTSSGEDYCNSPKSKLPPWNPQVFSSERSSFLEQPPNLELAGTQPAFSGSPSPQPDSTDNDDYDDISAA

SEQ ID NO: 844829 - protein, 39 aa, Homo sapiens
MLPIQVQAPPPEDSDSGSDSDYEHYDFSAQPPVALTTFY

SEQ ID NO: 844830 - protein, 626 aa, Homo sapiens
MWLFFGITGLLTAALSGHPSPAPPDQLNTSSAESELWEPGERLPVRLTNGSSSCSGTVEVRLEASWEPACGALWDSRAAEAVCRALGCGGAEAASQLAPPTPELPPPPAAGNTSVAANATLAGAPALLCSGAEWRLCEVVEHACRSDGRRARVTCAENRALRLVDGGGACAGRVEMLEHGEWGSVCDDTWDLEDAHVVCRQLGCGWAVQALPGLHFTPGRGPIHRDQVNCSGAEAYLWDCPGLPGQHYCGHKEDAGVVCSEHQSWRLTGGADRCEGQVEVHFRGVWNTVCDSEWYPSEAKVLCQSLGCGTAVERPKGLPHSLSGRMYYSCNGEELTLSNCSWRFNNSNLCSQSLAARVLCSASRSLHNLSTPEVPASVQTVTIESSVTVKIENKESRELMLLIPSIVLGILLLGSLIFIAFILLRIKGKYALPVMVNHQHLPTTIPAGSNSYQPVPITIPKEGPGPAPEDSDSGSDSDYEHYDFSAQPPVALTTFYNSQRHRVTDEEVQQSRFQMPPLEEGLEELHASHIPTANPGHCITDPPSLGPQYHPRSNSESSTSSGEDYCNSPKSKLPPWNPQVFSSERSSFLEQPPNLELAGTQPAFSGSPSPQPDSTDNDDYDDISAA

SEQ ID NO: 844831 - protein, 668 aa, Homo sapiens; identical to SEQ ID NO: 844824

SEQ ID NO: 844832 - protein, 601 aa, Homo sapiens [sequence omitted]

SEQ ID NO: 844833 - protein, 84 aa, Homo sapiens
PELEFLFPESSVTVKIENKESRELMLLIPSIVLGILLLGSLIFIAFILLRIKGKYGKCKVLGAMAIPGGCEPWQNPSSSGVVQQ

SEQ ID NO: 844834 - protein, 625 aa, Homo sapiens
MNAAVVRRTQEALGKVIRRPPLTEKLLSKPPFRYLHDIITEVIRMTGFMKGLYTDAEMKSDNVKDKDAKISFLQKAIDVVVMVSGEPLLAKPARIVAGHEPERTNELLQIIGKCCLNKLSSDDAVRRVLAGEKGEVKGRASLTSRSQELDNKNVREEESRVHKNTEDRGDAEIKERSTSRDRKQKEELKEDRKPREKDKDKEKAKENGGNRHREGERERAKARARPDNERQKDRGNRERDRDSERKKETERKSEGGKEKERLRDRDRERDRDKGKDRDRRRVKNGEHSWDLDREKNREHDKPEKKSASSGEMSKKLSDGTFKDSKAETETEISTRASKSLTTKTSKRRSKNSVEGDSTSDAEGDAGPAGQDKSEVPETPEIPNELSSNIRRIPRPGSARPAPPRVKRQDSMEALQMDRSGSGKTVSNVITESHNSDNEEDDQFVVEAAPQLSEMSEIEMVTAVELEEEEKHGGLVKKILETKKDYEKLQQSPKPGEKERSLFESAWKKEKDIVSKEIEKLRTSIQTLCKSALPLGKIMDYIQEDVDAMQNELQMWHSENRQHAEALQQEQRITDCAVEPLKAELAELEQLIKDQQDKICAVKANILKNEEKIQKMVYSINLTSRR

SEQ ID NO: 844835 - protein, 634 aa, Homo sapiens
MNAAVVRRTQEALGKVIRRPPLTEKLLSKPPFRYLHDIITEVGAGDRARQVIRMTGFMKGLYTDAEMKSDNVKDKDAKISFLQKAIDVVVMVSGEPLLAKPARIVAGHEPERTNELLQIIGKCCLNKLSSDDAVRRVLAGEKGEVKGRASLTSRSQELDNKNVREEESRVHKNTEDRGDAEIKERSTSRDRKQKEELKEDRKPREKDKDKEKAKENGGNRHREGERERAKARARPDNERQKDRGNRERDRDSERKKETERKSEGGKEKERLRDRDRERDRDKGKDRDRRRVKNGEHSWDLDREKNREHDKPEKKSASSGEMSKKLSDGTFKDSKAETETEISTRASKSLTTKTSKRRSKNSVEGDSTSDAEGDAGPAGQDKSEVPETPEIPNELSSNIRRIPRPGSARPAPPRVKRQDSMEALQMDRSGSGKTVSNVITESHNSDNEEDDQFVVEAAPQLSEMSEIEMVTAVELEEEEKHGGLVKKILETKKDYEKLQQSPKPGEKERSLFESAWKKEKDIVSKEIEKLRTSIQTLCKSALPLGKIMDYIQEDVDAMQNELQMWHSENRQHAEALQQEQRITDCAVEPLKAELAELEQLIKDQQDKICAVKANILKNEEKIQKMVYSINLTSRR

SEQ ID NO: 844836 - protein, 57 aa, Homo sapiens
LSSDDAVRRVLAGEKGEVKGRASLTSRSQELDNKNVREEESRVHKNTEVNSKSHIFE

SEQ ID NO: 844837 - protein, 37 aa, Homo sapiens
MEEGEGHRFQGDREAPHVHPDPVQERTSPGEDHGLHP

SEQ ID NO: 844838 - protein, 625 aa, Homo sapiens; identical to SEQ ID NO: 844834

SEQ ID NO: 844839 - protein, 205 aa, Homo sapiens
MNAAVVRRTQEALGKVIRRPPLTEKLLSKPPFRYLHDIITEVGAGDRARQVIRMTGFMKGLYTDAEMKSDNVKDKDAKISFLQKAIDVVVMVSGEPLLAKPARIVAGHEPERTNELLQIIGKCCLNKLSSDDAVRRVLAGEKGEVKGRASLTSRSQELDNKNVREEESRVHKNTEDRGDAEIKETVEDTSILYEERGSESWILKQ

SEQ ID NO: 844840 - protein, 136 aa, Homo sapiens
CCSHIPRCLRNPQKEIIEVFHHVAMPIVSSCSSASPIKISSGLTNYNQSLKAECQPALQRPCVPVPKGSSLKKQGTVLLGPTSRWKECTKSDLASGWPLSSPQGILQAVLLWSTSQWLWRQDSQWCSHKASPGPGP

SEQ ID NO: 844841 - protein, 270 aa, Homo sapiens
LLAFSGAARSQPETLLFFSGFGAVPDALGCRMSDLRITEAFLYMDYLCFRALCCKGPPPARPEYDLVCIGLTGSGKTSLLSKLCSESPDNVVSTTGFSIKAVPFQNAILNVKELGGADNIRKYWSRYYQGSQGVIFVLDSASSEDDLEAARNELHSALQHPQLCTLPFLILANHQDKPAARSVQEEMQFHRVAQDGLKLLGSSHSTWRQAFPKTLQGCPYTLSPGPEFHYIIEQLRKFSQETNGGYHPESMDHTWDIEIPIAPVRILGPT

SEQ ID NO: 844842 - protein, 235 aa, Homo sapiens
LLAFSGAARSQPETLLFFSGFGAVPDALGCRMSDLRITEAFLYMDYLCFRALCCKGPPPARPEYDLVCIGLTGSGKTSLLSKLCSESPDNVVSTTGFSIKAVPFQNAILNVKELGGADNIRKYWSRYYQGSQGVIFVLDSASSEDDLEAARNELHSALQHPQLCTLPFLILANHQDKPAARSVQEIKKYFELEPLARGKRWILQPCSLDDMDALKDSFSQLINLLEEKDHEAVRM

SEQ ID NO: 844843 - protein, 235 aa, Homo sapiens; identical to SEQ ID NO: 844842

SEQ ID NO: 844844 - protein, 142 aa, Homo sapiens
LLAFSGAARSQPETLLFFSGFGAVPDALGCRMSDLRITEAFLYMDYLCFRALCCKGPPPARPEYDLVCIGLTGSGKTSLLSKLCSESPDNVVSTTGFSIKAVPFQNAILNVKELGGITFQIISMSALNFYEFGNNVLYVIQT

SEQ ID NO: 844845 - protein, 118 aa, Homo sapiens
RDRARSSRLVGRCDEAASGPYVSTWGGAAPLRIPVHAEEWGFSPPPPPPSDLSRDTSHFPRDGSPRGPFGPLPLAGPTPRCRTVTLSPNASVSGVEWVPVVGAVEVSPVASAARTAVT

SEQ ID NO: 844846 - protein, 693 aa, Homo sapiens
MDTFPNNFPPGGDSGLTGSQSEFQKMLIDERLRCEHHKANYQTLKAEHTRLQNEHVKLQNELKHLFNEKQTQQEKLQLLLEELRGELVEKTKDLEEMKLQILTPQKLELLRAQIQQELETPMRERFRNLDEEVEKYRAVYNKLRYEHTFLKSEFEHQKEEYARILDEGKIKYESEIARLEEDKEELRNQLLNVDLTKDSKRVEQLAREKVYLCQKLKGLEAEVAELKAEKENSEAQVENAQRIQVRQLAEMQATVRSLEAEKQSANLRAERLEKELQSSSEQNTFLINKLHKAEREINTLSSKVKELKHSNKLEITDIKLETARAKSELERERNKIQSELDGLQSDNEILKAAVEHHKVLLVEKDRELIRKVQAAKEEGYQKLVVLQDEKLELENRLADLEKMKVEHDVWRQSEKDQYEEKLRASQMAEEITRKELQSVRLKLQQQIVTIENAEKEKNENSDLKQQISSLQIQVTSLAQSENDLLNSNQMLKEMVERLKQECRNFRSQAEKAQLEAEKTLEEKQIQWLEEKHKLHERITDREEKYNQAKEKLQRAAIAQKKRKSLHENKLKRLQEKVEVLEAKKEELETENQVLNRQNVPFEDYTRLQKRLKDIQRRHNEFRSLILVPNMPPTASINPVSFQSSAMVPSMELPFPPHMQEEQHQRELSLLRKRLEELETTQRKQLEELGSSGE

SEQ ID NO: 844847 - protein, 443 aa, Homo sapiens
MDTFPNNFPPGGDSGLTGSQSEFQKMLIDERLRCEHHKANYQTLKAEHTRLQNEHVKLQNELKHLFNEKQTQQEKLQLLLEELRGELVEKTKDLEEMKLQILTPQKLELLRAQIQQELETPMRERFRNLDEEVEKYRAVYNKLRYEHTFLKSEFEHQKEEYARILDEGKIKYESEIARLEEDKEELRNQLLNVDLTKDSKRVEQLAREKVYLCQKLKGLEAEVAELKAEKENSEAQVENAQRIQVERLKQECRNFRSQAEKAQLEAEKTLEEKQIQWLEEKHKLHERITDREEKYNQAKEKLQRAAIAQKKRKSLHENKLKRLQEKVEVLEAKKEELETENQVLNRQNVPFEDYTRLQKRLKDIQRRHNEFRSLILVPNMPPTASINPVSFQSSAMVPSMELPFPPHMQEEQHQRELSLLRKRLEELETTQRKQLEELGSSGE

SEQ ID NO: 844848 - protein, 568 aa, Homo sapiens
MHSPFEEVEKYRAVYNKLRYEHTFLKSEFEHQKEEYARILDEGKIKYESEIARLEEDKEELRNQLLNVDLTKDSKRVEQLAREKVYLCQKLKGLEAEVAELKAEKENSEAQVENAQRIQVRQLAEMQATVRSLEAEKQSANLRAERLEKELQSSSEQNTFLINKLHKAEREINTLSSKVKELKHSNKLEITDIKLETARAKSELERERNKIQSELDGLQSDNEILKAAVEHHKVLLVEKDRELIRKVQAAKEEGYQKLVVLQDEKLELENRLADLEKMKVEHDVWRQSEKDQYEEKLRASQMAEEITRKELQSVRLKLQQQIVTIENAEKEKNENSDLKQQISSLQIQVTSLAQSENDLLNSNQMLKEMVERLKQECRNFRSQAEKAQLEAEKTLEEKQIQWLEEKHKLHERITDREEKYNQAKEKLQRAAIAQKKRKSLHENKLKRLQEKVEVLEAKKEELETENQVLNRQNVPFEDYTRLQKRLKDIQRRHNEFRSLILVPNMPPTASINPVSFQSSAMVPSMELPFPPHMQEEQHQRELSLLRKRLEELETTQRKQLEELGSSGE

SEQ ID NO: 844849 - protein, 693 aa, Homo sapiens; identical to SEQ ID NO: 844846

SEQ ID NO: 844850 - protein, 111 aa, Homo sapiens
  misc_feature (17)..(17): Xaa can be any naturally occurring amino acid
TNNKDNRREKKEGSFVXARRGLTELQKRLKDIQRRHNEFRSLILVPNMPPTASINPVSFQSSAMVPSMELPFPPHMQEEQHQRELSLLRKRLEELETTQRKQLEELGSSGE

SEQ ID NO: 844851 - protein, 693 aa, Homo sapiens; identical to SEQ ID NO: 844846

SEQ ID NO: 844852 - protein, 701 aa, Homo sapiens
MVVSTFTDMDTFPNNFPPGGDSGLTGSQSEFQKMLIDERLRCEHHKANYQTLKAEHTRLQNEHVKLQNELKHLFNEKQTQQEKLQLLLEELRGELVEKTKDLEEMKLQILTPQKLELLRAQIQQELETPMRERFRNLDEEVEKYRAVYNKLRYEHTFLKSEFEHQKEEYARILDEGKIKYESEIARLEEDKEELRNQLLNVDLTKDSKRVEQLAREKVYLCQKLKGLEAEVAELKAEKENSEAQVENAQRIQVRQLAEMQATVRSLEAEKQSANLRAERLEKELQSSSEQNTFLINKLHKAEREINTLSSKVKELKHSNKLEITDIKLETARAKSELERERNKIQSELDGLQSDNEILKAAVEHHKVLLVEKDRELIRKVQAAKEEGYQKLVVLQDEKLELENRLADLEKMKVEHDVWRQSEKDQYEEKLRASQMAEEITRKELQSVRLKLQQQIVTIENAEKEKNENSDLKQQISSLQIQVTSLAQSENDLLNSNQMLKEMVERLKQECRNFRSQAEKAQLEAEKTLEEKQIQWLEEKHKLHERITDREEKYNQAKEKLQRAAIAQKKRKSLHENKLKRLQEKVEVLEAKKEELETENQVLNRQNVPFEDYTRLQKRLKDIQRRHNEFRSLILVPNMPPTASINPVSFQSSAMVPSMELPFPPHMQEEQHQRELSLLRKRLEELETTQRKQLEELGSSGE

SEQ ID NO: 844853 - protein, 742 aa, Homo sapiens
MKNRAKGPAAYSMLKPETSSDSPSARSKGVRLVSASVEINHIMAKGHDGRSNQRCSCVVIRVERLKEPLISNVDSRMMARVTSYEIVWATARSAPIRAQFEFDAHPDQRIEYTARLEVARINRRPRLRLTRAGVGDQCRKEFTDLMTEMTDLSSDLEGSGIPFLDYRTYAERAFFPGHGGCPLQPKPEGPGEDGHCATVRQGLTQLSNLLNSKLFLLTLIHTLEEQPSFSQRDRCHVASLLSLALHGKLEYLTDIMRTLLGDLAAHYVHRNPKLMLRRTETMVEKLLTNWLSICLYAFLREVAGEPLYMLFRAIQYQVDKGPVDAVTGKAKRTLNDSRLLREDVEFQPLTLMVLVGPGAGGAAGSSEMQRVPARVLDTDTITQVKEKVLDQVYKGTPFSQRPSVHALDLEWRSGLAGHLTLSDEDLTSVTQNHWKRLNTLQHYKVPDGATVGLVPQLHRGSTISQSLAQRCPLGENIPTLEDGEEGGVCLWHLVKATEEPEGAKVRCSSLREREPARAKAIPEIYLTRLLSMKGTLQKFVDDTFQAILSVNRPIPIAVKYLFDLLDELAEKHGIEDPGTLHIWKTNSLLLRFWVNALKNPQLIFDVRVSDNVDAILAVIAQTFIDSCTTSEHKVGRDSPVNKLLYAREIPRYKQMVERYYADIRQSSPASYQEMNSALAELSGNYTSAPHCLEALQELYNHIHRYYDQIISALEEDPVGQKLQLACRLQQVAALVENKVTDL

SEQ ID NO: 844854 - protein, 530 aa, Homo sapiens
PPTPAQLIHTLEEQPSFSQRDRCHVASLLSLALHGKLEYLTDIMRTLLGDLAAHYVHRNPKLMLRRTETMVEKLLTNWLSICLYAFLREVAGEPLYMLFRAIQYQVDKGPVDAVTGKAKRTLNDSRLLREDVEFQPLTLMVLVGPGAGGAAGSSEMQRVPARVLDTDTITQVKEKVLDQVYKGTPFSQRPSVHALDLEWRSGLAGHLTLSDEDLTSVTQNHWKRLNTLQHYKVPDGATVGLVPQLHRGSTISQSLAQRCPLGENIPTLEDGEEGGVCLWHLVKATEEPEGAKVRCSSLREREPARAKAIPEIYLTRLLSMKGTLQKFVDDTFQAILSVNRPIPIAVKYLFDLLDELAEKHGIEDPGTLHIWKTNSLLLRFWVNALKNPQLIFDVRVSDNVDAILAVIAQTFIDSCTTSEHKVGRDSPVNKLLYAREIPRYKQMVERYYADIRQSSPASYQEMNSALAELSGNYTSAPHCLEALQELYNHIHRYYDQIISALEEDPVGQKLQLACRLQQVAALVENKVTDL

SEQ ID NO: 844855 - protein, 487 aa, Homo sapiens
MRTLLGDLAAHYVHRNPKLMLRRTETMVEKLLTNWLSICLYAFLREVAGEPLYMLFRAIQYQVDKGPVDAVTGKAKRTLNDSRLLREDVEFQPLTLMVLVGPGAGGAAGSSEMQRVPARVLDTDTITQVKEKVLDQVYKGTPFSQRPSVHALDLEWRSGLAGHLTLSDEDLTSVTQNHWKRLNTLQHYKVPDGATVGLVPQLHRGSTISQSLAQRCPLGENIPTLEDGEEGGVCLWHLVKATEEPEGAKVRCSSLREREPARAKAIPEIYLTRLLSMKGTLQKFVDDTFQAILSVNRPIPIAVKYLFDLLDELAEKHGIEDPGTLHIWKTNSLLLRFWVNALKNPQLIFDVRVSDNVDAILAVIAQTFIDSCTTSEHKVGRDSPVNKLLYAREIPRYKQMVERYYADIRQSSPASYQEMNSALAELSGNYTSAPHCLEALQELYNHIHRYYDQIISALEEDPVGQKLQLACRLQQVAALVENKVTDL

SEQ ID NO: 844856 - protein, 1884 aa, Homo sapiens
MCHAAQETPLLHHFMAPVMARWPPFGLCLLLLLLSPPPLPLTGAHRFSAPNTTLNHLALAPGRGTLYVGAVNRLFQLSPELQLEAVAVTGPVIDSPDCVPFRDPAECPQAQLTDNANQLLLVSSRAQELVACGQVRQGVCETRRLGDVAEVLYQAEDPGDGQFVAANTPGVATVGLVVPLPGRDLLLVARGLAGKLSAGVPPLAIRQLAGSQPFSSEGLGRLVVGDFSDYNNSYVGAFADARSAYFVFRRRGARAQAEYRSYVARVCLGDTNLYSYVEVPLACQGQGLIQAAFLAPGTLLGVFAAGPRGTQAALCAFPMVELGASMEQARRLCYTAGGRGPSGAEEATVEYGVTSRCVTLPLDSPESYPCGDEHTPSPIAGRQPLEVQPLLKLGQPVSAVAALQADGHMIAFLGDTQGQLYKVFLHGSQGQVYHSQQVGPPGSAISPDLLLDSSGSHLYVLTAHQVDRIPVAACPQFPDCASCLQAQDPLCGWCVLQGRCTRKGQCGRAGQLNQWLWSYEEDSHCLHIQSLLPGHHPRQEQGQVTLSVPRLPILDADEYFHCAFGDYDSLAHVEGPHVACVTPPQDQVPLNPPGTDHVTVPLALMFEDVTVAATNFSFYDCSAVQALEAAAPCRACVGSIWRCHWCPQSSHCVYGEHCPEGERTIYSAQEVDIQVRGPGACPQVEGLAGPHLVPVGWESHLALRVRNLQHFRGLPASFHCWLELPGELRGLPATLEETAGDSGLIHCQAHQFYPSMSQRELPVPIYVTQGEAQRLDNTHALYVILYDCAMGHPDCSHCQAANRSLGCLWCADGQPACRYGPLCPPGAVELLCPAPSIDAVEPLTGPPEGGLALTILGSNLGRAFADVQYAVSVASRPCNPEPSLYRTSARIVCVTSPAPNGTTGPVRVAIKSQPPGISSQHFTYQDPVLLSLSPRWGPQAGGTQLTIRGQHLQTGGNTSAFVGGQPCPILEPVCPEAIVCRTRPQAAPGEAAVLVVFGHAQRTLLASPFRYTANPQLVAAEPSASFRGGGRLIRVRGTGLDVVQRPLLSVWLEADAEVQASRAQPQDPQPRRSCGAPAADPQACIQLGGGLLQCSTVCSVNSSSLLLCRSPAVPDRAHPQRVFFTLDNVQVDFASASGGQGFLYQPNPRLAPLSREGPARPYRLKPGHVLDVEGEGLNLGISKEEVRVHIGRGECLVKTLTRTHLYCEPPAHAPQPANGSGLPQFVVQMGNVQLALGPVQYEAEPPLSAFPVEAQAGVGMGAAVLIAAVLLLTLMYRHKSKQALRDYQKVLVQLESLETGVGDQCRKEFTDLMTEMTDLSSDLEGSGIPFLDYRTYAERAFFPGHGGCPLQPKPEGPGEDGHCATVRQGLTQLSNLLNSKLFLLTLIHTLEEQPSFSQRDRCHVASLLSLALHGKLEYLTDIMRTLLGDLAAHYVHRNPKLMLRRTETMVEKLLTNWLSICLYAFLREVAGEPLYMLFRAIQYQVDKGPVDAVTGKAKRTLNDSRLLREDVEFQPLTLMVLVGPGAGGAAGSSEMQRVPARVLDTDTITQVKEKVLDQVYKGTPFSQRPSVHALDLEWRSGLAGHLTLSDEDLTSVTQNHWKRLNTLQHYKVPDGATVGLVPQLHRGSTISQSLAQRCPLGENIPTLEDGEEGGVCLWHLVKATEEPEGAKVRCSSLREREPARAKAIPEIYLTRLLSMKGTLQKFVDDTFQAILSVNRPIPIAVKYLFDLLDELAEKHGIEDPGTLHIWKTNSLLLRFWVNALKNPQLIFDVRVSDNVDAILAVIAQTFIDSCTTSEHKVGRDSPVNKLLYAREIPRYKQMVERYYADIRQSSPASYQEMNSALAELSGIISALEEDPVGQKLQLACRLQQVAALVENKVTDL

SEQ ID NO: 844857 - protein, 1563 aa, Homo sapiens
MCHAAQETPLLHHFMAPVMARWPPFGLCLLLLLLSPPPLPLTGAHRFSAPNTTLNHLALAPGRGTLYVGAVNRLFQLSPELQLEAVAVTGPVIDSPDCVPFRDPAECPQAQLTDNANQLLLVSSRAQELVACGQVRQGVCETRRLGDVAEVLYQAEDPGDGQFVAANTPGVATVGLVVPLPGRDLLLVARGLAGKLSAGVPPLAIRQLAGSQPFSSEGLGRLVVGDFSDYNNSYVGAFADARSAYFVFRRRGARAQAEYRSYVARVCLGDTNLYSYVEVPLACQGQGLIQAAFLAPGTLLGVFAAGPRGTQAALCAFPMVELGASMEQARRLCYTAGGRGPSGAEEATVEYGVTSRCVTLPLDSPESYPCGDEHTPSPIAGRQPLEVQPLLKLGQPVSAVAALQADGHMIAFLGDTQGQLYKVFLHGSQGQVYHSQQVGPPGSAISPDLLLDSSGSHLYVLTAHQVDRIPVAACPQFPDCASCLQAQDPLCGWCVLQGRCTRKGQCGRAGQLNQWLWSYEEDSHCLHIQSLLPGHHPRQEQGQVTLSVPRLPILDADEYFHCAFGDYDSLAHVEGPHVACVTPPQDQVPLNPPGTDHVTVPLALMFEDVTVAATNFSFYDCSAVQALEAAAPCRACVGSIWRCHWCPQSSHCVYGEHCPEGERTIYSAQEVDIQVRGPGACPQVEGLAGPHLVPVGWESHLALRVRNLQHFRGLPASFHCWLELPGELRGLPATLEETAGDSGLIHCQAHQFYPSMSQRELPVPIYVTQGEAQRLDNTHALYVILYDCAMGHPDCSHCQAANRSLGCLWCADGQPACRYGPLCPPGAVELLCPAPSIDAVEPLTGPPEGGLALTILGSNLGRAFADVQYAVSVASRPCNPEPSLYRTSARIVCVTSPAPNGTTGPVRVAIKSQPPGISSQHFTYQDPVLLSLSPRWGPQAGGTQLTIRGQHLQTGGNTSAFVGGQPCPILEPVCPEAIVCRTRPQAAPGEAAVLVVFGHAQRTLLASPFRYTANPQLVAAEPSASFRGGGRLIRVRGTGLDVVQRPLLSVWLEADAEVQASRAQPQDPQPRRSCGAPAADPQACIQLGGGLLQCSTVCSVNSSSLLLCRSPAVPDRAHPQRVFFTLDNVQVDFASASGGQGFLYQPNPRLAPLSREGPARPYRLKPGHVLDVEGEGLNLGISKEEVRVHIGRGECLVKTLTRTHLYCEPPAHAPQPANGSGLPQFVVQMGNVQLALGPVQYEAEPPLSAFPVEAQAGVGMGAAVLIAAVLLLTLMYRHKSKQALRDYQKVLVQLESLETGVGDQCRKEFTDLMTEMTDLSSDLEGSGIPFLDYRTYAERAFFPGHGGCPLQPKPEGPGEDGHCATVRQGLTQLSNLLNSKLFLLTLIHTLEEQPSFSQRDRCHVASLLSLALHGKLEYLTDIMRTLLGDLAAHYVHRNPKLMLRRTETMVEKLLTNWLSICLYAFLREVAGEPLYMLFRAIQYQVDKGPVDAVTGKAKRTLNDSRLLREDVEFQPLTLMVLVGPGAGGAAGSSEMQRVPARVLDTDTITQVKEKSGAQAWLVT

SEQ ID NO: 844858 - protein, 107 aa, Homo sapiens
SGSIMGAPSPPSSCLAPPLPPEQDSPVNKLLYAREIPRYKQMVERYYADIRQSSPASYQEMNSALAELSGNYTSAPHCLEALQELYNHIHRYYDQVAALVENKVTDL

SEQ ID NO: 844859 - protein, 66 aa, Homo sapiens
VFLHGSQGQVYHSQQVGPPGSAISPDLLLDSSGSHLYVLTAHQVRAILGLKGPAHAAQVSCPLPLC

SEQ ID NO: 844860 - protein, 1909 aa, Homo sapiens
MCHAAQETPLLHHFMAPVMARWPPFGLCLLLLLLSPPPLPLTGAHRFSAPNTTLNHLALAPGRGTLYVGAVNRLFQLSPELQLEAVAVTGPVIDSPDCVPFRDPAECPQAQLTDNANQLLLVSSRAQELVACGQVRQGVCETRRLGDVAEVLYQAEDPGDGQFVAANTPGVATVGLVVPLPGRDLLLVARGLAGKLSAGVPPLAIRQLAGSQPFSSEGLGRLVVGDFSDYNNSYVGAFADARSAYFVFRRRGARAQAEYRSYVARVCLGDTNLYSYVEVPLACQGQGLIQAAFLAPGTLLGVFAAGPRGTQAALCAFPMVELGASMEQARRLCYTAGGRGPSGAEEATVEYGVTSRCVTLPLDSPESYPCGDEHTPSPIAGRQPLEVQPLLKLGQPVSAVAALQADGHMIAFLGDTQGQLYKVFLHGSQGQVYHSQQVGPPGSAISPDLLLDSSGSHLYVLTAHQVDRIPVAACPQFPDCASCLQAQDPLCGWCVLQGRCTRKGQCGRAGQLNQWLWSYEEDSHCLHIQSLLPGHHPRQEQGQVTLSVPRLPILDADEYFHCAFGDYDSLAHVEGPHVACVTPPQDQVPLNPPGTDHVTVPLALMFEDVTVAATNFSFYDCSAVQALEAAAPCRACVGSIWRCHWCPQSSHCVYGEHCPEGERTIYSAQEVDIQVRGPGACPQVEGLAGPHLVPVGWESHLALRVRNLQHFRGLPASFHCWLELPGELRGLPATLEETAGDSGLIHCQAHQFYPSMSQRELPVPIYVTQGEAQRLDNTHALYVILYDCAMGHPDCSHCQAANRSLGCLWCADGQPACRYGPLCPPGAVELLCPAPSIDAVEPLTGPPEGGLALTILGSNLGRAFADVQYAVSVASRPCNPEPSLYRTSARIVCVTSPAPNGTTGPVRVAIKSQPPGISSQHFTYQDPVLLSLSPRWGPQAGGTQLTIRGQHLQTGGNTSAFVGGQPCPILEPVCPEAIVCRTRPQAAPGEAAVLVVFGHAQRTLLASPFRYTANPQLVAAEPSASFRGGGRLIRVRGTGLDVVQRPLLSVWLEADAEVQASRAQPQDPQPRRSCGAPAADPQACIQLGGGLLQCSTVCSVNSSSLLLCRSPAVPDRAHPQRVFFTLDNVQVDFASASGGQGFLYQPNPRLAPLSREGPARPYRLKPGHVLDVEGEGLNLGISKEEVRVHIGRGECLVKTLTRTHLYCEPPAHAPQPANGSGLPQFVVQMGNVQLALGPVQYEAEPPLSAFPVEAQAGVGMGAAVLIAAVLLLTLMYRHKSKQALRDYQKVLVQLESLETGVGDQCRKEFTDLMTEMTDLSSDLEGSGIPFLDYRTYAERAFFPGHGGCPLQPKPEGPGEDGHCATVRQGLTQLSNLLNSKLFLLTLIHTLEEQPSFSQRDRCHVASLLSLALHGKLEYLTDIMRTLLGDLAAHYVHRNPKLMLRRTETMVEKLLTNWLSICLYAFLREVAGEPLYMLFRAIQYQVDKGPVDAVTGKAKRTLNDSRLLREDVEFQPLTLMVLVGPGAGGAAGSSEMQRVPARVLDTDTITQVKEKVLDQVYKGTPFSQRPSVHALDLEWRSGLAGHLTLSDEDLTSVTQNHWKRLNTLQHYKVPDGATVGLVPQLHRGSTISQSLAQRCPLGENIPTLEDGEEGGVCLWHLVKATEEPEGAKVRCSSLREREPARAKAIPEIYLTRLLSMKGTLQKFVDDTFQAILSVNRPIPIAVKYLFDLLDELAEKHGIEDPGTLHIWKTNSLLLRFWVNALKNPQLIFDVRVSDNVDAILAVIAQTFIDSCTTSEHKVGRDSPVNKLLYAREIPRYKQMVERYYADIRQSSPASYQEMNSALAELSGNYTSAPHCLEALQELYNHIHRYYDQIISALEEDPVGQKLQLACRLQQVAALVENKVTDL

SEQ ID NO: 844861 - protein, 1995 aa, Homo sapiens
MCHAAQETPLLHHFMAPVMARWPPFGLCLLLLLLSPPPLPLTGAHRFSAPNTTLNHLALAPGRGTLYVGAVNRLFQLSPELQLEAVAVTGPVIDSPDCVPFRDPAECPQAQLTDNANQLLLVSSRAQELVACGQVRQGVCETRRLGDVAEVLYQAEDPGDGQFVAANTPGVATVGLVVPLPGRDLLLVARGLAGKLSAGVPPLAIRQLAGSQPFSSEGLGRLVVGDFSDYNNSYVGAFADARSAYFVFRRRGARAQAEYRSYVARVCLGDTNLYSYVEVPLACQGQGLIQAAFLAPGTLLGVFAAGPRGTQAALCAFPMVELGASMEQARRLCYTAGGRGPSGAEEATVEYGVTSRCVTLPLDSPESYPCGDEHTPSPIAGRQPLEVQPLLKLGQPVSAVAALQADGHMIAFLGDTQGQLYKVFLHGSQGQVYHSQQVGPPGSAISPDLLLDSSGSHLYVLTAHQVDRIPVAACPQFPDCASCLQAQDPLCGWCVLQGRCTRKGQCGRAGQLNQWLWSYEEDSHCLHIQSLLPGHHPRQEQGQVTLSVPRLPILDADEYFHCAFGDYDSLAHVEGPHVACVTPPQDQVPLNPPGTDHVTVPLALMFEDVTVAATNFSFYDCSAVQALEAAAPCRACVGSIWRCHWCPQSSHCVYGEHCPEGERTIYSAQEVDIQVRGPGACPQVEGLAGPHLVPVGWESHLALRVRNLQHFRGLPASFHCWLELPGELRGLPATLEETAGDSGLIHCQAHQFYPSMSQRELPVPIYVTQGEAQRLDNTHALYVILYDCAMGHPDCSHCQAANRSLGCLWCADGQPACRYGPLCPPGAVELLCPAPSIDAVEPLTGPPEGGLALTILGSNLGRAFADVQYAVSVASRPCNPEPSLYRTSARIVCVTSPAPNGTTGPVRVAIKSQPPGISSQHFTYQDPVLLSLSPRWGPQAGGTQLTIRGQHLQTGGNTSAFVGGQPCPILEPVCPEAIVCRTRPQAAPGEAAVLVVFGHAQRTLLASPFRYTANPQLVAAEPSASFRGGGRLIRVRGTGLDVVQRPLLSVWLEADAEVQASRAQPQDPQPRRSCGAPAADPQACIQLGGGLLQCSTVCSVNSSSLLLCRSPAVPDRAHPQRVFFTLDNVQVDFASASGGQGFLYQPNPRLAPLSREGPARPYRLKPGHVLDVEGEGLNLGISKEEVRVHIGRGECLVKTLTRTHLYCEPPAHAPQPANGSGLPQFVVQMGNVQLALGPVQYEAEPPLSAFPVEAQAGVGMGAAVLIAAVLLLTLMYRHKSKQALRDYQKVLVQLESLETGVGDQCRKEFTDLMTEMTDLSSDLEGSGIPFLDYRTYAERAFFPGHGGCPLQPKPEGPGEDGHCATVRQGLTQLSNLLNSKLFLLTLIHTLEEQPSFSQRDRCHVASLLSLALHGKLEYLTDIMRTLLGDLAAHYVHRNPKLMLRRTETMVEKLLTNWLSICLYAFLREVAGEPLYMLFRAIQYQVDKGPVDAVTGKAKRTLNDSRLLREDVEFQPLTLMVLVGPGAGGAAGSSEMQRVPARVLDTDTITQVKEKVLDQVYKGTPFSQRPSVHALDLEWRSGLAGHLTLSDEDLTSVTQNHWKRLNTLQHYKVPDGATVGLVPQLHRGSTISQSLAQRCPLGENIPTLEDGEEGGVCLWHLVKATEEPEGAKVRCSSLREREPARAKAIPEIYLTRLLSMKGTLQKFVDDTFQAILSVNRPIPIAVKYLFDLLDELAEKHGIEDPGTLHIWKTNRCLSCCPTPAVHMVTESQRDQDIPRVDAPTWGFWNLQEDLGPRSPRPPGQLPAAPGSECVASRLEYMGRRSRWQARASRPRLPCAPSLLLRFWVNALKNPQLIFDVRVSDNVDAILAVIAQTFIDSCTTSEHKVGRDSPVNKLLYAREIPRYKQMVERYYADIRQSSPASYQEMNSALAELSGNYTSAPHCLEALQELYNHIHRYYDQIISALEEDPVGQKLQLACRLQQVAALVENKVTDL

SEQ ID NO: 844862 - protein, 2037 aa, Homo sapiens
MCHAAQETPLLHHFMAPVMARWPPFGLCLLLLLLSPPPLPLTGAHRFSAPNTTLNHLALAPGRGTLYVGAVNRLFQLSPELQLEAVAVTGPVIDSPDCVPFRDPAECPQAQLTDNANQLLLVSSRAQELVACGQVRQGVCETRRLGDVAEVLYQAEDPGDGQFVAANTPGVATVGLVVPLPGRDLLLVARGLAGKLSAGVPPLAIRQLAGSQPFSSEGLGRLVVGDFSDYNNSYVGAFADARSAYFVFRRRGARAQAEYRSYVARVCLGDTNLYSYVEVPLACQGQGLIQAAFLAPGTLLGVFAAGPRGTQAALCAFPMVELGASMEQARRLCYTAGGRGPSGAEEATVEYGVTSRCVTLPLDSPESYPCGDEHTPSPIAGRQPLEVQPLLKLGQPVSAVAALQADGHMIAFLGDTQGQLYKVFLHGSQGQVYHSQQVGPPGSAISPDLLLDSSGSHLYVLTAHQVDRIPVAACPQFPDCASCLQAQDPLCGWCVLQGRCTRKGQCGRAGQLNQWLWSYEEDSHCLHIQSLLPGHHPRQEQGQVTLSVPRLPILDADEYFHCAFGDYDSLAHVEGPHVACVTPPQDQVPLNPPGTDHVTVPLALMFEDVTVAATNFSFYDCSAVQALEAAAPCRACVGSIWRCHWCPQSSHCVYGEHCPEGERTIYSAQEVDIQVRGPGACPQVEGLAGPHLVPVGWESHLALRVRNLQHFRGLPASFHCWLELPGELRGLPATLEETAGDSGLIHCQAHQFYPSMSQRELPVPIYVTQGEAQRLDNTHALYVILYDCAMGHPDCSHCQAANRSLGCLWCADGQPACRYGPLCPPGAVELLCPAPSIDAVEPLTGPPEGGLALTILGSNLGRAFADVQYAVSVASRPCNPEPSLYRTSARIVCVTSPAPNGTTGPVRVAIKSQPPGISSQHFTYQDPVLLSLSPRWGPQAGGTQLTIRGQHLQTGGNTSAFVGGQPCPILEPVCPEAIVCRTRPQAAPGEAAVLVVFGHAQRTLLASPFRYTANPQLVAAEPSASFRGGGRLIRVRGTGLDVVQRPLLSVWLEADAEVQASRAQPQDPQPRRSCGAPAADPQACIQLGGGLLQCSTVCSVNSSSLLLCRSPAVPDRAHPQRVFFTLDNVQVDFASASGGQGFLYQPNPRLAPLSREGPARPYRLKPGHVLDVEGEGLNLGISKEEVRVHIGRGECLVKTLTRTHLYCEPPAHAPQPANGSGLPQFVVQMGNVQLALGPVQYEAEPPLSAFPVEAQAGVGMGAAVLIAAVLLLTLMYRHKSKQALRDYQKVLVQLESLETGVGDQCRKEFTDLMTEMTDLSSDLEGSGIPFLDYRTYAERAFFPGHGGCPLQPKPEGPGEDGHCATVRQGLTQLSNLLNSKLFLLTLIHTLEEQPSFSQRDRCHVASLLSLALHGKLEYLTDIMRTLLGDLAAHYVHRNPKLMLRRTETMVEKLLTNWLSICLYAFLREVAGEPLYMLFRAIQYQVDKGPVDAVTGKAKRTLNDSRLLREDVEFQPLTLMVLVGPGAGGAAGSSEMQRVPARVLDTDTITQVKEKVLDQVYKGTPFSQRPSVHALDLEWRSGLAGHLTLSDEDLTSVTQNHWKRLNTLQHYKVPDGATVGLVPQLHRGSTISQSLAQRCPLGENIPTLEDGEEGGVCLWHLVKATEEPEGAKVRCSSLREREPARAKAIPEIYLTRLLSMKGTLQKFVDDTFQAILSVNRPIPIAVKYLFDLLDELAEKHGIEDPGTLHIWKTNRCLSCCPTPAVHMVTESQRDQDIPRVDAPTWGFWNLQEDLGPRSPRPPGQLPAAPGSECVASRLEYMGRRSRWQARASRPRLPCAPSLLLRFWVNALKNPQLIFDVRVSDNVDAILAVIAQTFIDSCTTSEHKVGRDSPVNKLLYAREIPRYKQMVERYYADIRQSSPASYQEMNSALAELSGEAWPGGCACPHVGGKTSRAEGGDLGLEDQAGTSLPPSTWCPQNYTSAPHCLEALQELYNHIHRYYDQIISALEEDPVGQKLQLACRLQQVAALVENKVTDL

SEQ ID NO: 844863 - protein, 1827 aa, Homo sapiens
MCHAAQETPLLHHFMAPVMARWPPFGLCLLLLLLSPPPLPLTGAHRFSAPNTTLNHLALAPGRGTLYVGAVNRLFQLSPELQLEAVAVTGPVIDSPDCVPFRDPAECPQAQLTDNANQLLLVSSRAQELVACGQVRQGVCETRRLGDVAEVLYQAEDPGDGQFVAANTPGVATVGLVVPLPGRDLLLVARGLAGKLSAGVPPLAIRQLAGSQPFSSEGLGRLVVGDFSDYNNSYVGAFADARSAYFVFRRRGARAQAEYRSYVARVCLGDTNLYSYVEVPLACQGQGLIQAAFLAPGTLLGVFAAGPRGTQAALCAFPMVELGASMEQARRLCYTAGGRGPSGAEEATVEYGVTSRCVTLPLDSPESYPCGDEHTPSPIAGRQPLEVQPLLKLGQPVSAVAALQADGHMIAFLGDTQGQLYKVFLHGSQGQVYHSQQVGPPGSAISPDLLLDSSGSHLYVLTAHQVDRIPVAACPQFPDCASCLQAQDPLCGWCVLQGRCTRKGQCGRAGQLNQWLWSYEEDSHCLHIQSLLPGHHPRQEQGQVTLSVPRLPILDADEYFHCAFGDYDSLAHVEGPHVACVTPPQDQVPLNPPGTDHVTVPLALMFEDVTVAATNFSFYDCSAVQALEAAAPCRACVGSIWRCHWCPQSSHCVYGEHCPEGERTIYSAQEVDIQVRGPGACPQVEGLAGPHLVPVGWESHLALRVRNLQHFRGLPASFHCWLELPGELRGLPATLEETAGDSGLIHCQAHQFYPSMSQRELPVPIYVTQGEAQRLDNTHALYVILYDCAMGHPDCSHCQAANRSLGCLWCADGQPACRYGPLCPPGAVELLCPAPSIDAVEPLTGPPEGGLALTILGSNLGRAFADVQYAVSVASRPCNPEPSLYRTSARIVCVTSPAPNGTTGPVRVAIKSQPPGISSQHFTYQDPVLLSLSPRWGPQAGGTQLTIRGQHLQTGGNTSAFVGGQPCPILEPVCPEAIVCRTRPQAAPGEAAVLVVFGHAQRTLLASPFRYTANPQLVAAEPSASFRGGGRLIRVRGTGLDVVQRPLLSVWLEADAEVQASRAQPQDPQPRRSCGAPAADPQACIQLGGGLLQCSTVCSVNSSSLLLCRSPAVPDRAHPQRVFFTLDNVQVDFASASGGQGFLYQPNPRLAPLSREGPARPYRLKPGHVLDVEGEGLNLGISKEEVRVHIGRGECLVKTLTRTHLYCEPPAHAPQPANGSGLPQFVVQMGNVQLALGPVQYEAEPPLSAFPVEAQAGVGMGAAVLIAAVLLLTLMYRHKSKQALRDYQKVLVQLESLETGVGDQCRKEFTDLMTEMTDLSSDLEGSGIPFLDYRTYAERAFFPGHGGCPLQPKPEGPGEDGHCATVRQGLTQLSNLLNSKLFLLTLIHTLEEQPSFSQRDRCHVASLLSLALHGKLEYLTDIMRTLLGDLAAHYVHRNPKLMLRRTETMVEKLLTNWLSICLYAFLREVAGEPLYMLFRAIQYQVDKGPVDAVTEWRSGLAGHLTLSDEDLTSVTQNHWKRLNTLQHYKVPDGATVGLVPQLHRGSTISQSLAQRCPLGENIPTLEDGEEGGVCLWHLVKATEEPEGAKVRCSSLREREPARAKAIPEIYLTRLLSMKGTLQKFVDDTFQAILSVNRPIPIAVKYLFDLLDELAEKHGIEDPGTLHIWKTNSLLLRFWVNALKNPQLIFDVRVSDNVDAILAVIAQTFIDSCTTSEHKVGRDSPVNKLLYAREIPRYKQMVERYYADIRQSSPASYQEMNSALAELSGNYTSAPHCLEALQELYNHIHRYYDQIISALEEDPVGQKLQLACRLQQVAALVENKVTDL

SEQ ID NO: 844864 - protein, 1659 aa, Homo sapiens
MCHAAQETPLLHHFMAPVMARWPPFGLCLLLLLLSPPPLPLTGAHRFSAPNTTLNHLALAPGRGTLYVGAVNRLFQLSPELQLEAVAVTGPVIDSPDCVPFRDPAECPQAQLTDNANQLLLVSSRAQELVACGQVRQGVCETRRLGDVAEVLYQAEDPGDGQFVAANTPGVATVGLVVPLPGRDLLLVARGLAGKLSAGVPPLAIRQLAGSQPFSSEGLGRLVVGDFSDYNNSYVGAFADARSAYFVFRRRGARAQAEYRSYVARVCLGDTNLYSYVEVPLACQGQGLIQAAFLAPGTLLGVFAAGPRGTQAALCAFPMVELGASMEQARRLCYTAGGRGPSGAEEATVEYGVTSRCVTLPLDSPESYPCGDEHTPSPIAGRQPLEVQPLLKLGQPVSAVAALQADGHMIAFLGDTQGQLYKVFLHGSQGQVYHSQQVGPPGSAISPDLLLDSSGSHLYVLTAHQVDRIPVAACPQFPDCASCLQAQDPLCGWCVLQGRCTRKGQCGRAGQLNQWLWSYEEDSHCLHIQSLLPGHHPRQEQGQVTLSVPRLPILDADEYFHCAFGDYDSLAHVEGPHVACVTPPQDQVPLNPPGTDHVTVPLALMFEDVTVAATNFSFYDCSAVQALEAAAPCRACVGSIWRCHWCPQSSHCVYGEHCPEGERTIYSAQEVDIQVRGPGACPQVEGLAGPHLVPVGWESHLALRVRNLQHFRGLPASFHCWLELPGELRGLPATLEETAGDSGLIHCQAHQFYPSMSQRELPVPIYVTQGEAQRLDNTHALYVILYDCAMGHPDCSHCQAANRSLGCLWCADGQPACRYGPLCPPGAVELLCPAPSIDAVEPLTGPPEGGLALTILGSNLGRAFADVQYAVSVASRPCNPEPSLYRTSARIVCVTSPAPNGTTGPVRVAIKSQPPGISSQHFTYQDPVLLSLSPRWGPQAGGTQLTIRGQHLQTGGNTSAFVGGQPCPILEPVCPEAIVCRTRPQAAPGEAAVLVVFGHAQRTLLASPFRYTANPQLVAAEPSASFRGGGRLIRVRGTGLDVVQRPLLSVWLEADAEVQASRAQPQDPQPRRSCGAPAADPQACIQLGGGLLQCSTVCSVNSSSLLLCRSPAVPDRAHPQRVFFTLDNVQVDFASASGGQGFLYQPNPRLAPLSREGPARPYRLKPGHVLDVEGEGLNLGISKEEVRVHIGRGECLVKTLTRTHLYCEPPAHAPQPANGSGLPQFVVQMGNVQLALGPVQYEAEPPLSAFPVEAQAGVGMGAAVLIAAVLLLTLMYRHKSKQALRDYQKVLVQLESLETGVGDQCRKEFTDLMTEMTDLSSDLEGSGIPFLDYRTYAERAFFPGHGGCPLQPKPEGPGEDGHCATVRQGLTQLSNLLNSKLFLLTLIHTLEEQPSFSQRDRCHVASLLSLALHGKLEYLTDIMRTLLGDLAAHYVHRNPKLMLRRTETMVEKLLTNWLSICLYAFLREVAGEPLYMLFRAIQYQVDKGPVDAVTGKAKRTLNDSRLLREDVEFQPLTLMVLVGPGAGGAAGSSEMQRVPARVLDTDTITQVKEKVLDQVYKGTPFSQRPSVHALDLEWRSGLAGHLTLSDEDLTSVTQNHWKRLNTLQHYKVPDGATVGLVPQLHRGSTISQSLAQRCPLGESESLGPDLGPLESRLGR

SEQ ID NO: 844865 - protein, 82 aa, Homo sapiens
VKVRYLFKFTVLAVAACYSLHAASVMVENPALGKATTAWQERTQATCWLLQNTTHILEKSCSQDEWVGKRQEYLGLRVIIQF

SEQ ID NO: 844866 - protein, 863 aa, Homo sapiens
MSSPASTPSRRGSRRGRATPAQTPRSEDARSSPSQRRRGEDSTSTGELQPMPTSPGVDLQSPAAQDVLFSSPPQMHSSAIPLDFDVSSPLTYGTPSSRVEGTPRSGVRGTPVRQRPDLGSAQKGLQVDLQSDGAAAEDIVASEQSLGQKLVIWGTDVNVAACKENFQRFLQRFIDPLAKEEENVGIDITEPLYMQRLGEINVIGEPFLNVNCEHIKSFDKNLYRQLISYPQEVIPTFDMAVNEIFFDRYPDSILEHQIQVRPFNALKTKNMRNLNPEDIDQLITISGMVIRTSQLIPEMQEAFFQCQVCAHTTRVEMDRGRIAEPSVCGRCHTTHSMALIHNRSLFSDKQMIKLQESPEDMPAGQTPHTVILFAHNDLVDKVQPGDRVNVTGIYRAVPIRVNPRVSNVKSVYKTHIDVIHYRKTDAKRLHGLDEEAEQKLFSEKRVELLKELSRKPDIYERLASALAPSIYEHEDIKKGILLQLFGGTRKDFSHTGRGKFRAEINILLCGDPGTSKSQLLQYVYNLVPRGQYTSGKGSSAVGLTAYVMKDPETRQLVLQTGALVLSDNGICCIDEFDKMNESTRSVLHEVMEQQTLSIAKAGIICQLNARTSVLAAANPIESQWNPKKTTIENIQLPHTLLSRFDLIFLMLDPQDEAYDRRLAHHLVALYYQSEEQAEEELLDMAVLKDYIAYAHSTIMPRLSEEASQALIEAYVDMRKIGSSRGMVSAYPRQLESLIRLAEAHAKVRLSNKVEAIDVEEAKRLHREALKQSATDPRTGIVDISILTTGMSATSRKRKEELAEALKKLILSKGKTPALKYQQLFEDIRGQSDIAITKDMFEEALRALADDDFLTVTGKTVRLL

SEQ ID NO: 844867 - protein, 863 aa, Homo sapiens; identical to SEQ ID NO: 844866

SEQ ID NO: 844868 - protein, 863 aa, Homo sapiens; identical to SEQ ID NO: 844866

SEQ ID NO: 844869 - protein, 846 aa, Homo sapiens
LFCVTQARSEDARSSPSQRRRGEDSTSTGELQPMPTSPGVDLQSPAAQDVLFSSPPQMHSSAIPLDFDVSSPLTYGTPSSRVEGTPRSGVRGTPVRQRPDLGSAQKGLQVDLQSDGAAAEDIVASEQSLGQKLVIWGTDVNVAACKENFQRFLQRFIDPLAKEEENVGIDITEPLYMQRLGEINVIGEPFLNVNCEHIKSFDKNLYRQLISYPQEVIPTFDMAVNEIFFDRYPDSILEHQIQVRPFNALKTKNMRNLNPEDIDQLITISGMVIRTSQLIPEMQEAFFQCQVCAHTTRVEMDRGRIAEPSVCGRCHTTHSMALIHNRSLFSDKQMIKLQESPEDMPAGQTPHTVILFAHNDLVDKVQPGDRVNVTGIYRAVPIRVNPRVSNVKSVYKTHIDVIHYRKTDAKRLHGLDEEAEQKLFSEKRVELLKELSRKPDIYERLASALAPSIYEHEDIKKGILLQLFGGTRKDFSHTGRGKFRAEINILLCGDPGTSKSQLLQYVYNLVPRGQYTSGKGSSAVGLTAYVMKDPETRQLVLQTGALVLSDNGICCIDEFDKMNESTRSVLHEVMEQQTLSIAKAGIICQLNARTSVLAAANPIESQWNPKKTTIENIQLPHTLLSRFDLIFLMLDPQDEAYDRRLAHHLVALYYQSEEQAEEELLDMAVLKDYIAYAHSTIMPRLSEEASQALIEAYVDMRKIGSSRGMVSAYPRQLESLIRLAEAHAKVRLSNKVEAIDVEEAKRLHREALKQSATDPRTGIVDISILTTGMSATSRKRKEELAEALKKLILSKGKTPALKYQQLFEDIRGQSDIAITKDMFEEALRALADDDFLTVTGKTVRLL

SEQ ID NO: 844870 - protein, 863 aa, Homo sapiens; identical to SEQ ID NO: 844866

SEQ ID NO: 844871 - protein, 913 aa, Homo sapiens
MSSPASTPSRRGSRRGRATPAQTPRSEDARSSPSQRRRGEDSTSTGELQPMPTSPGVDLQSPAAQDVLFSSPPQMHSSAIPLDFDVSSPLTYGTPSSRVEGTPRSGVRGTPVRQRPDLGSAQKGLQVDLQSDGAAAEDIVASEQSLGQKLVIWGTDVNVAACKENFQRFLQRFIDPLAKEEENVGIDITEPLYMQRLGEINVIGEPFLNVNCEHIKSFDKNLYRQLISYPQEVIPTFDMAVNEIFFDRYPDSILEHQIQVRPFNALKTKNMRNLNPEDIDQLITISGMVIRTSQLIPEMQEAFFQCQVCAHTTRVEMDRGRIAEPSVCGRCHTTHSMALIHNRSLFSDKQMIKLQESPEDMPAGQTPHTVILFAHNDLVDKVQPGDRVNVTGIYRAVPIRVNPRVSNVKSVYKTHIDVIHYRKTDAKRLHGLDEEAEQKLFSEKRVELLKELSRKPDIYERLASALAPSIYEHEDIKKGILLQLFGGTRKDFSHTGRGKFRAEINILLCGDPGTSKSQLLQYVYNLVPRGQYTSGKGSSAVGLTAYVMKDPETRQLVLQTGALVLSDNGICCIDEFDKMNESTRSVLHEVMEQQTLSIAKGVTFCLYCCTSLEFVLKLLQGACFLEKDVVIAHIHLNSVLGMNLRTGLIQAGIICQLNARTSVLAAANPIESQWNPKKTTIENIQLPHTLLSRFDLIFLMLDPQDEAYDRRLAHHLVALYYQSEEQAEEELLDMAVLKDYIAYAHSTIMPRLSEEASQALIEAYVDMRKIGSSRGMVSAYPRQLESLIRLAEAHAKVRLSNKVEAIDVEEAKRLHREALKQSATDPRTGIVDISILTTGMSATSRKRKEELAEALKKLILSKGKTPALKYQQLFEDIRGQSDIAITKDMFEEALRALADDDFLTVTGKTVRLL

SEQ ID NO: 844872 - protein, 845 aa, Homo sapiens
MSSPASTPSRRGSRRGRATPAQTPRSEDARSSPSQRRRGEDSTSTGELQPMPTSPGVDLQSPAAQDVLFSSPPQMHSSAIPLDFDVSSPLTYGTPSSRVEGTPRSGVRGTPVRQRPDLGSAQKGLQVDLQSDGAAAEDIVASEQSLGQKLVIWGTDVNVAACKENFQRFLQRFIDPLAKEEENVGIDITEPLYMQRLGEINVIGEPFLNVNCEHIKSFDKNLYRQLISYPQEVIPTFDMAVNEIFFDRYPDSILEHQIQVRPFNALKTKNMRNLNPEDIDQLITISGMVIRTSQLIPEMQEAFFQCQVCAHTTRVEMDRGRIAEPSVCGRCHTTHSMALIHNRSLFSDKQMIKLQESPEDMPAGQTPHTVILFAHNDLVDKVQPGDRVNVTGIYRAVPIRVNPRVSNVKSVYKTHIDVIHYRKTDAKRLHGLDEEAEQKLFSEKRVELLKELSRKPDIYERLASALAPSIYEHEDIKKGILLQLFGGTRKDFSHTGRGKFRAEINILLCGDPGTSKSQLLQYVYNLVPRGQYTSGKGSSAVGLTAYVMKDPETRQLVLQTGALVLSDNGICCIDEFDKMNESTRSVLHEVMEQQTLSIAKAGIICQLNARTSVLAAANPIESQWNPKKTTIVLDPQDEAYDRRLAHHLVALYYQSEEQAEEELLDMAVLKDYIAYAHSTIMPRLSEEASQALIEAYVDMRKIGSSRGMVSAYPRQLESLIRLAEAHAKVRLSNKVEAIDVEEAKRLHREALKQSATDPRTGIVDISILTTGMSATSRKRKEELAEALKKLILSKGKTPALKYQQLFEDIRGQSDIAITKDMFEEALRALADDDFLTVTGKTVRLL

SEQ ID NO: 844873 - protein, 670 aa, Homo sapiens
MQRLGEINVIGEPFLNVNCEHIKSFDKNLYRQLISYPQEVIPTFDMAVNEIFFDRYPDSILEHQIQVRPFNALKTKNMRNLNPEDIDQLITISGMVIRTSQLIPEMQEAFFQCQVCAHTTRVEMDRGRIAEPSVCGRCHTTHSMALIHNRSLFSDKQMIKLQESPEDMPAGQTPHTVILFAHNDLVDKVQPGDRVNVTGIYRAVPIRVNPRVSNVKSVYKTHIDVIHYRKTDAKRLHGLDEEAEQKLFSEKRVELLKELSRKPDIYERLASALAPSIYEHEDIKKGILLQLFGGTRKDFSHTGRGKFRAEINILLCGDPGTSKSQLLQYVYNLVPRGQYTSGKGSSAVGLTAYVMKDPETRQLVLQTGALVLSDNGICCIDEFDKMNESTRSVLHEVMEQQTLSIAKAGIICQLNARTSVLAAANPIESQWNPKKTTIENIQLPHTLLSRFDLIFLMLDPQDEAYDRRLAHHLVALYYQSEEQAEEELLDMAVLKDYIAYAHSTIMPRLSEEASQALIEAYVDMRKIGSSRGMVSAYPRQLESLIRLAEAHAKVRLSNKVEAIDVEEAKRLHREALKQSATDPRTGIVDISILTTGMSATSRKRKEELAEALKKLILSKGKTPALKYQQLFEDIRGQSDIAITKDMFEEALRALADDDFLTVTGKTVRLL

SEQ ID NO: 844874 - protein, 819 aa, Homo sapiens
MSSPASTPSRRGSRRGRATPAQTPRSEDARSSPSQRRRGEDSTSTGELQPMPTSPGVDLQSPAAQDVLFSSPPQMHSSAIPLDFDVSSPLTYGTPSSRVEGTPRSGVRGTPVRQRPDLGSAQKGLQVDLQSDGAAAEDIVASEQSLGQKLVIWGTDVNVAACKENFQRFLQRFIDPLAKEEENVGIDITEPLYMQRLGEINVIGEPFLNVNCEHIKSFDKNLYRQLISYPQEVIPTFDMAVNEIFFDRYPDSILEHQIQVRPFNALKTKNMRNLNPEDIDQLITISGMVIRTSQLIPEMQEAFFQCQIKLQESPEDMPAGQTPHTVILFAHNDLVDKVQPGDRVNVTGIYRAVPIRVNPRVSNVKSVYKTHIDVIHYRKTDAKRLHGLDEEAEQKLFSEKRVELLKELSRKPDIYERLASALAPSIYEHEDIKKGILLQLFGGTRKDFSHTGRGKFRAEINILLCGDPGTSKSQLLQYVYNLVPRGQYTSGKGSSAVGLTAYVMKDPETRQLVLQTGALVLSDNGICCIDEFDKMNESTRSVLHEVMEQQTLSIAKAGIICQLNARTSVLAAANPIESQWNPKKTTIENIQLPHTLLSRFDLIFLMLDPQDEAYDRRLAHHLVALYYQSEEQAEEELLDMAVLKDYIAYAHSTIMPRLSEEASQALIEAYVDMRKIGSSRGMVSAYPRQLESLIRLAEAHAKVRLSNKVEAIDVEEAKRLHREALKQSATDPRTGIVDISILTTGMSATSRKRKEELAEALKKLILSKGKTPALKYQQLFEDIRGQSDIAITKDMFEEALRALADDDFLTVTGKTVRLL

SEQ ID NO: 844875 - protein, 527 aa, Homo sapiens [sequence omitted]

SEQ ID NO: 844876 - protein, 740 aa, Homo sapiens
MSSPASTPSRRGSRRGRATPAQTPRSEDARSSPSQRRRGEDSTSTGELQPMPTSPGVDLQSPAAQDVLFSSPPQMHSSAIPLDFDVSSPLTYGTPSSRVEGTPRSGVRGTPVRQRPDLGSAQKGLQVDLQSDGAAAEDIVASEQSLGQKLVIWGTDVNVAACKENFQRFLQRFIDPLAKEEENVGIDITEPLYMQRLGEINVIGEPFLNVNCEHIKSFDKNLYRQLISYPQEVIPTFDMAVNEIFFDRYPDSILEHQIQVRPFNALKTKNMRNLNPEDIDQLITISGMVIRTSQLIPEMQEAFFQCQVCAHTTRVEMDRGRIAEPSVCGRCHTTHSMALIHNRSLFSDKQMIKLQESPEDMPAGQTPHTVILFAHNDLVDKVQPGDRVNVTGIYRAVPIRVNPRVSNVKSVYKTHIDVIHYRKTDAKRLHGLDEEAEQKLFSEKRVELLKELSRKPDIYERLASALAPSIYEHEDIKKGILLQLFGGTRKDFSHTGRGKFRAEINILLCGDPGTSKSQLLQYVYNLVPRGQYTSGKGSSAVGLTAYVMKDPETRQLVLQTGALVLSDNGICCIDEFDKMNESTRSVLHEVMEQQTLSIAKAGIICQLNARTSVLAAANPIESQWNPKKTTIENIQLPHTLLSRFDLIFLMLDPQDEAYDRRLAHHLVALYYQSEEQAEEELLDMAVLKDYIAYAHSTIMPRLSEEASQALIEAHAGPSGRNLYKRLAHPPVAQYYTERGR

SEQ ID NO: 844877 - protein, 543 aa, Homo sapiens
MSSPASTPSRRGSRRGRATPAQTPRSEDARSSPSQRRRGEDSTSTGELQPMPTSPGVDLQSPAAQDVLFSSPPQMHSSAIPLDFDVSSPLTYGTPSSRVEGTPRSGVRGTPVRQRPDLGSAQKGLQVDLQSDGAAAEDIVASEQSLGQKLVIWGTDVNVAACKENFQRFLQRFIDPLAKEEENVGIDITEPLYMQRLGEINVIGEPFLNVNCEHIKSFDKNLYRQLISYPQEVIPTFDMAVNEIFFDRYPDSILEHQIQVRPFNALKTKNMRNLNPEDIDQLITISGMVIRTSQLIPEMQEAFFQCQVCAHTTRVEMDRGRIAEPSVCGRCHTTHSMALIHNRSLFSDKQMIKLQESPEDMPAGQTPHTVILFAHNDLVDKVQPGDRVNVTGIYRAVPIRVNPRVSNVKSVYKTHIDVIHYRKTDAKRLHGLDEEAEQKLFSEKRVELLKELSRKPDIYERLASALAPSIYEHEDIKKLERIFTHRAHFGCPKYFGRGPRARHLGHTGAGGKLLELRIKLLAVIGNPWYPASSHGELSVYTMY

SEQ ID NO: 844878 - protein, 442 aa, Homo sapiens
MSSPASTPSRRGSRRGRATPAQTPRSEDARSSPSQRRRGEDSTSTGELQPMPTSPGVDLQSPAAQDVLFSSPPQMHSSAIPLDFDVSSPLTYGTPSSRVEGTPRSGVRGTPVRQRPDLGSAQKGLQVDLQSDGAAAEDIVASEQSLGQKLVIWGTDVNVAACKENFQRFLQRFIDPLAKEEENVGIDITEPLYMQRLGEINVIGEPFLNVNCEHIKSFDKNLYRQLISYPQEVIPTFDMAVNEIFFDRYPDSILEHQIQVRPFNALKTKNMRNLNPEDIDQLITISGMVIRTSQLIPEMQEAFFQCQVCAHTTRVEMDRGRIAEPSVCGRCHTTHSMALIHNRSLFSDKQMVRSHPGPPGYALPVCILKRPTITCPSDPEPHFPNGIHPSLVLWVSLVAYGLNMQSTQSPCFRALSLCCCQWHCLLLETLYFHGLKCFKRLR

SEQ ID NO: 844879 - protein, 863 aa, Homo sapiens; identical to SEQ ID NO: 844866

SEQ ID NO: 844880 - protein, 863 aa, Homo sapiens; identical to SEQ ID NO: 844866

SEQ ID NO: 844881 - protein, 863 aa, Homo sapiens; identical to SEQ ID NO: 844866

SEQ ID NO: 844882 - protein, 863 aa, Homo sapiens; identical to SEQ ID NO: 844866

SEQ ID NO: 844883 - protein, 863 aa, Homo sapiens; identical to SEQ ID NO: 844866

SEQ ID NO: 844884 - protein, 863 aa, Homo sapiens; identical to SEQ ID NO: 844866

SEQ ID NO: 844885 - protein, 863 aa, Homo sapiens; identical to SEQ ID NO: 844866

SEQ ID NO: 844886 - protein, 670 aa, Homo sapiens; identical to SEQ ID NO: 844873

SEQ ID NO: 844887 - protein, 657 aa, Homo sapiens
MSSPASTPSRRGSRRGRATPAQTPRSEDARSSPSQRRRGEDSTSTGELQPMPTSPGVDLQSPAAQDVLFSSPPQMHSSAIPLDFDVSSPLTYGTPSSRVEGTPRSGVRGTPVRQRPDLGSAQKGLQVDLQSDGAAAEDIVASEQSLGQKLVIWGTDVNVAACKENFQRFLQRFIDPLAKEEENVGIDITEPLYMQRLGEINVIGEPFLNVNCEHIKSFDKNLYRQLISYPQEVIPTFDMAVNEIFFDRYPDSILEHQIQVRPFNALKTKNMRNLNPEDIDQLITISGMVIRTSQLIPEMQEAFFQCQVCAHTTRVEMDRGRIAEPSVCGRCHTTHSMALIHNRSLFSDKQMIKLQESPEDMPAGQTPHTVILFAHNDLVDKVQPGDRVNVTGIYRAVPIRVNPRVSNVKSVYKTHIDVIHYRKTDAKRLHGLDEEAEQKLFSEKRVELLKELSRKPDIYERLASALAPSIYEHEDIKKGILLQLFGGTRKDFSHTGRGKFRAEINILLCGDPGTSKSQLLQYVYNLVPRGQYTSGKGSSAVGLTAYVMKDPETRQLVLQTGALVLSDNGICCIDEFDKMNESTRSVLHEVMEQQTLSIAKAGIICQLNARTSVLAAANPIESQWNPKKTTIENIQLPHTLLSRLAVAGEWFLHTLDS

SEQ ID NO: 844888 - protein, 853 aa, Homo sapiens
MSSPASTPSRRGSRRGRATPAQTPRSEDARSSPSQRRRGEDSTSTGELQPMPTSPGVDLQSPAAQDVLFSSPPQMHSSAIPLDFDVSSPLTYGTPSSRVEGTPRSGVRGTPVRQRPDLGSAQKGLQVDLQSDGAAAEDIVASEQSLGQKLVIWGTDVNVAACKENFQRFLQRFIDPLAKEEENVGIDITEPLYMQRLGEINVIGEPFLNVNCEHIKSFDKNLYRQLISYPQEVIPTFDMAVNEIFFDRYPDSILEHQIQVRPFNALKTKNMRNLNPEDIDQLITISGMVIRTSQLIPEMQEAFFQCQVCAHTTRVEMDRGRIAEPSVCGRCHTTHSMALIHNRSLFSDKQMIKLQESPEDMPAGQTPHTVILFAHNDLVDKVQPGDRVNVTGIYRAVPIRVNPRVSNVKSVYKTHIDVIHYRKTDAKRLHGLDEEAEQKLFSEKRVELLKELSRKPDIYERLASALAPSIYEHEDIKKGILLQLFGGTRKDFSHTGRGKFRAEINILLCGDPGTSKSQLLQYVYNLVPRGQYTSGKGSSAVGLTAYVMKDPETRQLVLQTGALVLSDNGICCIDEFDKMNESTRSVLHEVMEQQTLSIAKAGIICQLNARTSVLAAANPIESQWNPKKTTIENIQLPHTLLSRFDLIFLMLDPQDEAYDRRLAHHLVALYYQSEEQAEEELLDMAVLKDYIAYAHSTIMPRLSEEASQALIEAYVDMRKIGSSRGMVSAYPRQLESLIRLAEAHAKVRLSNKVEAIDVEEAKRLHREALKQSATDPRTGIVDISILTTGMSATSRKRKEELAEALKKLILSKGKTPCNPSTLGGQCGWIMRSGVQDQPSQDGETPSLVKITKN

SEQ ID NO: 844889 - protein, 394 aa, Homo sapiens
MSSPASTPSRRGSRRGRATPAQTPRSEDARSSPSQRRRGEDSTSTGELQPMPTSPGVDLQSPAAQDVLFSSPPQMHSSAIPLDFDVSSPLTYGTPSSRVEGTPRSGVRGTPVRQRPDLGSAQKGLQVDLQSDGAAAEDIVASEQSLGQKLVIWGTDVNVAACKENFQRFLQRFIDPLAKEEENVGIDITEPLYMQRLGEINVIGEPFLNVNCEHIKSFDKNLYRQLISYPQEVIPTFDMAVNEIFFDRYPDSILEHQIQVRPFNALKTKNMRNLNPEDIDQLITISGMVIRTSQLIPEMQEAFFQCQVCAHTTRVEMDRGRIAEPSVCGRCHTTHSMALIHNRSLFSDKQMIKLQESPEDMPAGQTPHTVILFAHNDLVDKVQPGDRVNVTGLI

SEQ ID NO: 844890 - protein, 761 aa, Homo sapiens
MSSPASTPSRRGSRRGRATPAQTPRSEDARSSPSQRRRGEDSTSTGELQPMPTSPGVDLQSPAAQDVLFSSPPQMHSSAIPLDFDVSSPLTYGTPSSRVEGTPRSGVRGTPVRQRPDLGSAQKGLQVDLQSDGAAAEDIVASEQSLGQKLVIWGTDVNVAACKENFQRFLQRFIDPLAKEEENVGIDITEPLYMQRLGEINVIGEPFLNVNCEHIKSFDKNLYRQLISYPQEVIPTFDMAVNEIFFDRYPDSILEHQIQVRPFNALKTKNMRNLNPEDIDQLITISGMVIRTSQLIPEMQEAFFQCQVCAHTTRVEMDRGRIAEPSVCGRCHTTHSMALIHNRSLFSDKQMIKLQESPEDMPAGQTPHTVILFAHNDLVDKVQPGDRVNVTGIYRAVPIRVNPRVSNVKSVYKTHIDVIHYRKTDAKRLHGLDEEAEQKLFSEKRVELLKELSRKPDIYERLASALAPSIYEHEDIKKGILLQLFGGTRKDFSHTGRGKFRAEINILLCGDPGTSKSQLLQYVYNLVPRGQYTSGKGSSAVGLTAYVMKDPETRQLVLQTGALVLSDNGICCIDEFDKMNESTRSVLHEVMEQQTLSIAKAGIICQLNARTSVLAAANPIESQWNPKKTTIENIQLPHTLLSRFDLIFLMLDPQDEAYDRRLAHHLVALYYQSEEQAEEELLDMAVLKDYIAYAHSTIMPRLSEEASQALIEAYVDMRKIGSSRGMVSAYPRQLESLIRLAEAHAKVRLSNKVPLKPCGIL

SEQ ID NO: 844891 - protein, 350 aa, Homo sapiens
MSSPASTPSRRGSRRGRATPAQTPRSEDARSSPSQRRRGEDSTSTGELQPMPTSPGVDLQSPAAQDVLFSSPPQMHSSAIPLDFDVSSPLTYGTPSSRVEGTPRSGVRGTPVRQRPDLGSAQKGLQVDLQSDGAAAEDIVASEQSLGQKLVIWGTDVNVAACKENFQRFLQRFIDPLAKEEENVGIDITEPLYMQRLGEINVIGEPFLNVNCEHIKSFDKNLYRQLISYPQEVIPTFDMAVNEIFFDRYPDSILEHQIQVRPFNALKTKNMRNLNPEDIDQLITISGMVIRTSQLIPEMQEAFFQCQIKLQESPEDMPAGQTPHTVILFAHNDLVDKVQPGDRVNVTGLI

SEQ ID NO: 844892 - protein, 184 aa, Homo sapiens
RILAFACSKMAAVSMSVVLRQTLWRRRAVAVAALSVSRVPTRSLRTSTWRLAQDQTQDTQLITVDEKLDITTLTGVPEEHIKTRKVRIFVPARNNMQSGVNNTKKWKMEFDTRERWENPLMGWASTADPLSNMVLTFSTKEDAVSFAEKNGWSYDIEERKVPKPKSKSYGANFSWNKRTRVSTK

SEQ ID NO: 844893 - protein, 184 aa, Homo sapiens; identical to SEQ ID NO: 844892

SEQ ID NO: 844894 - protein, 241 aa, Homo sapiens
RILAFACSKMAAVSMSVVLRQTLWRRRAVAVAALSVSRVPTRSLRTSTWRLAQDQTQDTQLITVDEKLVYLVPLCFTFCGLATPSLELATLFPASRHLEFLFTLPGCILTNPEDFSGHHLPILQMDITTLTGVPEEHIKTRKVRIFVPARNNMQSGVNNTKKWKMEFDTRERWENPLMGWASTADPLSNMVLTFSTKEDAVSFAEKNGWSYDIEERKVPKPKSKSYGANFSWNKRTRVSTK

SEQ ID NO: 844895 - protein, 187 aa, Homo sapiens
PGLQEFGTKQEAAVSIASGTKPTVCRKKPKGLNLPFPFTRFPPRLVEPFPHEVGQGPSLNPHILIPFIENIDITTLTGVPEEHIKTRKVRIFVPARNNMQSGVNNTKKWKMEFDTRERWENPLMGWASTADPLSNMVLTFSTKEDAVSFAEKNGWSYDIEERKVPKPKSKSYGANFSWNKRTRVSTK

SEQ ID NO: 844896 - protein, 117 aa, Homo sapiens
  misc_feature (15)..(15): Xaa can be any naturally occurring amino acid
RGPRLRDPARRPEGXKLKVRIFVPARNNMQSGVNNTKKWKMEFDTRERWENPLMGWASTADPLSNMVLTFSTKEDAVSFAEKNGWSYDIEERKVPKPKSKSYGANFSWNKRTRVSTK

SEQ ID NO: 844897 - protein, 129 aa, Homo sapiens
RILAFACSKMAAVSMSVVLRQTLWRRRAVAVAALSVSRVPTRSLRTSTWRLAQDQTQDTQLITVDEKLDITTLTGVPEEHIKTRKVRIFVPARNNMQSGVNNTKKWKMEFDTRERWENPLMGWASTMEL

SEQ ID NO: 844898 - protein, 166 aa, Homo sapiens
RILAFACSKMAAVSMSVVLRQTLWRRRAVAVAALSVSRVPTRSLRTSTWRLAQDQTQDTQLITVDEKLDITTLTGVPEEHIKTRKVRIFVPARNNMQSGVNNTKKWKMEFDTRERWVTFSTKEDAVSFAEKNGWSYDIEERKVPKPKSKSYGANFSWNKRTRVSTK

SEQ ID NO: 844899 - protein, 188 aa, Homo sapiens
RILAFACSKMAAVSMSVVLRQTLWRRRAVAVAALSVSRVPTRSLRTSTWRLAQDQTQDTQLITVDEKLDITTLTGVPEEHIKTRKVRIFVPARNNMQSGVNNTKKWKMEFDTRERWENPLMGWASTADPLSNMVLTFSTKEDAVSFAEKNGWSYDIEERKVPKPKSKSYGANFSWNKRTRVAVFIVHV

SEQ ID NO: 844900 - protein, 177 aa, Homo sapiens
RILAFACSKMAAVSMSVVLRQTLWRRRAVAVAALSVSRVPTRSLRTSTWRLAQDQTQDTQLITVDEKLDITTLTGVPEEHIKTRKVRIFVPARNNMQSGVNNTKKWKMEFDTRERWENPLMGWASTADPLSNMVLTFSTKEDAVSFAEKNGWSYDIEERKVPPQNRLALTISLLDCE

SEQ ID NO: 844901 - protein, 128 aa, Homo sapiens
GGLNVSGTEADVVAEKGSGCSCPFRFQGSDQVIEFSHFSSSFLGPSIFAESLLAEFRRRPRGRRPLLTLFSGEVGRTRDCLLSMGVGQASEGVSARPGRRTCGFLEAFVFGLSLRERVRGGFASGAAS

SEQ ID NO: 844902 - protein, 1071 aa, Homo sapiens
MPAIMTMLADHAARQLLDFSQKLDINLLDNVVNCLYHGEGAQQRMAQEVLTHLKEHPDAWTRVDTILEFSQNMNTKYYGLQILENVIKTRWKILPRNQCEGIKKYVVGLIIKTSSDPTCVEKEKVYIGKLNMILVQILKQEWPKHWPTFISDIVGASRTSESLCQNNMVILKLLSEEVFDFSSGQITQVKSKHLKDSMCNEFSQIFQLCQFVMENSQNAPLVHATLETLLRFLNWIPLGYIFETKLISTLIYKFLNVPMFRNVSLKCLTEIAGVSVSQYEEQFVTLFTLTMMQLKQMLPLNTNIRLAYSNGKDDEQNFIQNLSLFLCTFLKEHDQLIEKRLNLRETLMEALHYMLLVSEVEETEIFKICLEYWNHLAAELYRESPFSTSASPLLSGSQHFDVPPRRQLYLPMLFKVRLLMVSRMAKPEEVLVVENDQGEVVREFMKDTDSINLYKNMRETLVYLTHLDYVDTERIMTEKLHNQVNGTEWSWKNLNTLCWAIGSISGAMHEEDEKRFLVTVIKDLLGLCEQKRGKDNKAIIASNIMYIVGQYPRFLRAHWKFLKTVVNKLFEFMHETHDGVQDMACDTFIKIAQKCRRHFVQVQVGEVMPFIDEILNNINTIICDLQPQQVHTFYEAVGYMIGAQTDQTVQEHLIEKYMLLPNQVWDSIIQQATKNVDILKDPETVKQLGSILKTNVRACKAVGHPFVIQLGRIYLDMLNVYKCLSENISAAIQANGEMVTKQPLIRSMRTVKRETLKLISGWVSRSNDPQMVAENFVPPLLDAVLIDYQRNVPAAREPEVLSTMAIIVNKLGGHITAEIPQIFDAVFECTLNMINKDFEEYPEHRTNFFLLLQAVNSHCFPAFLAIPPTQFKLVLDSIIWAFKHTMRNVADTGLQILFTLLQNVAQEEAAAQSFYQTYFCDILQHIFSVVTDTSHTAGLTMHASILAYMFNLVEEGKISTSLNPGNPVNNQIFLQEYVANLLKSAFPHLQDAQVKLFVTGLFSLNQDIPAFKEHLRDFLVQIKEFAGEDTSDLFLEEREIALRQADEEKHKRQMSVPGIFNPHEIPEEMCD

SEQ ID NO: 844903 - protein, 1071 aa, Homo sapiens; identical to SEQ ID NO: 844902

SEQ ID NO: 844904 - protein, 1071 aa, Homo sapiens; identical to SEQ ID NO: 844902

SEQ ID NO: 844905 - protein, 1012 aa, Homo sapiens
MAQEVLTHLKEHPDAWTRVDTILEFSQNMNTKYYGLQILENVIKTRWKILPRNQCEGIKKYVVGLIIKTSSDPTCVEILKQEWPKHWPTFISDIVGASRTSESLCQNNMVILKLLSEEVFDFSSGQITQVKSKHLKDSMCNEFSQIFQLCQFVMENSQNAPLVHATLETLLRFLNWIPLGYIFETKLISTLIYKFLNVPMFRNVSLKCLTEIAGVSVSQYEEQFVTLFTLTMMQLKQMLPLNTNIRLAYSNGKDDEQNFIQNLSLFLCTFLKEHDQLIEKRLNLRETLMEALHYMLLVSEVEETEIFKICLEYWNHLAAELYRESPFSTSASPLLSGSQHFDVPPRRQLYLPMLFKVRLLMVSRMAKPEEVLVVENDQGEVVREFMKDTDSINLYKNMRETLVYLTHLDYVDTERIMTEKLHNQVNGTEWSWKNLNTLCWAIGSISGAMHEEDEKRFLVTVIKDLLGLCEQKRGKDNKAIIASNIMYIVGQYPRFLRAHWKFLKTVVNKLFEFMHETHDGVQDMACDTFIKIAQKCRRHFVQVQVGEVMPFIDEILNNINTIICDLQPQQVHTFYEAVGYMIGAQTDQTVQEHLIEKYMLLPNQVWDSIIQQATKNVDILKDPETVKQLGSILKTNVRACKAVGHPFVIQLGRIYLDMLNVYKCLSENISAAIQANGEMVTKQPLIRSMRTVKRETLKLISGWVSRSNDPQMVAENFVPPLLDAVLIDYQRNVPAAREPEVLSTMAIIVNKLGGHITAEIPQIFDAVFECTLNMINKDFEEYPEHRTNFFLLLQAVNSHCFPAFLAIPPTQFKLVLDSIIWAFKHTMRNVADTGLQILFTLLQNVAQEEAAAQSFYQTYFCDILQHIFSVVTDTSHTAGLTMHASILAYMFNLVEEGKISTSLNPGNPVNNQIFLQEYVANLLKSAFPHLQDAQVKLFVTGLFSLNQDIPAFKEHLRDFLVQIKEFAGEDTSDLFLEEREIALRQADEEKHKRQMSVPGIFNPHEIPEEMCD

SEQ ID NO: 844906 - protein, 856 aa, Homo sapiens
SVVSAEVHATLETLLRFLNWIPLGYIFETKLISTLIYKFLNVPMFRNVSLKCLTEIAGVSVSQYEEQFVTLFTLTMMQLKQMLPLNTNIRLAYSNGKDDEQNFIQNLSLFLCTFLKEHDQLIEKRLNLRETLMEALHYMLLVSEVEETEIFKICLEYWNHLAAELYRESPFSTSASPLLSGSQHFDVPPRRQLYLPMLFKVRLLMVSRMAKPEEVLVVENDQGEVVREFMKDTDSINLYKNMRETLVYLTHLDYVDTERIMTEKLHNQVNGTEWSWKNLNTLCWAIGSISGAMHEEDEKRFLVTVIKDLLGLCEQKRGKDNKAIIASNIMYIVGQYPRFLRAHWKFLKTVVNKLFEFMHETHDGVQDMACDTFIKIAQKCRRHFVQVQVGEVMPFIDEILNNINTIICDLQPQQVHTFYEAVGYMIGAQTDQTVQEHLIEKYMLLPNQVWDSIIQQATKNVDILKDPETVKQLGSILKTNVRACKAVGHPFVIQLGRIYLDMLNVYKCLSENISAAIQANGEMVTKQPLIRSMRTVKRETLKLISGWVSRSNDPQMVAENFVPPLLDAVLIDYQRNVPAAREPEVLSTMAIIVNKLGGHITAEIPQIFDAVFECTLNMINKDFEEYPEHRTNFFLLLQAVNSHCFPAFLAIPPTQFKLVLDSIIWAFKHTMRNVADTGLQILFTLLQNVAQEEAAAQSFYQTYFCDILQHIFSVVTDTSHTAGLTMHASILAYMFNLVEEGKISTSLNPGNPVNNQIFLQEYVANLLKSAFPHLQDAQVKLFVTGLFSLNQDIPAFKEHLRDFLVQIKEFAGEDTSDLFLEEREIALRQADEEKHKRQMSVPGIFNPHEIPEEMCD

SEQ ID NO: 844907 - protein, 1071 aa, Homo sapiens; identical to SEQ ID NO: 844902

SEQ ID NO: 844908 - protein, 776 aa, Homo sapiens
MPAIMTMLADHAARQLLDFSQKLDINLLDNVVNCLYHGEGAQQRMAQEVLTHLKEHPDAWTRVDTILEFSQNMNTKYYGLQILENVIKTRWKILPRNQCEGIKKYVVGLIIKTSSDPTCVEKEKVYIGKLNMILVQILKQEWPKHWPTFISDIVGASRTSESLCQNNMVILKLLSEEVFDFSSGQITQVKSKHLKDSMCNEFSQIFQLCQFVMENSQNAPLVHATLETLLRFLNWIPLGYIFETKLISTLIYKFLNVPMFRNVSLKCLTEIAGVSVSQYEEQFVTLFTLTMMQLKQMLPLNTNIRLAYSNGKDDEQNFIQNLSLFLCTFLKEHDQLIEKRLNLRETLMEALHYMLLVSEVEETEIFKICLEYWNHLAAELYRESPFSTSASPLLSGSQHFDVPPRRQLYLPMLFKVRLLMVSRMAKPEEVLVVENDQGEVVREFMKDTDSINLYKNMRETLVYLTHLDYVDTERIMTEKLHNQVNGTEWSWKNLNTLCWAIGSISGAMHEEDEKRFLVTVIKDLLGLCEQKRGKDNKAIIASNIMYIVGQYPRFLRAHWKFLKTVVNKLFEFMHETHDGVQDMACDTFIKIAQKCRRHFVQVQVGEVMPFIDEILNNINTIICDLQPQQVHTFYEAVGYMIGAQTDQTVQEHLIEKYMLLPNQVWDSIIQQATKNVDILKDPETVKQLGSILKTNVRACKAVGHPFVIQLGRIYLDMLNVYKCLSENISAAIQANGEMVTKQPLIRSMRTVKRETLKLISGWVSRSNDPQMKCPSC

SEQ ID NO: 844909 - protein, 894 aa, Homo sapiens
MPAIMTMLADHAARQLLDFSQKLDINLLDNVVNCLYHGEGAQQRMAQEVLTHLKEHPDAWTRVDTILEFSQNMNTKYYGLQILENVIKTRWKILPRNQCEGIKKYVVGLIIKTSSDPTCVEKEKVYIGKLNMILVQILKQEWPKHWPTFISDIVGASRTSESLCQNNMVILKLLSEEVFDFSSGQITQVKSKHLKDSMCNEFSQIFQLCQFVMENSQNAPLVHATLETLLRFLNWIPLGYIFETKLISTLIYKFLNVPMFRNVSLKCLTEIAGVSVSQYEEQFVTLFTLTMMQLKQMLPLNTNIRLAYSNGKDDEQNFIQNLSLFLCTFLKEHDQLIEKRLNLRETLMEALHYMLLVSEVEETEIFKICLEYWNHLAAELYRESPFSTSASPLLSGSQHFDVPPRRQLYLPMLFKVRLLMVSRMAKPEEVLVVENDQGEVVREFMKDTDSINLYKNMRETLVYLTHLDYVDTERIMTEKLHNQVNGTEWSWKNLNTLCWAIGSISGAMHEEDEKRFLVTVIKDLLGLCEQKRGKDNKAIIASNIMYIVGQYPRFLRAHWKFLKTVVNKLFEFMHETHDGVQDMACDTFIKIAQKCRRHFVQVQVGEVMPFIDEILNNINTIICDLQPQQVHTFYEAVGYMIGAQTDQTVQEHLIEKYMLLPNQVWDSIIQQATKNVDILKDPETVKQLGSILKTNVRACKAVGHPFVIQLGRIYLDMLNVYKCLSENISAAIQANGEMVTKQPLIRSMRTVKRETLKLISGWVSRSNDPQMVAENFVPPLLDAVLIDYQRNVPAAREPEVLSTMAIIVNKLGGHITAEIPQIFDAVFECTLNMINKDFEEYPEHRTNFFLLLQAVNSHCFPAFLAIPPTQFKLVLDSIIWAFKHTMRNVADTGK

SEQ ID NO: 844910 - protein, 1071 aa, Homo sapiens; identical to SEQ ID NO: 844902

SEQ ID NO: 844911 - protein, 1071 aa, Homo sapiens; identical to SEQ ID NO: 844902

SEQ ID NO: 844912 - protein, 1071 aa, Homo sapiens; identical to SEQ ID NO: 844902

SEQ ID NO: 844913 - protein, 165 aa, Homo sapiens
ILAYMFNLVELMHAGVNQQYVKCLSQQKRYAGLTMHASILAYMFNLVEEGKISTSLNPGNPVNNQIFLQEYVANLLKSAFPHLQDAQVKLFVTGLFSLNQDIPAFKEHLRDFLVQIKEFAGEDTSDLFLEEREIALRQADEEKHKRQMSVPGIFNPHEIPEEMCD

SEQ ID NO: 844914 - protein, 946 aa, Homo sapiens
MPAIMTMLADHAARQLLDFSQKLDINLLDNVVNCLYHGEGAQQRMAQEVLTHLKEHPDAWTRVDTILEFSQNMNTKYYGLQILENVIKTRWKILPRNQCEGIKKYVVGLIIKTSSDPTCVEKEKVYIGKLNMILVQILKQEWPKHWPTFISDIVGASRTSESLCQNNMVILKLLSEEVFDFSSGQITQVKSKHLKDSMCNEFSQIFQLCQFVMENSQNAPLVHATLETLLRFLNWIPLGYIFETKLISTLIYKFLNVPMFRNVSLKCLTEIAGVSVSQYEEQFVTLFTLTMMQLKQMLPLNTNIRLAYSNGKDDEQNFIQNLSLFLCTFLKEHDQLIEKRLNLRETLMEALHYMLLVSEVEETEIFKICLEYWNHLAAELYRESPFSTSASPLLSGSQHFDVPPRRQLYLPMLFKVRLLMVSRMAKPEEVLVVENDQGEVVREFMKDTDSINLYKNMRETLVYLTHLDYVDTERIMTEKLHNQVNGTEWSWKNLNTLCWAIGSISGAMHEEDEKRFLVTVIKDLLGLCEQKRGKDNKAIIASNIMYIVGQYPRFLRAHWKFLKTVVNKLFEFMHETHDGVQDMACDTFIKIAQKCRRHFVQVQVGEVMPFIDEILNNINTIICDLQPQQVHTFYEAVGYMIGAQTDQTVQEHLIEKYMLLPNQVWDSIIQQATKNVDILKDPETVKQLGSILKTNVRACKAVGHPFVIQLGRIYLDMLNVYKCLSENISAAIQANGEMVTKQPLIRSMRTVKRETLKLISGWVSRSNDPQMVAENFVPPLLDAVLIDYQRNVPAAREPEVLSTMAIIVNKLGGHITAEIPQIFDAVFECTLNMINKDFEEYPEHRTNFFLLLQAVNSHCFPAFLAIPPTQFKLVLDSIIWAFKHTMRNVADTGLQILFTLLQNVAQEEAAAQSFYQTYFCDILQHIFSVVTDTSHTAGKNLIRFKC

SEQ ID NO: 844915 - protein, 920 aa, Homo sapiens
MPAIMTMLADHAARQLLDFSQKLDINLLDNVVNCLYHGEGAQQRMAQEVLTHLKEHPDAWTRVDTILEFSQNMNTKYYGLQILENVIKTRWKILPRNQCEGIKKYVVGLIIKTSSDPTCVEKEKVYIGKLNMILVQILKQEWPKHWPTFISDIVGASRTSESLCQNNMVILKLLSEEVFDFSSGQITQVKSKHLKDSMCNEFSQIFQLCQFVMENSQNAPLVHATLETLLRFLNWIPLGYIFETKLISTLIYKFLNVPMFRNVSLKCLTEIAGVSVSQYEEQFVTLFTLTMMQLKQMLPLNTNIRLAYSNGKDDEQNFIQNLSLFLCTFLKEHDQLIEKRLNLRETLMEALHYMLLVSEVEETEIFKICLEYWNHLAAELYRESPFSTSASPLLSGSQHFDVPPRRQLYLPMLFKVRLLMVSRMAKPEEVLVVENDQGEVVREFMKDTDSINLYKNMRETLVYLTHLDYVDTERIMTEKLHNQVNGTEWSWKNLNTLCWAIGSISGAMHEEDEKRFLVTVIKDLLGLCEQKRGKDNKAIIASNIMYIVGQYPRFLRAHWKFLKTVVNKLFEFMHETHDGVQDMACDTFIKIAQKCRRHFVQVQVGEVMPFIDEILNNINTIICDLQPQQVHTFYEAVGYMIGAQTDQTVQEHLIEKYMLLPNQVWDSIIQQATKNVDILKDPETVKQLGSILKTNVRACKAVGHPFVIQLGRIYLDMLNVYKCLSENISAAIQANGEMVTKQPLIRSMRTVKRETLKLISGWVSRSNDPQMVAENFVPPLLDAVLIDYQRNVPAAREPEVLSTMAIIVNKLGGHITAEIPQIFDAVFECTLNMINKDFEEYPEHRTNFFLLLQAVNSHCFPAFLAIPPTQFKLVLDSIIWAFKHTMRNVADTGLQILFTLLPNFRDHLLDQRIEWDPLNA

SEQ ID NO: 844916 - protein, 205 aa, Homo sapiens
GEAAAAAAAGAAGATASARATVATAPAAVPVPVFAAAVRATTQRGRGEPPVAEEQEKGGKFRRALGGGGPAPEPRERGSRVLVGGSRTATGSRASPRPCGLYTSYSCRFCCCLWLEGPPGAESLGLDPVPSPFPHSPAGREHLFPRLIPLLGGGGCVCVCVSGRPGCQYWQASRGPSVCAEHCGQDRQCWAPHNHGRDCLTSRGS

SEQ ID NO: 844917 - protein, 110 aa, Homo sapiens
RSGCSGRGRSSGSYSISKSNSSYSPGGGACSSLCCCSPCNHPAGREHLFPRLIPLLGGGGCVCVCVSGRPGCQYWQASRGPSVCAEHCGQDRQCWAPHNHGRDCLTSRGS

SEQ ID NO: 844918 - protein, 198 aa, Homo sapiens
GEAAAAAAAGAAGATASARATVATAPAAVPVPVFAAAVRATTQRGRGEPPVAEEQEKGGKFRRAPEPRERGSRVLVGGSRTATGSRASPRPCGLYTSYSCRFCCCLWLEGPPGAESLGLDPVPSPFPHSPAGREHLFPRLIPLLGGGGCVCVCVSGRPGCQYWQASRGPSVCAEHCGQDRQCWAPHNHGRDCLTSRGS

SEQ ID NO: 844919 - protein, 1056 aa, Homo sapiens
MPAIMTMLADHAARQLLDFSQKLDINLLDNVVNCLYHGEGAQQRMAQEVLTHLKEHPDAWTRVDTILEFSQNMNTKYYGLQILENVIKTRWKILPRNQCEGIKKYVVGLIIKTSSDPTCVEILKQEWPKHWPTFISDIVGASRTSESLCQNNMVILKLLSEEVFDFSSGQITQVKSKHLKDSMCNEFSQIFQLCQFVMENSQNAPLVHATLETLLRFLNWIPLGYIFETKLISTLIYKFLNVPMFRNVSLKCLTEIAGVSVSQYEEQFVTLFTLTMMQLKQMLPLNTNIRLAYSNGKDDEQNFIQNLSLFLCTFLKEHDQLIEKRLNLRETLMEALHYMLLVSEVEETEIFKICLEYWNHLAAELYRESPFSTSASPLLSGSQHFDVPPRRQLYLPMLFKVRLLMVSRMAKPEEVLVVENDQGEVVREFMKDTDSINLYKNMRETLVYLTHLDYVDTERIMTEKLHNQVNGTEWSWKNLNTLCWAIGSISGAMHEEDEKRFLVTVIKDLLGLCEQKRGKDNKAIIASNIMYIVGQYPRFLRAHWKFLKTVVNKLFEFMHETHDGVQDMACDTFIKIAQKCRRHFVQVQVGEVMPFIDEILNNINTIICDLQPQQVHTFYEAVGYMIGAQTDQTVQEHLIEKYMLLPNQVWDSIIQQATKNVDILKDPETVKQLGSILKTNVRACKAVGHPFVIQLGRIYLDMLNVYKCLSENISAAIQANGEMVTKQPLIRSMRTVKRETLKLISGWVSRSNDPQMVAENFVPPLLDAVLIDYQRNVPAAREPEVLSTMAIIVNKLGGHITAEIPQIFDAVFECTLNMINKDFEEYPEHRTNFFLLLQAVNSHCFPAFLAIPPTQFKLVLDSIIWAFKHTMRNVADTGLQILFTLLQNVAQEEAAAQSFYQTYFCDILQHIFSVVTDTSHTAGLTMHASILAYMFNLVEEGKISTSLNPGNPVNNQIFLQEYVANLLKSAFPHLQDAQVKLFVTGLFSLNQDIPAFKEHLRDFLVQIKEFAGEDTSDLFLEEREIALRQADEEKHKRQMSVPGIFNPHEIPEEMCD

SEQ ID NO: 844920 - protein, 813 aa, Homo sapiens [sequence omitted]

SEQ ID NO: 844921 - protein, 431 aa, Homo sapiens [sequence omitted]

SEQ ID NO: 844922 - protein, 432 aa, Homo sapiens [sequence omitted]

SEQ ID NO: 844923 - protein, 356 aa, Homo sapiens
VGEPIQILTLKFPFLQFAYFKSMVLVTISPLAWIAVKRETLKLISGWVSRSNDPQMVAENFVPPLLDAVLIDYQRNVPAAREPEVLSTMAIIVNKLGGHITAEIPQIFDAVFECTLNMINKDFEEYPEHRTNFFLLLQAVNSHCFPAFLAIPPTQFKLVLDSIIWAFKHTMRNVADTGLQILFTLLQNVAQEEAAAQSFYQTYFCDILQHIFSVVTDTSHTAGLTMHASILAYMFNLVEEGKISTSLNPGNPVNNQIFLQEYVANLLKSAFPHLQDAQVKLFVTGLFSLNQDIPAFKEHLRDFLVQIKEFAGEDTSDLFLEEREIALRQADEEKHKRQMSVPGIFNPHEIPEEMCD

SEQ ID NO: 844924 - protein, 1071 aa, Homo sapiens; identical to SEQ ID NO: 844902

SEQ ID NO: 844925 - protein, 283 aa, Homo sapiens
GGRYARHAAEYVDSPNDGIQNKLGGHITAEIPQIFDAVFECTLNMINKDFEEYPEHRTNFFLLLQAVNSHCFPAFLAIPPTQFKLVLDSIIWAFKHTMRNVADTGLQILFTLLQNVAQEEAAAQSFYQTYFCDILQHIFSVVTDTSHTAGLTMHASILAYMFNLVEEGKISTSLNPGNPVNNQIFLQEYVANLLKSAFPHLQDAQVKLFVTGLFSLNQDIPAFKEHLRDFLVQIKEFAGEDTSDLFLEEREIALRQADEEKHKRQMSVPGIFNPHEIPEEMCD

SEQ ID NO: 844926 - protein, 991 aa, Homo sapiens
MPAIMTMLADHAARQLLDFSQKLDINLLDNVVNCLYHGEGAQQRMAQEVLTHLKEHPDAWTRVDTILEFSQNMNTKYYGLQILENVIKTRWKILPRNQCEGIKKYVVGLIIKTSSDPTCVEKEKVYIGKLNMILVQILKQEWPKHWPTFISDIVGASRTSESLCQNNMVILKLLSEEVFDFSSGQITQVKSKHLKDSMCNEFSQIFQLCQFVMENSQNAPLVHATLETLLRFLNWIPLGYIFETKLISTLIYKFLNVPMFRNVSLKCLTEIAGVSVSQYEEQFVTLFTLTMMQLKQMLPLNTNIRLAYSNGKDDEQNFIQNLSLFLCTFLKEHDQLIEKRLNLRETLMEALHYMLLVSEVEETEIFKICLEYWNHLAAELYRESPFSTSASPLLSGSQHFDVPPRRQLYLPMLFKVRLLMVSRMAKPEEVLVVENDQGEVVREFMKDTDSINLYKNMRETLVYLTHLDYVDTERIMTEKLHNQVNGTEWSWKNLNTLCWAIGSISGAMHEEDEKRFLVTVIKDLLGLCEQKRGKDNKAIIASNIMYIVGQYPRFLRAHWKFLKTVVNKLFEFMHETHDGVQDMACDTFIKIAQKCRRHFVQVQVGEVMPFIDEILNNINTIICDLQPQQVHTFYEAVGYMIGAQTDQTVQEHLIEKYMLLPNQVWDSIIQQATKNVDILKDPETVKQLGSILKTNVRACKAVGHPFVIQLGRIYLDMLNVYKCLSENISAAIQANGEMVTKQPLIRSMRTVKRETLKLISGWVSRSNDPQMVAENFVPPLLDAVLIDYQRNVPAAREPEVLSTMAIIVNKLGGHITAEIPQIFDAVFECTLNMINKDFEEYPEHRTNFFLLLQAVNSHCFPAFLAIPPTQFKLVLDSIIWAFKHTMRNVADTGLQILFTLLQNVAQEEAAAQSFYQTYFCDILQHIFSVVTDTSHTAGLTMHASILAYMFNLVEEGKISTSLNPGNPVNNQIFLQEYVANLLKSAFPHLQE

SEQ ID NO: 844927 - protein, 894 aa, Homo sapiens; identical to SEQ ID NO: 844909

SEQ ID NO: 844928 - protein, 789 aa, Homo sapiens
  misc_feature (773)..(773): Xaa can be any naturally occurring amino acid
MPAIMTMLADHAARQLLDFSQKLDINLLDNVVNCLYHGEGAQQRMAQEVLTHLKEHPDAWTRVDTILEFSQNMNTKYYGLQILENVIKTRWKILPRNQCEGIKKYVVGLIIKTSSDPTCVEKEKVYIGKLNMILVQILKQEWPKHWPTFISDIVGASRTSESLCQNNMVILKLLSEEVFDFSSGQITQVKSKHLKDSMCNEFSQIFQLCQFVMENSQNAPLVHATLETLLRFLNWIPLGYIFETKLISTLIYKFLNVPMFRNVSLKCLTEIAGVSVSQYEEQFVTLFTLTMMQLKQMLPLNTNIRLAYSNGKDDEQNFIQNLSLFLCTFLKEHDQLIEKRLNLRETLMEALHYMLLVSEVEETEIFKICLEYWNHLAAELYRESPFSTSASPLLSGSQHFDVPPRRQLYLPMLFKVRLLMVSRMAKPEEVLVVENDQGEVVREFMKDTDSINLYKNMRETLVYLTHLDYVDTERIMTEKLHNQVNGTEWSWKNLNTLCWAIGSISGAMHEEDEKRFLVTVIKDLLGLCEQKRGKDNKAIIASNIMYIVGQYPRFLRAHWKFLKTVVNKLFEFMHETHDGVQDMACDTFIKIAQKCRRHFVQVQVGEVMPFIDEILNNINTIICDLQPQQVHTFYEAVGYMIGAQTDQTVQEHLIEKYMLLPNQVWDSIIQQATKNVDILKDPETVKQLGSILKTNVRACKAVGHPFVIQLGRIYLDMLNVYKCLSENISAAIQANGEMVTKQPLIRSMRTVKRETLKLISGWVSRSNDPQMPXKFGPPCGSVYGFKKGP

SEQ ID NO: 844929 - protein, 815 aa, Homo sapiens
RARRVAASGAGREKRKGGGPAGEEGRRRRFGRLCGVRSVAGTERSSWARRPGQLGPGPRFGRAGRAGLAIMEEELQHSHCVNCVSRRCMTRPEPGISCDLIGCPLVCGAVFHSCKADEHRLLCPFERVPCLNSDFGCPFTMARNKVAEHLEMCPASVVCCTMEWNRWPVSYADRKSYENLSRDVDEVAQLDMALALQDQRMLLESLKVATMMSKATDKVSKPREQISVKSSVPEIPHANGLVSVDEESYGALYQATVETTRSLAAALDILNTATRDIGMLNTSVPNDMDEQQNARESLEDQNLKDQDHLYEEEIGAVGGIDYNDTNQNAQSEQNGSSDLLCDLNTSSYDTSALCNGFPLENICTQVIDQNQNLHGDSKQSNLTNGDCVASSDGTSKPSSSLAVAAQLREIIPSSALPNGTVQHILMPDDEGEGELCWKKVDLGDVKNVDVLSFSHAPSFNFLSNSCWSKPKEDKAVDTSDLEVAEDPMGLQGIDLITAALLFCLGDSPGGRGISDSRMADIYHIDVGTQTFSLPSAILATSTMVGEIASASACDHANPQLSNPSPFQTLGLDLVLECVARYQPKQRSMFTFVCGQLFRRKEFSSHFKNVHGDIHAGLNGWMEQRCPLAYYGCTYSQRRFCPSIQGAKIIHDRHLRSFGVQPCVSTVLVEPARNCVLGLHNDHLSSLPFEVLQHIAGFLDGFSLCQLSCVSKLMRDVCGSLLQSRGMVILQWGKRKYPEGNSSWQIKEKVWRFSTAFCSVNEWKFADILSMADHLKKCSYNVVEKREEAIPLPCMCVTRELTKEGRSLRSVLKPVL

SEQ ID NO: 844930 - protein, 815 aa, Homo sapiens; identical to SEQ ID NO: 844929

SEQ ID NO: 844931 - protein, 815 aa, Homo sapiens; identical to SEQ ID NO: 844929

SEQ ID NO: 844932 - protein, 750 aa, Homo sapiens
RARRVAASGAGREKRKGGGPAGEEGRRRRFGRLCGVRSVAGTERSSWARRPGQLGPGPRFGRAGRAGLAIMEEELQHSHCVNCVSRRCMTRPEPGISCDLIGCPLVCGAVFHSCKADEHRLLCPFERVPCLNSDFGCPFTMARNKVAEHLEMCPASVVCCTMEWNRWPVSYADRKSYENLSRDVDEVAQLDMALALQDQRMLLESLKVATMMSKATDKVSKPREQISVKSSVPEIPHANGLVSVDEESYGALYQATVETTRSLAAALDILNTATRDIGMLNTSVPNDMDEQQNARESLEDQNLKDQDHLYEEEIGAVGGIDYNDTNQNAQSEQNGSSDLLCDLNTSSYDTSALCNGFPLENICTQVIDQNQNLHGDSKQSNLTNGDCVASSDGTSKPSSSLAVAAQLREIIPSSALPNGTVQHILMPDDEGEGELCWKKVDLGDVKNVDVLSFSHAPSFNFLSNSCWSKPKEDKAVDTSDLEVAEDPMGLQGIDLITAALLFCLGDSPGGRGISDSRMADIYHIDVGTQTFSLPSAILATSTMVGEIASASACDHANPQLSNPSPFQTLGLDLVLECVARYQPKQRSMFTFVCGQLFRRKEFSSHFKNVHGDIHAGLNGWMEQRCPLAYYGCTYSQRRFCPSIQGAKIIHDRHLRSFGVQPCVSTVLVEPARNCVLGLHNDHLSSLPFEVLQHIAGFLDGFSLCQLSCVSKLMRDVCGSLLQSRGMVILQWGKRKYPEGNSSWQIKEKIC

SEQ ID NO: 844933 - protein, 352 aa, Homo sapiens
MPSETLWEIAKAEVEKRGINGSEGDGAEIAEKFVFFIGSKNGGKTTIILRCLDRDEPPKPTLALEYTYGRRAKGHNTPKDIAHFWELGGGTSLLDLISIPITGDTLRTFSLVLVLDLSKPNDLWPTMENLLQATKSHVDKVIMKLGKTNAKAVSEMRQKIWNNMPKDHPQDHELIDPFPVPLVIIGSKYDVFQDFESEKRKVICKTLRFVAHYYGASLMFTSKSEALLLKIRGVINQLAFGIDKSKSICVDQNKPLFITAGLDSFGQIGSPPVPENDIGKLHAHSPMELWKKVYEKLFPPKSINTLKDIKDPARDPQYAENEVDEMRIQKDLELEQYKRSSSKSWKQIELDS

SEQ ID NO: 844934 - protein, 144 aa, Homo sapiens
MPSETLWEIAKAEVEKRGINGSEGDGAEIAEKFVFFIGSKNGGKTTIILRCLDRDEPPKPTLALEYTYGRRAKGHNTPKDIAHFWELGGGTSLLDLISIPITGDTLRSWQLSSLLPVSMNLTTPVPHINEIIHYLSFCYLFHLA

SEQ ID NO: 844935 - protein, 335 aa, Homo sapiens
MPSETLWEIAKAEVEKRGINGSEGDGAEIAEKFVFFIGSKNGGKTTIILRCLDRDEPPKPTLALEYTYGRRAKGHNTPKDIAHFWELGGGTSLLDLISIPITGDTLRTFSLVLVLDLSKPNDLWPTMENLLQATKSHVDKVIMKLGKTNAKAVSEMRQKIWNNMPKDHPQDHELIDPFPVPLVIIGSKYDVFQDFESEKRKVICKTLRFVAHYYGASLMFTSKSEALLLKIRGVINQLAFGIDKSKSICVDQNKPLFITAGLDSFGQIGSPPVPENDIGKLHAHSPMELWKKVYEKLFPPKSINTLKDIKDPARDPQYAENEVDEMRIQKDLVLS

SEQ ID NO: 844936 - protein, 189 aa, Homo sapiens
MPKDHPQDHELIDPFPVPLVIIGSKYDVFQDFESEKRKVICKTLRFVAHYYGASLMFTSKSEALLLKIRGVINQLAFGIDKSKSICVDQNKPLFITAGLDSFGQIGSPPVPENDIGKLHAHSPMELWKKVYEKLFPPKSINTLKDIKDPARDPQYAENEVDEMRIQKDLELEQYKRSSSKSWKQIELDS

SEQ ID NO: 844937 - protein, 347 aa, Homo sapiens
PRRPHSQTPCGARRLILGWSLLRACDVCGSQAVDDAQGKTTIILRCLDRDEPPKPTLALEYTYGRRAKGHNTPKDIAHFWELGGGTSLLDLISIPITGDTLRTFSLVLVLDLSKPNDLWPTMENLLQATKSHVDKVIMKLGKTNAKAVSEMRQKIWNNMPKDHPQDHELIDPFPVPLVIIGSKYDVFQDFESEKRKVICKTLRFVAHYYGASLMFTSKSEALLLKIRGVINQLAFGIDKSKSICVDQNKPLFITAGLDSFGQIGSPPVPENDIGKLHAHSPMELWKKVYEKLFPPKSINTLKDIKDPARDPQYAENEVDEMRIQKDLELEQYKRSSSKSWKQIELDS

SEQ ID NO: 844938 - protein, 154 aa, Homo sapiens
MSTQRSVKTLDSVHIIMEHHYFTSKSEALLLKIRGVINQLAFGIDKSKSICVDQNKPLFITAGLDSFGQIGSPPVPENDIGKLHAHSPMELWKKVYEKLFPPKSINTLKDIKDPARDPQYAENEVDEMRIQKDLELEQYKRSSSKSWKQIELDS

SEQ ID NO: 844939 - protein, 200 aa, Homo sapiens
MPSETLWEIAKAEVEKRGINGSEGDGAEIAEKFVFFIGSKNGGKTTIILRCLDRDEPPKPTLALEYTYGRRAKGHNTPKDIAHFWELGGGTSLLDLISIPITGDTLRTFSLVLVLDLSKPNDLWPTMENLLQATKSHVDKVIMKLGKTNAKAVSEMRQKIWNNMPKDHPQDHELIDPFPVPLVIIGSKYDVFQVSSSASS

SEQ ID NO: 844940 - protein, 201 aa, Homo sapiens
MPSETLWEIAKAEVEKRGINGSEGDGAEIAEKFVFFIGSKNGGKTTIILRCLDRDEPPKPTLALEYTYGRRAKGHNTPKDIAHFWELGGGTSLLDLISIPITGDTLRTFSLVLVLDLSKPNDLWPTMENLLQATKSHVDKVIMKLGKTNAKAVSEMRQKIWNNMPKDHPVSCCLGLLLESLVPFIVNDNITNNFFRFLCMT

SEQ ID NO: 844941 - protein, 335 aa, Homo sapiens; identical to SEQ ID NO: 844935

SEQ ID NO: 844942 - protein, 335 aa, Homo sapiens; identical to SEQ ID NO: 844935

SEQ ID NO: 844943 - protein, 334 aa, Homo sapiens
MPSETLWEIAKAEVEKRGINGSEGDGAEIAEKFVFFIGSKNGGKTTIILRCLDRDEPPKPTLALEYTYGRRAKGHNTLISIPITGDTLRTFSLVLVLDLSKPNDLWPTMENLLQATKSHVDKVIMKLGKTNAKAVSEMRQKIWNNMPKDHPQDHELIDPFPVPLVIIGSKYDVFQDFESEKRKVICKTLRFVAHYYGASLMFTSKSEALLLKIRGVINQLAFGIDKSKSICVDQNKPLFITAGLDSFGQIGSPPVPENDIGKLHAHSPMELWKKVYEKLFPPKSINTLKDIKDPARDPQYAENEVDEMRIQKDLELEQYKRSSSKSWKQIELDS

SEQ ID NO: 844944 - protein, 134 aa, Homo sapiens [sequence omitted]

SEQ ID NO: 844945 - protein, 185 aa, Homo sapiens
MPSETLWEIAKAEVEKRGINGSEGDGAEIAEKFVFFIGSKNGGKTTIILRCLDRDEPPKPTLALEYTYGRRAKGHNTPKDIAHFWELGGGTSLLDLISIPITGDTLRTFSLVLVLDLSKPNDLWPTMENLLQATSINTLKDIKDPARDPQYAENEVDEMRIQKDLELEQYKRSSSKSWKQIELDS

SEQ ID NO: 844946 - protein, 746 aa, Homo sapiens
TRDGRHAPRSIVSLIWVPGRCGRRAGSARVTPAAGAPGPAGAGRGVPGRAAAMKHLKRWWSAGGGLLHLTLLLSLAGLRVDLDLYLLLPPPTLLQDELLFLGGPASSAYALSPFSASGGWGRAGHLHPKGRELDPAAPPEGQLLREVRALGVPFVPRTSVDAWLVHSVAAGSADEAHGLLGAAAASSTGGAGASVDGGSQAVQGGGGDPRAARSGPLDAGEEEKAPAEPTAQVPDAGGCASEENGVLREKHEAVDHSSQHEENEERVSAQKENSLQQNDDDENKIAEKPDWEAEKTTESRNERHLNGTDTSFSLEDLFQLLSSQPENSLEGISLGDIPLPGSISDGMNSSAHYHVNFSQAISQDVNLHEAILLCPNNTFRRDPTARTSQSQEPFLQLNSHTTNPEQTLPGTNLTGFLSPVDNHMRNLTSQDLLYDLDINIFDEINLMSLATEDNFDPIDVSQLFDEPDSDSGLSLDSSHNNTSVIKSNSSHSVCDEGAIGYCTDHESSSHHDLEGAVGGYYPEPSKLCHLDQSDSDFHGDLTFQHVFHNHTYHLQPTAPESTSEPFPWPGKSQKIRSRYLEDTDRNLSRDEQRAKALHIPFSVDEIVGMPVDSFNSMLSRYYLTDLQVSLIRDIRRRGKNKVAAQNCRKRKLDIILNLEDDVCNLQAKKETLKREQAQCNKAINIMKQKLHDLYHDIFSRLRDDQGRPVNPNHYALQCTHDGSILIVPKELVASGHKKETQKGKRK

SEQ ID NO: 844947 - protein, 746 aa, Homo sapiens; identical to SEQ ID NO: 844946

SEQ ID NO: 844948 - protein, 657 aa, Homo sapiens
TRDGRHAPRSIVSLIWVPGRCGRRAGSARVTPAAGAPGPAGAGRGVPGRAAAMKHLKRWWSAGGGLLHLTLLLSLAGLRVDLDLYLLLPPPTLLQDELLFLGGPASSAYALSPFSASGGWGRAGHLHPKGRELDPAAPPEGQLLREVRALGVPFVPRTSVDAWLVHSVAAGSADEAHGLLGAAAASSTGGAGASVDGGSQAVQGGGGDPRAARSGPLDAGEEEKAPAEPTAQVPDAGGCASEENGVLREKHEAVDHSSQHEENEERVSAQKENSLQQNDDDENKIAEKPDWEAEKTTESRNERHLNGTDTSFSLEDLFQLLSSQPENSLEGISLGDIPLPGSISDGMNSSAHYHVNFSQAISQDVNLHEAILLCPNNTFRRDPTARTSQSQEPFLQLNSHTTNPEQTLPGTNLTGFLSPVDNHMRNLTSQDLLYDLDINIFDEINLMSLATEDNFDPIDVSQLFDEPDSDSGLSLDSSHNNTSVIKSNSSHSVCDEGAIGYCTDHESSSHHDLEGAVGGYYPEPSKLCHLDQSDSDFHGDLTFQHVFHNHTYHLQPTAPESTSEPFPWPGKSQKIRSRYLEDTDRNLSRDEQRAKALHIPFSVDEIVGMPVDSFNSMLSRYYLTDLQVSLIRDIRRRGKNKVAAQNFPGQHPPHQTH

SEQ ID NO: 844949 - protein, 345 aa, Homo sapiens
TRDGRHAPRSIVSLIWVPGRCGRRAGSARVTPAAGAPGPAGAGRGVPGRAAAMKHLKRWWSAGGGLLHLTLLLSLAGLRVDLDLYLLLPPPTLLQDELLFLGGPASSAYALSPFSASGGWGRAGHLHPKGRELDPAAPPEGQLLREVRALGVPFVPRTSVDAWLVHSVAAGSADEAHGLLGAAAASSTGGAGASVDGGSQAVQGGGGDPRAARSGPLDAGEEEKAPAEPTAQVPDAGGCASEENGVLREKHEAVDHSSQHEENEERVSAQKENSLQQNDDDENKIAEKPDWEAEKTTESRNERHLNGTDTSFSLEDLFQLLSSQPENSLEVIGTLAFILAGTYLH

SEQ ID NO: 844950 - protein, 746 aa, Homo sapiens; identical to SEQ ID NO: 844946

SEQ ID NO: 844951 - protein, 400 aa, Homo sapiens
MNSSAHYHVNFSQAISQDVNLHEAILLCPNNTFRRDPTARTSQSQEPFLQLNSHTTNPEQTLPGTNLTGFLSPVDNHMRNLTSQDLLYDLDINIFDEINLMSLATEDNFDPIDVSQLFDEPDSDSGLSLDSSHNNTSVIKSNSSHSVCDEGAIGYCTDHESSSHHDLEGAVGGYYPEPSKLCHLDQSDSDFHGDLTFQHVFHNHTYHLQPTAPESTSEPFPWPGKSQKIRSRYLEDTDRNLSRDEQRAKALHIPFSVDEIVGMPVDSFNSMLSRYYLTDLQVSLIRDIRRRGKNKVAAQNCRKRKLDIILNLEDDVCNLQAKKETLKREQAQCNKAINIMKQKLHDLYHDIFSRLRDDQGRPVNPNHYALQCTHDGSILIVPKELVASGHKKETQKGKRK

SEQ ID NO: 844952 - protein, 684 aa, Homo sapiens
TRDGRHAPRSIVSLIWVPGRCGRRAGSARVTPAAGAPGPAGAGRGVPGRAAAMKHLKRWWSAGGGLLHLTLLLSLAGLRVDLDLYLLLPPPTLLQDELLFLGGPASSAYALSPFSASGGWGRAGHLHPKGRELDPAAPPEGQLLREVRALGVPFVPRTSVDAWLVHSVAAGSADEAHGLLGAAAASSTGGAGASVDGGSQAVQGGGGDPRAARSGPLDAGEEEKAPAEPTAQVPDAGGCASEENGVLREKHEAVDHSSQHEENEERVSAQKENSLQQNDDDENKIAEKPDWEAEKTTESRNERHLNGTDTSFSLEDLFQLLSSQPENSLEGISLGDIPLPGSISDGMNSSAHYHVNFSQAISQDVNLHEAILLCPNNTFRRDPTARTSQSQEPFLQLNSHTTNPEQTLPGTNLTGFLSPVDNHMRNLTSQDLLYDLDINIFDEINLMSLATEDNFDPIDVSQLFDEPDSDSGLSLDSSHNNTSVIKSNSSHSVCDEGAIGYCTDHESSSHHDLEGAVGGYYPEPSKLCHLDQSDSDFHGDLTFQHVFHNHTYHLQPTAPESTSEPFPWPGKSQKIRSRYLEDTDRNLSRDEQRAKALHIPFSVDEIVGMPVDSFNSMLSRYYLTDLQVSLIRDIRRRGKNKVAAQNCRKRKLDIILNLEDDVCNLQAKKETLKREQAQCNKRLT

SEQ ID NO: 844953 - protein, 406 aa, Homo sapiens
SALEVPSRAATPLQAGPPTRPARSALRPGPAADPRPAARFAPEACAPTDARAQLATPTPGAPTAEDSPRCRRRGWLAAQAAPDVPGSPPPPLQPRPPWPGSRRPPWVASASSACSSLARCPAAWAGTRDPSNPGSPQPGALPAACSPGTPHPDLWSGSFTGPSRHRGVPAWPLLWVSLSGMVAANTRAPAGPKPSSCEWAACWAPARCRISATACGNSWDRPAGRTQLLWTPAAPTAMAEVGPGHTPAHPSQGAVPPSRAAAEPHLKPSPSELQTAGPAATIPARLCTRKPRLVYTQCWYVKEPKHPEIVTPWGTAARHSWRQHQMLSASERRCLPRDVEQKLGPEHTGPCLDEQGREAELARSGPSAAGPVRLKPGLVPGLFLLSCTTSPSTCLPVGQEGERGML

SEQ ID NO: 844954 - protein, 159 aa, Homo sapiens
MLRNNKTIIIKYFLNLINGAFLVLGLLFMGFGAWLLLDRNNFLTAFDENNHFIVPISQILIGMGSSTVLFCLLGYIGIHNEIRWLLIVVESRSVTRLECSGTISAHCNLHLPDSSDSPASDSEVAGITVCSIDNMDLCCSGCTFSIHHHKERGGSATMA

SEQ ID NO: 844955 - protein, 159 aa, Homo sapiens; identical to SEQ ID NO: 844954

SEQ ID NO: 844956 - protein, 248 aa, Homo sapiens
MLRNNKTIIIKYFLNLINGAFLVLGLLFMGFGAWLLLDRNNFLTAFDENNHFIVPISQILIGMGSSTVLFCLLGYIGIHNEIRWLLIVYAVLITWTFAVQVVLSAFIITKKEEVQQLWHDKIDFVISEYGSKDKPEDITKWTILNALQKTLQCCGQHNYTDWIKNKNKENSGQVPCSCTKSTLRKWFCDEPLNATYLEGCENKISAWYNVNVLTLIGINFGLLTSEVFQVSLTVCFFKNIKNIIHAEM

SEQ ID NO: 844957 - protein, 1120 aa, Homo sapiens
MAEAPPVSGTFKFNTDAAEFIPQEKKNSGLNCGTQRRLDSNRIGRRNYSSPPPCHLSRQVPYDEISAVHQHSYHPSGSKPKSQQTSFQSSPCNKSPKSHGLQNQPWQKLRNEKHHIRVKKAQSLAEQTSDTAGLESSTRSESGTDLREHSPSESEKEVVGADPRGAKPKKATQFVYSYGRGPKVKGKLKCEWSNRTTPKPEDAGPESTKPVGVFHPDSSEASSRKGVLDGYGARRNEQRRYPQKRPPWEVEGARPRPGRNPPKQEGHRHTNAGHRNNMGPIPKDDLNERPAKSTCDSENLAVINKSSRRVDQEKCTVRRQDPQVVSPFSRGKQNHVLKNVETHTGSLIEQLTTEKYECMVCCELVRVTAPVWSCQSCYHVFHLNCIKKWARSPASQADGQSGWRCPACQNVSAHVPNTYTCFCGKVKNPEWSRNEIPHSCGEVCRKKQPGQDCPHSCNLLCHPGPCPPCPAFMTKTCECGRTRHTVRCGQAVSVHCSNPCENILNCGQHQCAELCHGGQCQPCQIILNQVCYCGSTSRDVLCGTDVGKSDGFGDFSCLKICGKDLKCGNHTCSQVCHPQPCQQCPRLPQLVRCCPCGQTPLSQLLELGSSSRKTCMDPVPSCGKVCGKPLPCGSLDFIHTCEKLCHEGDCGPCSRTSVISCRCSFRTKELPCTSLKSEDATFMCDKRCNKKRLCGRHKCNEICCVDKEHKCPLICGRKLRCGLHRCEEPCHRGNCQTCWQASFDELTCHCGASVIYPPVPCGTRPPECTQTCARVHECDHPVYHSCHSEEKCPPCTFLTQKWCMGKHEFRSNIPCHLVDISCGLPCSATLPCGMHKCQRLCHKGECLVDEPCKQPCTTPRADCGHPCMAPCHTSSPCPVTACKAKVELQCECGRRKEMVICSEASSTYQRIAAISMASKITDMQLGGSVEISKLITKKEVHQARLECDEECSALERKKRLAEAFHISEDSDPFNIRSSGSKFSDSLKEDARKDLKFVSDVEKEMETLVEAVNKGKNSKKSHSFPPMNRDHRRIIHDLAQVYGLESVSYDSEPKRNVVVTAIRGKSVCPPTTLTGVLEREMQARPPPPIPHHRHQSDKNPGSSNLQKITKEPIIDYFDVQD

SEQ ID NO: 844958 - protein, 1104 aa, Homo sapiens
MEFSSICIEFKSTLRQEAPPPSRAAEPEIELYSSPPPCHLSRQVPYDEISAVHQHSYHPSGSKPKSQQTSFQSSPCNKSPKSHGLQNQPWQKLRNEKHHIRVKKAQSLAEQTSDTAGLESSTRSESGTDLREHSPSESEKEVVGADPRGAKPKKATQFVYSYGRGPKVKGKLKCEWSNRTTPKPEDAGPESTKPVGVFHPDSSEASSRKGVLDGYGARRNEQRRYPQKRPPWEVEGARPRPGRNPPKQEGHRHTNAGHRNNMGPIPKDDLNERPAKSTCDSENLAVINKSSRRVDQEKCTVRRQDPQVVSPFSRGKQNHVLKNVETHTGSLIEQLTTEKYECMVCCELVRVTAPVWSCQSCYHVFHLNCIKKWARSPASQADGQSGWRCPACQNVSAHVPNTYTCFCGKVKNPEWSRNEIPHSCGEVCRKKQPGQDCPHSCNLLCHPGPCPPCPAFMTKTCECGRTRHTVRCGQAVSVHCSNPCENILNCGQHQCAELCHGGQCQPCQIILNQVCYCGSTSRDVLCGTDVGKSDGFGDFSCLKICGKDLKCGNHTCSQVCHPQPCQQCPRLPQLVRCCPCGQTPLSQLLELGSSSRKTCMDPVPSCGKVCGKPLPCGSLDFIHTCEKLCHEGDCGPCSRTSVISCRCSFRTKELPCTSLKSEDATFMCDKRCNKKRLCGRHKCNEICCVDKEHKCPLICGRKLRCGLHRCEEPCHRGNCQTCWQASFDELTCHCGASVIYPPVPCGTRPPECTQTCARVHECDHPVYHSCHSEEKCPPCTFLTQKWCMGKHEFRSNIPCHLVDISCGLPCSATLPCGMHKCQRLCHKGECLVDEPCKQPCTTPRADCGHPCMAPCHTSSPCPVTACKAKVELQCECGRRKEMVICSEASSTYQRIAAISMASKITDMQLGGSVEISKLITKKEVHQARLECDEECSALERKKRLAEAFHISEDSDPFNIRSSGSKFSDSLKEDARKDLKFVSDVEKEMETLVEAVNKGKNSKKSHSFPPMNRDHRRIIHDLAQVYGLESVSYDSEPKRNVVVTAIRGKSVCPPTTLTGVLEREMQARPPPPIPHHRHQSDKNPGSSNLQKITKEPIIDYFDVQD

SEQ ID NO: 844959 - protein, 921 aa, Homo sapiens
MCHSAGWVVIWPGPVYKAQSLAEQTSDTAGLESSTRSESGTDLREHSPSESEKEVVGADPRGAKPKKATQFVYSYGRGPKVKGKLKCEWSNRTTPKPEDAGPESTKPVGVFHPDSSEASSRKGVLDGYGARRNEQRRYPQKRPPWEVEGARPRPGRNPPKQEGHRHTNAGHRNNMGPIPKDDLNERPAKSTCDSENLAVINKSSRRVDQEKCTVRRQDPQVVSPFSRGKQNHVLKNVETHTGSLIEQLTTEKYECMVCCELVRVTAPVWSCQSCYHVFHLNCIKKWARSPASQADGQSGWRCPACQNVSAHVPNTYTCFCGKVKNPEWSRNEIPHSCGEVCRKKQPGQDCPHSCNLLCHPGPCPPCPAFMTKTCECGRTRHTVRCGQAVSVHCSNPCENILNCGQHQCAELCHGGQCQPCQIILNQVCYCGSTSRDVLCGTDVGKSDGFGDFSCLKICGKDLKCGNHTCSQVCHPQPCQQCPRLPQLVRCCPCGQTPLSQLLELGSSSRKTCMDPVPSCGKVCGKPLPCGSLDFIHTCEKLCHEGDCGPCSRTSVISCRCSFRTKELPCTSLKSEDATFMCDKRCNKKRLCGRHKCNEICCVDKEHKCPLICGRKLRCGLHRCEEPCHRGNCQTCWQASFDELTCHCGASVIYPPVPCGTRPPECTQTCARVHECDHPVYHSCHSEEKCPPCTFLTQKWCMGKHEFRSNIPCHLVDISCGLPCSATLPCGMHKCQRLCHKGECLVDEPCKQPCTTPRADCGHPCMAPCHTSSPCPVTACKAKVELQCECGRRKEMVICSEASSTYQRIAAISMASKITDMQLGGSVEISKLITKKEVHQARLECDEECSALERKKRLAEAFHISEDSDPFNIRSSGSKFSDSLKEDARKDLKFVSDVEKEMETLVEAVNKVEVETSHWTFL

SEQ ID NO: 844960 - protein, 833 aa, Homo sapiens
MAEAPPVSGTFKFNTDAAEFIPQEKKNSGLNCGTQRRLDSNRIGRRNYSSPPPCHLSRQVPYDEISAVHQHSYHPSGSKPKSQQTSFQSSPCNKSPKSHGLQNQPWQKLRNEKHHIRVKKAQSLAEQTSDTAGLESSTRSESGTDLREHSPSESEKEVVGADPRGAKPKKATQFVYSYGRGPKVKGKLKCEWSNRTTPKPEDAGPESTKPVGVFHPDSSEASSRKGVLDGYGARRNEQRRYPQKRPPWEVEGARPRPGRNPPKQEGHRHTNAGHRNNMGPIPKDDLNERPAKSTCDSENLAVINKSSRRVDQEKCTVRRQDPQVVSPFSRGKQNHVLKNVETHTGSLIEQLTTEKYECMVCCELVRVTAPVWSCQSCYHVFHLNCIKKWARSPASQADGQSGWRCPACQNVSAHVPNTYTCFCGKVKNPEWSRNEIPHSCGEVCRKKQPGQDCPHSCNLLCHPGPCPPCPAFMTKTCECGRTRHTVRCGQAVSVHCSNPCENILNCGQHQCAELCHGGQCQPCQIILNQVCYCGSTSRDVLCGTDVGKSDGFGDFSCLKICGKDLKCGNHTCSQVCHPQPCQQCPRLPQLVRCCPCGQTPLSQLLELGSSSRKTCMDPVPSCGKVCGKPLPCGSLDFIHTCEKLCHEGDCGPCSRTSVISCRCSFRTKELPCTSLKSEDATFMCDKRCNKKRLCGRHKCNEICCVDKEHKCPLICGRKLRCGLHRCEEPCHRGNCQTCWQASFDELTCHCGASVIYPPVPCGTRPPECTQTCARVHECDHPVYHSCHSEEKCPPCTFLTQKWCMGKHEQSHYWASTQKKRSHYMKKIPAHACL

SEQ ID NO: 844961 - protein, 409 aa, Homo sapiens
MDPVPSCGKVCGKPLPCGSLDFIHTCEKLCHEGDCGPCSRTSVISCRCSFRTKELPCTSLKSEDATFMCDKRCNKKRLCGRHKCNEICCVDKEHKCPLICGRKLRCGLHRCEEPCHRGNCQTCWQASFDELTCHCGASVIYPPVPCGTRPPECTQTCARVHECDHPVYHSCHSEEKCPPCTFLTQKWCMGKHEFRSNIPCHLVDISCGLPCSATLPCGMHKCQRLCHKGECLVDEPCKQPCTTPRADCGHPCMAPCHTSSPCPVTACKAKVELQCECGRRKEMVICSEASSTYQRIAAISMASKITDMQLGGSVEISKLITKKEVHQARLECDEECSALERKKRLAEAFHISEDSDPFNIRSSGSKFSDSLKEDARKDLKFVSDVEKEMETLVEAVNKVEVETSHWTFL

SEQ ID NO: 844962 - protein, 557 aa, Homo sapiens
TKARYEAGVESAEAVPHTVRCGQAVSVHCSNPCENILNCGQHQCAELCHGGQCQPCQIILNQVCYCGSTSRDVLCGTDVGKSDGFGDFSCLKICGKDLKCGNHTCSQVCHPQPCQQCPRLPQLVRCCPCGQTPLSQLLELGSSSRKTCMDPVPSCGKVCGKPLPCGSLDFIHTCEKLCHEGDCGPCSRTSVISCRCSFRTKELPCTSLKSEDATFMCDKRCNKKRLCGRHKCNEICCVDKEHKCPLICGRKLRCGLHRCEEPCHRGNCQTCWQASFDELTCHCGASVIYPPVPCGTRPPECTQTCARVHECDHPVYHSCHSEEKCPPCTFLTQKWCMGKHEFRSNIPCHLVDISCGLPCSATLPCGMHKCQRLCHKGECLVDEPCKQPCTTPRADCGHPCMAPCHTSSPCPVTACKAKVELQCECGRRKEMVICSEASSTYQRIAAISMASKITDMQLGGSVEISKLITKKEVHQARLECDEECSALERKKRLAEAFHISEDSDPFNIRSSGSKFSDSLKEDARKDLKFVSDVEKEMETLVEAVNKVEVETSHWTFL

SEQ ID NO: 844963 - protein, 117 aa, Homo sapiens
METLVEAVNKGKNSKKSHSFPPMNRDHRRIIHDLAQVYGLESVSYDSEPKRNVVVTAIRGKSVCPPTTLTGVLEREMQARPPPPIPHHRHQSDKNPGSSNLQKITKEPIIDYFDVQD

SEQ ID NO: 844964 - protein, 693 aa, Homo sapiens
MAEAPPVSGTFKFNTDAAEFIPQEKKNSGLNCGTQRRLDSNRIGRRNYSSPPPCHLSRQVPYDEISAVHQHSYHPSGSKPKSQQTSFQSSPCNKSPKSHGLQNQPWQKLRNEKHHIRVKKAQSLAEQTSDTAGLESSTRSESGTDLREHSPSESEKEVVGADPRGAKPKKATQFVYSYGRGPKVKGKLKCEWSNRTTPKPEDAGPESTKPVGVFHPDSSEASSRKGVLDGYGARRNEQRRYPQKRPPWEVEGARPRPGRNPPKQEGHRHTNAGHRNNMGPIPKDDLNERPAKSTCDSENLAVINKSSRRVDQEKCTVRRQDPQVVSPFSRGKQNHVLKNVETHTGSLIEQLTTEKYECMVCCELVRVTAPVWSCQSCYHVFHLNCIKKWARSPASQADGQSGWRCPACQNVSAHVPNTYTCFCGKVKNPEWSRNEIPHSCGEVCRKKQPGQDCPHSCNLLCHPGPCPPCPAFMTKTCECGRTRHTVRCGQAVSVHCSNPCENILNCGQHQCAELCHGGQCQPCQIILNQVCYCGSTSRDVLCGTDVGKSDGFGDFSCLKICGKDLKCGNHTCSQVCHPQPCQQCPRLPQLVRCCPCGQTPLSQLLELGSSSRKTCMDPVPSCGKVCGKPLPCGSLDFIHTCEKLCHEGDCGPCSRTSVISCRCSFRTKELPCTSLKSEDATFMCDKRCNKLLK

SEQ ID NO: 844965 - protein, 696 aa, Homo sapiens [sequence omitted]

SEQ ID NO: 844966 - protein, 548 aa, Homo sapiens
MAEAPPVSGTFKFNTDAAEFIPQEKKNSGLNCGTQRRLDSNRIGRRNYSSPPPCHLSRQVPYDEISAVHQHSYHPSGSKPKSQQTSFQSSPCNKSPKSHGLQNQPWQKLRNEKHHIRVKKAQSLAEQTSDTAGLESSTRSESGTDLREHSPSESEKEVVGADPRGAKPKKATQFVYSYGRGPKVKGKLKCEWSNRTTPKPEDAGPESTKPVGVFHPDSSEASSRKGVLDGYGARRNEQRRYPQKRPPWEVEGARPRPGRNPPKQEGHRHTNAGHRNNMGPIPKDDLNERPAKSTCDSENLAVINKSSRRVDQEKCTVRRQDPQVVSPFSRGKQNHVLKNVETHTGSLIEQLTTEKYECMVCCELVRVTAPVWSCQSCYHVFHLNCIKKWARSPASQADGQSGWRCPACQNVSAHVPNTYTCFCGKVKNPEWSRNEIPHSCGEVCRKKQPGQDCPHSCNLLCHPGPCPPCPAFMTKTCECGRTRHTVRCGQAVSVHCSNPCENILNCGQHQCAELCHGGQCQPCQIILNQGKWWAHQLAMLVFFSGTLL

SEQ ID NO: 844967 - protein, 476 aa, Homo sapiens
MAEAPPVSGTFKFNTDAAEFIPQEKKNSGLNCGTQRRLDSNRIGRRNYSSPPPCHLSRQVPYDEISAVHQHSYHPSGSKPKSQQTSFQSSPCNKSPKSHGLQNQPWQKLRNEKHHIRVKKAQSLAEQTSDTAGLESSTRSESGTDLREHSPSESEKEVVGADPRGAKPKKATQFVYSYGRGPKVKGKLKCEWSNRTTPKPEDAGPESTKPVGVFHPDSSEASSRKGVLDGYGARRNEQRRYPQKRPPWEVEGARPRPGRNPPKQEGHRHTNAGHRNNMGPIPKDDLNERPAKSTCDSENLAVINKSSRRVDQEKCTVRRQDPQVVSPFSRGKQNHVLKNVETHTGSLIEQLTTEKYECMVCCELVRVTAPVWSCQSCYHVFHLNCIKKWARSPASQADGQSGWRCPACQNVSAHVPNTYTCFCGKVKNPEWSRNEIPHSCGEVCRKKQPGQDCPHSCNLLCHPGPAHLPEWAPEGI

SEQ ID NO: 844968 - protein, 131 aa, Homo sapiens
RYLSESQTSRSHPALINQFSEGGAQDSDFKHTPRKILIQVEVRSPGLEAARPPFMVGPGPAGNVRATPDLHCDSAAEGGLEEMVEELNSGKVMYAFCRVKDPNSGLPKFVLINWTGEGNRARLRLEKKNKF

SEQ ID NO: 844969 - protein, 177 aa, Homo sapiens
  misc_feature (78)..(79): Xaa can be any naturally occurring amino acid
  misc_feature (81)..(82): Xaa can be any naturally occurring amino acid
  misc_feature (87)..(87): Xaa can be any naturally occurring amino acid
  misc_feature (99)..(100): Xaa can be any naturally occurring amino acid
  misc_feature (106)..(106): Xaa can be any naturally occurring amino acid
  misc_feature (116)..(116): Xaa can be any naturally occurring amino acid
  misc_feature (124)..(124): Xaa can be any naturally occurring amino acid
  misc_feature (139)..(139): Xaa can be any naturally occurring amino acid
  misc_feature (155)..(155): Xaa can be any naturally occurring amino acid
MAEAPPVSGTFKFNTDAAEFIPQEKKNSGLNCGTQRRLDSNRIGRRNYSSPPPCHLSRQVPYDEISAVHQHSYHRGGXXGXXGGRGXGGGGGGEEGGRXXGERAEXGGEGGGGESXGQRRRGAXGGRGGGGGRGGEGGXGGGRGGGGGGAGGEGXGGAGEGAGGGGAGEGGGPGGGG

SEQ ID NO: 844970 - protein, 1024 aa, Homo sapiens
MAEAPPVSGTFKFNTDAAEFIPQEKKNSGLNCGTQRRLDSNRIGRRNYSSPPPCHLSRQVPYDEISAVHQHSYHPSGSKPKSQQTSFQSSPCNKSPKSHGLQNQPWQKLRNEKHHIRVKKAQSLAEQTSDTAGLESSTRSESGTDLREHSPSESEKEVVGADPRGAKPKKATQFVYSYGRGPKVKGKLKCEWSNRTTPKPEDAGPESTKPVGVFHPDSSEASSRKGVLDGYGARRNEQRRYPQKRPPWEVEGARPRPGRNPPKQEGHRHTNAGHRNNMGPIPKDDLNERPAKSTCDSENLAVINKSSRRVDQEKCTVRRQDPQVVSPFSRGKQNHVLKNVETHTGSLIEQLTTEKYECMVCCELVRVTAPVWSCQSCYHVFHLNCIKKWARSPASQADGQSGWRCPACQNVSAHVPNTYTCFCGKVKNPEWSRNEIPHSCGEVCRKKQPGQDCPHSCNLLCHPGPCPPCPAFMTKTCECGRTRHTVRCGQAVSVHCSNPCENILNCGQHQCAELCHGGQCQPCQIILNQVCYCGSTSRDVLCGTDVGKSDGFGDFSCLKICGKDLKCGNHTCSQVCHPQPCQQCPRLPQLVRCCPCGQTPLSQLLELGSSSRKTCMDPVPSCGKVCGKPLPCGSLDFIHTCEKLCHEGDCGPCSRTSVISCRCSFRTKELPCTSLKSEDATFMCDKRCNKKRLCGRHKCNEICCVDKEHKCPLICGRKLRCGLHRCEEPCHRGNCQTCWQASFDELTCHCGASVIYPPVPCGTRPPECTQTCARVHECDHPVYHSCHSEEKCPPCTFLTQKWCMGKHEFRSNIPCHLVDISCGLPCSATLPCGMHKCQRLCHKGECLVDEPCKQPCTTPRADCGHPCMAPCHTSSPCPVTACKAKVELQCECGRRKEMVICSEASSTYQRIAAISMASKITDMQLGGSVEISKLITKKEVHQARLECDEECSALERKKRLAEAFHISEDSDPFNIRSSGSKFSDSLKEDARKDLKFVSDVEKEMETLVEAVNKVEVETSHWTFL

SEQ ID NO: 844971 - protein, 691 aa, Homo sapiens
MAEAPPVSGTFKFNTDAAEFIPQEKKNSGLNCGTQRRLDSNRIGRRNYSSPPPCHLSRQVPYDEISAVHQHSYHPSGSKPKSQQTSFQSSPCNKSPKSHGLQNQPWQKLRNEKHHIRVKKAQSLAEQTSDTAGLESSTRSESGTDLREHSPSESEKEVVGADPRGAKPKKATQFVYSYGRGPKVKGKLKCEWSNRTTPKPEDAGPESTKPVGVFHPDSSEASSRKGVLDGYGARRNEQRRYPQKRPPWEVEGARPRPGRNPPKQEGHRHTNAGHRNNMGPIPKDDLNERPAKSTCDSENLAVINKSSRRVDQEKCTVRRQDPQVVSPFSRGKQNHVLKNVETHTGSLIEQLTTEKYECMVCCELVRVTAPVWSCQSCYHVFHLNCIKKWARSPASQADGQSGWRCPACQNVSAHVPNTYTCFCGKVKNPEWSRNEIPHSCGEVCRKKQPGQDCPHSCNLLCHPGPCPPCPAFMTKTCECGRTRHTVRCGQAVSVHCSNPCENILNCGQHQCAELCHGGQCQPCQIILNQVCYCGSTSRDVLCGTDVGKSDGFGDFSCLKICGKDLKCGNHTCSQVCHPQPCQQCPRLPQLVRCCPCGQTPLSQLLELGSSSRKTCMDPVPSCGKVCGKPLPCGSLDFIHTCEKLCHEGDCGPCSRTSVISCRCSFRTKRNGCVDGINVMRYAVWIRSTSVL

SEQ ID NO: 844972 - protein, 578 aa, Homo sapiens
MAVVYSVKPFSFSLCHPGPCPPCPAFMTKTCECGRTRHTVRCGQAVSVHCSNPCENILNCGQHQCAELCHGGQCQPCQIILNQVCYCGSTSRDVLCGTDVGKSDGFGDFSCLKICGKDLKCGNHTCSQVCHPQPCQQCPRLPQLVRCCPCGQTPLSQLLELGSSSRKTCMDPVPSCGKVCGKPLPCGSLDFIHTCEKLCHEGDCGPCSRTSVISCRCSFRTKELPCTSLKSEDATFMCDKRCNKKRLCGRHKCNEICCVDKEHKCPLICGRKLRCGLHRCEEPCHRGNCQTCWQASFDELTCHCGASVIYPPVPCGTRPPECTQTCARVHECDHPVYHSCHSEEKCPPCTFLTQKWCMGKHEFRSNIPCHLVDISCGLPCSATLPCGMHKCQRLCHKGECLVDEPCKQPCTTPRADCGHPCMAPCHTSSPCPVTACKAKVELQCECGRRKEMVICSEASSTYQRIAAISMASKITDMQLGGSVEISKLITKKEVHQARLECDEECSALERKKRLAEAFHISEDSDPFNIRSSGSKFSDSLKEDARKDLKFVSDVEKEMETLVEAVNKVEVETSHWTFL

SEQ ID NO: 844973 - protein, 215 aa, Homo sapiens
LRLGTRLVWNSAEAVPDMQLGGSVEISKLITKKEVHQARLECDEECSALERKKRLAEAFHISEDSDPFNIRSSGSKFSDSLKEDARKDLKFVSDVEKEMETLVEAVNKGKNSKKSHSFPPMNRDHRRIIHDLAQVYGLESVSYDSEPKRNVVVTAIRGKSVCPPTTLTGVLEREMQARPPPPIPHHRHQSDKNPGSSNLQKITKEPIIDYFDVQD

SEQ ID NO: 844974 - protein, 743 aa, Homo sapiens
MAEAPPVSGTFKFNTDAAEFIPQEKKNSGLNCGTQRRLDSNRIGRRNYSSPPPCHLSRQVPYDEISAVHQHSYHPSGSKPKSQQTSFQSSPCNKSPKSHGLQNQPWQKLRNEKHHIRVKKAQSLAEQTSDTAGLESSTRSESGTDLREHSPSESEKEVVGADPRGAKPKKATQFVYSYGRGPKVKGKLKCEWSNRTTPKPEDAGPESTKPVGVFHPDSSEASSRKGVLDGYGARRNEQRRYPQKRPPWEVEGARPRPGRNPPKQEGHRHTNAGHRNNMGPIPKDDLNERPAKSTCDSENLAVINKSSRRVDQEKCTVRRQDPQVVSPFSRGKQNHVLKNVETHTGSLIEQLTTEKYECMVCCELVRVTAPVWSCQSCYHVFHLNCIKKWARSPASQADGQSGWRCPACQNVSAHVPNTYTCFCGKVKNPEWSRNEIPHSCGEVCRKKQPGQDCPHSCNLLCHPGPCPPCPAFMTKTCECGRTRHTVRCGQAVSVHCSNPCENILNCGQHQCAELCHGGQCQPCQIILNQVCYCGSTSRDVLCGTDVGKSDGFGDFSCLKICGKDLKCGNHTCSQVCHPQPCQQCPRLPQLVRCCPCGQTPLSQLLELGSSSRKTCMDPVPSCGKVCGKPLPCGSLDFIHTCEKLCHEGDCGPCSRTSVISCRCSFRTKELPCTSLKSEDATFMCDKRCNKKRLCGRHKCNEICCVVSGLIRHNQIPFIQVLGFWKPEPCGECSPDLKVTGTGP

SEQ ID NO: 844975 - protein, 476 aa, Homo sapiens
MAEAPPVSGTFKFNTDAAEFIPQEKKNSGLNCGTQRRLDSNRIGRRNYSSPPPCHLSRQVPYDEISAVHQHSYHPSGSKPKSQQTSFQSSPCNKSPKSHGLQNQPWQKLRNEKHHIRVKKAQSLAEQTSDTAGLESSTRSESGTDLREHSPSESEKEVVGADPRGAKPKKATQFVYSYGRGPKVKGKLKCEWSNRTTPKPEDAGPESTKPVGVFHPDSSEASSRKGVLDGYGARRNEQRRYPQKRPPWEVEGARPRPGRNPPKQEGHRHTNAGHRNNMGPIPKDDLNERPAKSTCDSENLAVINKSSRRVDQEKCTVRRQDPQVVSPFSRGKQNHVLKNVETHTGSLIEQLTTEKYECMVCCELVRVTAPVWSCQSCYHVFHLNCIKKWARSPASQADGQSGWRCPACQNVSAHVPNTYTCFCGKVKNPEWSRNEIPHSCGEVCRKKQPGQDCPHSCNLLCHPGPASMSFSGTSRA

SEQ ID NO: 844976 - protein, 384 aa, Homo sapiens
MAEAPPVSGTFKFNTDAAEFIPQEKKNSGLNCGTQRRLDSNRIGRRNYSSPPPCHLSRQVPYDEISAVHQHSYHPSGSKPKSQQTSFQSSPCNKSPKSHGLQNQPWQKLRNEKHHIRVKKAQSLAEQTSDTAGLESSTRSESGTDLREHSPSESEKEVVGADPRGAKPKKATQFVYSYGRGPKVKGKLKCEWSNRTTPKPEDAGPESTKPVGVFHPDSSEASSRKGVLDGYGARRNEQRRYPQKRPPWEVEGARPRPGRNPPKQEGHRHTNAGHRNNMGPIPKDDLNERPAKSTCDSENLAVINKSSRRVDQEKCTVRRQDPQVVSPFSRGKQNHVLKNVETHTGSLIEQLTTEKYECMVCCELVRVTAPVWSCQSKTPSRKKK

SEQ ID NO: 844977 - protein, 115 aa, Homo sapiens
KVHVTLRLKRRMKTPQARFYDFLFTLKSPMNYRFQPWRFVPYYETVTVTQIDERFCRTTKVKDVDPELEASTDTDGVDCDENAHVIVLSSDNQCNMKTDYRRKEQIKSINQAYLC

SEQ ID NO: 844978 - protein, 183 aa, Homo sapiens
ILFTLAGWFHSFPGFSLALFSGTSLISFSLFPAFWSLLVSNPGNNNNTNIFSPSCIPTLNWPSQPQPGFCPTQVFLGERGKANLGSKEASLWDQCPLGDDNEIGLDKTLSSSHWPHLQSLCDPSGLGLRAKPQAGGAWGKQIPQLLKLWGGEQSSSTKLWFTLLWLSAPKILELSLKTSEEEI

SEQ ID NO: 844979 - protein, 332 aa, Homo sapiens
MLLLAAAFLVAFVLLLYMVSPLISPKPLALPGAHVVVTGGSSGIGKCIAIECYKQGAFITLVARNEDKLLQAKKEIEMHSINDKQVVLCISVDVSQDYNQVENVIKQAQEKLGPVDMLVNCAGMAVSGKFEDLEVSTFERLMSINYLGSVYPSRAVITTMKERRVGRIVFVSSQAGQLGLFGFTAYSASKFAIRGLAEALQMEVKPYNVYITVAYPPDTDTPGFAEENRTKPLETRLISETTSVCKPEQVAKQIVKDAIQGNFNSSLGSDGYMLSALTCGMAPVTSITEGLQQVVTMGLFRTIALFYLGSFDSIVRRCMMQREKSENADKTA

SEQ ID NO: 844980 - protein, 298 aa, Homo sapiens
MLLLAAAFLVAFVLLLYMVSPLISPKPLALPGAHVVVTGGSSGIGKCIAIECYKQGAFITLVARNEDKLLQAKKEIEMHSINDKQVVLCISVDVSQDYNQVENVIKQAQEKLGPVDMLVNCAGMAVSGKFEDLEVSTFERLMSINYLGSVYPSRAVITTMKERRVGRIVFVSSQAGQLGLFGFTAYSASKFAIRGLAEALQMEVKPYNVYITVAYPPDTDTPGFAEENRTKPLETRLISETTSVCKPEQVAKQIVKDAIVVTMGLFRTIALFYLGSFDSIVRRCMMQREKSENADKTA

SEQ ID NO: 844981 - protein, 332 aa, Homo sapiens; identical to SEQ ID NO: 844979

SEQ ID NO: 844982 - protein, 304 aa, Homo sapiens
MLLLAAAFLVAFVLLLYMVSPLISPKPLALPGAHVVVTGGSSGIGKCIAIECYKQGAFITLVARNEDKLLQAKKEIEMHSINDKQVVLCISVDVSQDYNQVENVIKQAQEKLGPVDMLVNCAGMAVSGKFEDLEVSTFERLMSINYLGSVYPSRAVITTMKERRVGRIVFVSSQAGQLGLFGFTAYSASKFAIRGLAEALQMEVKPYNVYITVAYPPDTDTPGFAEENRTKPLETRLISETTSVCKPEQVAKQIVKDAIQGNFNSSLGSDGYMLSALTCGMAPVTSITEGLQQRWVTNGAFSRN

SEQ ID NO: 844983 - protein, 332 aa, Homo sapiens; identical to SEQ ID NO: 844979

SEQ ID NO: 844984 - protein, 341 aa, Homo sapiens
MLLLAAAFLVAFVLLLYMVSPLISPKPLALPGAHVVVTGGSSGIGKCIAIECYKQGAFITLVARNEDKLLQAKKEIEMHSINDKQVVLCISVDVSQDYNQVENVIKQAQEKLGPVDMLVNCAGMAVSGKFEDLEVSTFERLMSINYLGSVYPSRAVITTMKERRVGRIVFVSSQAGQLGLFGFTAYSASKFAIRGLAEALQMEVKPYNVYITVAYPPDTDTPGFAEENRTKPLETRLISETTSVCKPEQVAKQIVKDAIQGNFNSSLGSDGYMLSALTCGMAPVTSITEGLQQVVTMGLFRTIALFYLGSFDSIVRRCMMQREKSENADKIAAKWDPIFGL

SEQ ID NO: 844985 - protein, 181 aa, Homo sapiens
HEEAVLKSSVLTFGNAAVTLSLRSTALKSCLPLALEPASFFTMREKAGGSTDVKPYNVYITVAYPPDTDTPGFAEENRTKPLETRLISETTSVCKPEQVAKQIVKDAIQGNFNSSLGSDGYMLSALTCGMAPVTSITEGLQQVVTMGLFRTIALFYLGSFDSIVRRCMMQREKSENADKTA

SEQ ID NO: 844986 - protein, 102 aa, Homo sapiens
MLLLAAAFLVAFVLLLYMVSPLISPKPLALPGAHVVVTGGSSGIGKCIAIECYKQGAFITLVARNEDKLLQAKKEIEMHSINDKQVNLCLQNAFSVKLSTAV

SEQ ID NO: 844987 - protein, 1285 aa, Homo sapiens
MEDGKPVWAPHPTDGFQMGNIVDIGPDSLTIEPLNQKGKTFLALINQVFPAEEDSKKDVEDNCSLMYLNEATLLHNIKVRYSKDRIYTYVANILIAVNPYFDIPKIYSSEAIKSYQGKSLGTRPPHVFAIADKAFRDMKVLKMSQSIIVSGESGAGKTENTKFVLRYLTESYGTGQDIDDRIVEANPLLEAFGNAKTVRNNNSSRFGKFVEIHFNEKSSVVGGFVSHYLLEKSRICVQGKEERNYHIFYRLCAGASEDIREKLHLSSPDNFRYLNRGCTRYFANKETDKQILQNRKSPEYLKAGSMKDPLLDDHGDFIRMCTAMKKIGLDDEEKLDLFRVVAGVLHLGNIDFEEAGSTSGGCNLKNKSAQSLEYCAELLGLDQDDLRVSLTTRVMLTTAGGTKGTVIKVPLKVEQANNARDALAKTVYSHLFDHVVNRVNQCFPFETSSYFIGVLDIAGFEYFEHNSFEQFCINYCNEKLQQFFNERILKEEQELYQKEGLGVNEVHYVDNQDCIDLIEAKLVGILDILDEENRLPQPSDQHFTSAVHQKHKDHFRLTIPRKSKLAVHRNIRDDEGFIIRHFAGAVCYETTQFVEKNNDALHMSLESLICESRDKFIRELFESSTNNNKDTKQKAGKLSFISVGNKFKTQLNLLLDKLRSTGASFIRCIKPNLKMTSHHFEGAQILSQLQCSGMVSVLDLMQGGYPSRASFHELYNMYKKYMPDKLARLDPRLFCKALFKALGLNENDYKFGLTKVFFRPGKFAEFDQIMKSDPDHLAELVKRVNHWLTCSRWKKVQWCSLSVIKLKNKIKYRAEACIKMQKTIRMWLCKRRHKPRIDGLVKVGTLKKRLDKFNEVVSVLKDGKPEMNKQIKNLEISIDTLMAKIKSTMMTQEQIQKEYDALVKSSEELLSALQKKKQQEEEAERLRRIQEEMEKERKRREEDEKRRRKEEEERRMKLEMEAKRKQEEEERKKREDDEKRIQAEVEAQLARQKEEESQQQAVLEQERRDRELALRIAQSEAELISDEAQADLALRRNDGTRPKMTPEQMAKEMSEFLSRGPAVLATKAAAGTKKYDLSKWKYAELRDTINTSCDIELLAACREEFHRRLKVYHAWKSKNKKRNTETEQRAPKSVTDYDFAPFLNNSPQQNPAAQIPARQREIEMNRQQRFFRIPFIRPADQYKDPQSKKKGWWYAHFDGPWIARQMELHPDKPPILLVAGKDDMEMCELNLEETGLTRKRGAEILPRQFEEIWERCGGIQYLQNAIESRQARPTYATAMLQSLLK

SEQ ID NO: 844988 - protein, 1253 aa, Homo sapiens
MEDGKPVWAPHPTDGFQMGNIVDIGPDSLTIEPLNQKGKTFLALINQVFPAEEDSKKDVEDNCSLMYLNEATLLHNIKVRYSKDRIYTYVANILIAVNPYFDIPKIYSSEAIKSYQGKSLGTRPPHVFAIADKAFRDMKVLKMSQSIIVSGESGAGKTENTKFVLRYLTESYGTGQDIDDRIVEANPLLEAFGNAKTVRNNNSSRFGKFVEIHFNEKSSVVGGFVSHYLLEKSRICVQGKEERNYHIFYRLCAGASEDIREKLHLSSPDNFRYLNRGCTRYFANKETDKQILQNRKSPEYLKAGSMKDPLLDDHGDFIRMCTAMKKIGLDDEEKLDLFRVVAGVLHLGNIDFEEAGSTSGGCNLKNKSAQSLEYCAELLGLDQDDLRVSLTTRVMLTTAGGTKGTVIKVPLKVEQANNARDALAKTVYSHLFDHVVNRVNQCFPFETSSYFIGVLDIAGFEYFEHNSFEQFCINYCNEKLQQFFNERILKEEQELYQKEGLGVNEVHYVDNQDCIDLIEAKLVGILDILDEENRLPQPSDQHFTSAVHQKHKDHFRLTIPRKSKLAVHRNIRDDEGFIIRHFAGAVCYETTQFVEKNNDALHMSLESLICESRDKFIRELFESSTNNNKDTKQKAGKLSFISVGNKFKTQLNLLLDKLRSTGASFIRCIKPNLKMTSHHFEGAQILSQLQCSGMVSVLDLMQGGYPSRASFHELYNMYKKYMPDKLARLDPRLFCKALFKALGLNENDYKFGLTKVFFRPGKFAEFDQIMKSDPDHLAELVKRVNHWLTCSRWKKVQWCSLSVIKLKNKIKYRAEACIKMQKTIRMWLCKRRHKPRIDGLVKVGTLKKRLDKFNEVVSVLKDGKPEMNKQIKNLEISIDTLMAKIKSTMMTQEQIQKEYDALVKSSEELLSALQKKKQQEEEAERLRRIQEEMEKERKRREEDEKRRRKEEEERRMKLEMEAKRKQEEEERKKREDDEKRIQAEVEAQLARQKEEESQQQAVLEQERRDRELALRIAQSEAELISDEAQADLALRRGPAVLATKAAAGTKKYDLSKWKYAELRDTINTSCDIELLAACREEFHRRLKVYHAWKSKNKKRNTETEQRAPKSVTDYAQQNPAAQIPARQREIEMNRQQRFFRIPFIRPADQYKDPQSKKKGWWYAHFDGPWIARQMELHPDKPPILLVAGKDDMEMCELNLEETGLTRKRGAEILPRQFEEIWERCGGIQYLQNAIESRQARPTYATAMLQSLLK

SEQ ID NO: 844989 - protein, 752 aa, Homo sapiens
MPGLKNTLDNQDCIDLIEAKLVGILDILDEENRLPQPSDQHFTSAVHQKHKDHFRLTIPRKSKLAVHRNIRDDEGFIIRHFAGAVCYETTQFVEKNNDALHMSLESLICESRDKFIRELFESSTNNNKDTKQKAGKLSFISVGNKFKTQLNLLLDKLRSTGASFIRCIKPNLKMTSHHFEGAQILSQLQCSGMVSVLDLMQGGYPSRASFHELYNMYKKYMPDKLARLDPRLFCKALFKALGLNENDYKFGLTKVFFRPGKFAEFDQIMKSDPDHLAELVKRVNHWLTCSRWKKVQWCSLSVIKLKNKIKYRAEACIKMQKTIRMWLCKRRHKPRIDGLVKVGTLKKRLDKFNEVVSVLKDGKPEMNKQIKNLEISIDTLMAKIKSTMMTQEQIQKEYDALVKSSEELLSALQKKKQQEEEAERLRRIQEEMEKERKRREEDEKRRRKEEEERRMKLEMEAKRKQEEEERKKREDDEKRIQAEVEAQLARQKEEESQQQAVLEQERRDRELALRIAQSEAELISDEAQADLALRRGPAVLATKAAAGTKKYDLSKWKYAELRDTINTSCDIELLAACREEFHRRLKVYHAWKSKNKKRNTETEQRAPKSVTDYAQQNPAAQIPARQREIEMNRQQRFFRIPFIRPADQYKDPQSKKKGWWYAHFDGPWIARQMELHPDKPPILLVAGKDDMEMCELNLEETGLTRKRGAEILPRQFEEIWERCGGIQYLQNAIESRQARPTYATAMLQSLLK

SEQ ID NO: 844990 - protein, 583 aa, Homo sapiens
HSQIILDFRTVIDSALCLFVNLGMVSVLDLMQGGYPSRASFHELYNMYKKYMPDKLARLDPRLFCKALFKALGLNENDYKFGLTKVFFRPGKFAEFDQIMKSDPDHLAELVKRVNHWLTCSRWKKVQWCSLSVIKLKNKIKYRAEACIKMQKTIRMWLCKRRHKPRIDGLVKVGTLKKRLDKFNEVVSVLKDGKPEMNKQIKNLEISIDTLMAKIKSTMMTQEQIQKEYDALVKSSEELLSALQKKKQQEEEAERLRRIQEEMEKERKRREEDEKRRRKEEEERRMKLEMEAKRKQEEEERKKREDDEKRIQAEVEAQLARQKEEESQQQAVLEQERRDRELALRIAQSEAELISDEAQADLALRRGPAVLATKAAAGTKKYDLSKWKYAELRDTINTSCDIELLAACREEFHRRLKVYHAWKSKNKKRNTETEQRAPKSVTDYAQQNPAAQIPARQREIEMNRQQRFFRIPFIRPADQYKDPQSKKKGWWYAHFDGPWIARQMELHPDKPPILLVAGKDDMEMCELNLEETGLTRKRGAEILPRQFEEIWERCGGIQYLQNAIESRQARPTYATAMLQSLLK

SEQ ID NO: 844991 - protein, 1302 aa, Homo sapiens
SMLNSLWVSMRDCRASVSSGSAPRKRSVCRNSGIVDPPSKMEDGKPVWAPHPTDGFQMGNIVDIGPDSLTIEPLNQKGKTFLALINQVFPAEEDSKKDVEDNCSLMYLNEATLLHNIKVRYSKDRIYTYVANILIAVNPYFDIPKIYSSEAIKSYQGKSLGTRPPHVFAIADKAFRDMKVLKMSQSIIVSGESGAGKTENTKFVLRYLTESYGTGQDIDDRIVEANPLLEAFGNAKTVRNNNSSRFGKFVEIHFNEKSSVVGGFVSHYLLEKSRICVQGKEERNYHIFYRLCAGASEDIREKLHLSSPDNFRYLNRGCTRYFANKETDKQILQNRKSPEYLKAGSMKDPLLDDHGDFIRMCTAMKKIGLDDEEKLDLFRVVAGVLHLGNIDFEEAGSTSGGCNLKNKSAQSLEYCAELLGLDQDDLRVSLTTRVMLTTAGGTKGTVIKVPLKVEQANNARDALAKTVYSHLFDHVVNRVNQCFPFETSSYFIGVLDIAGFEYFEHNSFEQFCINYCNEKLQQFFNERILKEEQELYQKEGLGVNEVHYVDNQDCIDLIEAKLVGILDILDEENRLPQPSDQHFTSAVHQKHKDHFRLTIPRKSKLAVHRNIRDDEGFIIRHFAGAVCYETTQFVEKNNDALHMSLESLICESRDKFIRELFESSTNNNKDTKQKAGKLSFISVGNKFKTQLNLLLDKLRSTGASFIRCIKPNLKMTSHHFEGAQILSQLQCSGMVSVLDLMQGGYPSRASFHELYNMYKKYMPDKLARLDPRLFCKALFKALGLNENDYKFGLTKVFFRPGKFAEFDQIMKSDPDHLAELVKRVNHWLTCSRWKKVQWCSLSVIKLKNKIKYRAEACIKMQKTIRMWLCKRRHKPRIDGLVKVGTLKKRLDKFNEVVSVLKDGKPEMNKQIKNLEISIDTLMAKIKSTMMTQEQIQKEYDALVKSSEELLSALQKKKQQEEEAERLRRIQEEMEKERKRREEDEKRRRKEEEERRMKLEMEAKRKQEEEERKKREDDEKRIQAEVEAQLARQKEEESQQQAVLEQERRDRELALRIAQSEAELISDEAQADLALRRGPAVLATKAAAGTKKYDLSKWKYAELRDTINTSCDIELLAACREEFHRRLKVYHAWKSKNKKRNTETEQRAPKSVTDYDFAPFLNNSPQQNPAAQIPARQREIEMNRQQRFFRIPFIRPADQYKDPQSKKKGWWYAHFDGPWIARQMELHPDKPPILLVAGKDDMEMCELNLEETGLTRKRGAEILPRQFEEIWERCGGIQYLQNAIESRQARPTYATAMLQSLLK

SEQ ID NO: 844992 - protein, 1058 aa, Homo sapiens
  misc_feature (1058)..(1058): Xaa can be any naturally occurring amino acid
MEDGKPVWAPHPTDGFQMGNIVDIGPDSLTIEPLNQKGKTFLALINQVFPAEEDSKKDVEDNCSLMYLNEATLLHNIKVRYSKDRIYTYVANILIAVNPYFDIPKIYSSEAIKSYQGKSLGTRPPHVFAIADKAFRDMKVLKMSQSIIVSGESGAGKTENTKFVLRYLTESYGTGQDIDDRIVEANPLLEAFGNAKTVRNNNSSRFGKFVEIHFNEKSSVVGGFVSHYLLEKSRICVQGKEERNYHIFYRLCAGASEDIREKLHLSSPDNFRYLNRGCTRYFANKETDKQILQNRKSPEYLKAGSMKDPLLDDHGDFIRMCTAMKKIGLDDEEKLDLFRVVAGVLHLGNIDFEEAGSTSGGCNLKNKSAQSLEYCAELLGLDQDDLRVSLTTRVMLTTAGGTKGTVIKVPLKVEQANNARDALAKTVYSHLFDHVVNRVNQCFPFETSSYFIGVLDIAGFEYFEHNSFEQFCINYCNEKLQQFFNERILKEEQELYQKEGLGVNEVHYVDNQDCIDLIEAKLVGILDILDEENRLPQPSDQHFTSAVHQKHKDHFRLTIPRKSKLAVHRNIRDDEGFIIRHFAGAVCYETTQFVEKNNDALHMSLESLICESRDKFIRELFESSTNNNKDTKQKAGKLSFISVGNKFKTQLNLLLDKLRSTGASFIRCIKPNLKMTSHHFEGAQILSQLQCSGMVSVLDLMQGGYPSRASFHELYNMYKKYMPDKLARLDPRLFCKALFKALGLNENDYKFGLTKVFFRPGKFAEFDQIMKSDPDHLAELVKRVNHWLTCSRWKKVQWCSLSVIKLKNKIKYRAEACIKMQKTIRMWLCKRRHKPRIDGLVKVGTLKKRLDKFNEVVSVLKDGKPEMNKQIKNLEISIDTLMAKIKSTMMTQEQIQKEYDALVKSSEELLSALQKKKQQEEEAERLRRIQEEMEKERKRREEDEKRRRKEEEERRMKLEMEAKRKQEEEERKKREDDEKRIQAEVEAQLARQKEEESQQQAVLEQERRDRELALRIAQSEAELISDEAQADLALRSACENVTDQMPGQWQECKFDESX

SEQ ID NO: 844993 - protein, 1302 aa, Homo sapiens; identical to SEQ ID NO: 844991

SEQ ID NO: 844994 - protein, 1284 aa, Homo sapiens
MEDGKPVWAPHPTDGFQMGNIVDIGPDSLTIEPLNQKGKTFLALINQVFPAEEDSKKDVEDNCSLMYLNEATLLHNIKVRYSKDRIYTYVANILIAVNPYFDIPKIYSSEAIKSYQGKSLGTRPPHVFAIADKAFRDMKVLKMSQSIIVSGESGAGKTENTKFVLRYLTESYGTGQDIDDRIVEANPLLEAFGNAKTVRNNNSSRFGKFVEIHFNEKSSVVGGFVSHYLLEKSRICVQGKEERNYHIFYRLCAGASEDIREKLHLSSPDNFRYLNRGCTRYFANKETDKQILQNRKSPEYLKAGSMKDPLLDDHGDFIRMCTAMKKIGLDDEEKLDLFRVVAGVLHLGNIDFEEAGSTSGGCNLKNKSAQSLEYCAELLGLDQDDLRVSLTTRVMLTTAGGTKGTVIKVPLKVEQANNARDALAKTVYSHLFDHVVNRVNQCFPFETSSYFIGVLDIAGFEYFEHNSFEQFCINYCNEKLQQFFNERILKEEQELYQKEGLGVNEVHYVDNQDCIDLIEAKLVGILDILDEENRLPQPSDQHFTSAVHQKHKDHFRLTIPRKSKLAVHRNIRDDEGFIIRHFAGAVCYETTQFVEKNNDALHMSLESLICESRDKFIRELFESSTNNNKDTKQKAGKLSFISVGNKFKRFCFSWSSPARDGYRGLVELREESRHSQGLQTQLNLLLDKLRSTGASFIRCIKPNLKMTSHHFEGAQILSQLQCSGMVSVLDLMQGGYPSRASFHELYNMYKKYMPDKLARLDPRLFCKALFKALGLNENDYKFGLTKVFFRPGKFAEFDQIMKSDPDHLAELVKRVNHWLTCSRWKKVQWCSLSVIKLKNKIKYRAEACIKMQKTIRMWLCKRRHKPRIDGLVKVGTLKKRLDKFNEVVSVLKDGKPEMNKQIKNLEISIDTLMAKIKSTMMTQEQIQKEYDALVKSSEELLSALQKKKQQEEEAERLRRIQEEMEKERKRREEDEKRRRKEEEERRMKLEMEAKRKQEEEERKKREDDEKRIQAEVEAQLARQKEEESQQQAVLEQERRDRELALRIAQSEAELISDEAQADLALRRGPAVLATKAAAGTKKYDLSKWKYAELRDTINTSCDIELLAACREEFHRRLKVYHAWKSKNKKRNTETEQRAPKSVTDYAQQNPAAQIPARQREIEMNRQQRFFRIPFIRPADQYKDPQSKKKGWWYAHFDGPWIARQMELHPDKPPILLVAGKDDMEMCELNLEETGLTRKRGAEILPRQFEEIWERCGGIQYLQNAIESRQARPTYATAMLQSLLK

SEQ ID NO: 844995 - protein, 541 aa, Homo sapiens
MGNHPASSPKQTPSLNTEAELFCKALFKALGLNENDYKFGLTKVFFRPGKFAEFDQIMKSDPDHLAELVKRVNHWLTCSRWKKVQWCSLSVIKLKNKIKYRAEACIKMQKTIRMWLCKRRHKPRIDGLVKVGTLKKRLDKFNEVVSVLKDGKPEMNKQIKNLEISIDTLMAKIKSTMMTQEQIQKEYDALVKSSEELLSALQKKKQQEEEAERLRRIQEEMEKERKRREEDEKRRRKEEEERRMKLEMEAKRKQEEEERKKREDDEKRIQAEVEAQLARQKEEESQQQAVLEQERRDRELALRIAQSEAELISDEAQADLALRRGPAVLATKAAAGTKKYDLSKWKYAELRDTINTSCDIELLAACREEFHRRLKVYHAWKSKNKKRNTETEQRAPKSVTDYAQQNPAAQIPARQREIEMNRQQRFFRIPFIRPADQYKDPQSKKKGWWYAHFDGPWIARQMELHPDKPPILLVAGKDDMEMCELNLEETGLTRKRGAEILPRQFEEIWERCGGIQYLQNAIESRQARPTYATAMLQSLLK

SEQ ID NO: 844996 - protein, 1302 aa, Homo sapiens; identical to SEQ ID NO: 844991

SEQ ID NO: 844997 - protein, 600 aa, Homo sapiens
SNSCSKNEIDIDAFRHYSFSDQPKCSQYISGLMSVQWTPRMRPSCSRSLESLRVGAKPPPFQRWPSDSWIRCGAHRDWDEPPPRGGRMDGWSGDRARAAAPTGLQPPGCKDHGCSSGSPFRDPAGSSVIRSGKGDRPEGPSFLRPPAVTVKKLQKWMYKGRLLSLGMKGRARGTAPKVTGTQAASPNVGALKVRENRVLSVPPDQRITLTDLFENAYGSSMKGRELEELKDNIEFRGHKPLNSITVSKKRNWLYQSTLRPLNLEEENKKCQDRSHLSISPVSLPKHQLSQSFLKSSKEYCTYVVCNATNSSLSKNCALDFNEENDADDEGEIWYNPIPEDDDLGISSALSFGEADSAVLKLPAVNLSMLSGSDLMKAERHTEDSLCSSEHAGDIQTTRSNGMNPIHPAHSTEFVQQYKQKLGHKTQEGIMVEDSPMLKSPFAGSGILAATNSTELGIMEPSSPNPSPVKKGSSINWSLPDKIKSPRTVRKLSMKMKKLPEFSRKLSVKGTLNYINSPDNTPSLSKYNCREIHHTDILPSGNTTTAAKRNVISRYHLDTSVSSQQSYQKKNSMSSKYSCKGGYLSDGDSPELTTKASKHGS

SEQ ID NO: 844998 - protein, 579 aa, Homo sapiens
RLRTQLREAYYLLIQAMHDLPPDSGARRGGRGLADHSFPAGARAPGQPPSRGAAYRRACPRDGERGGGGRPRQQVSPPRSPQREPRGGQLRTPRMRPSCSRSLESLRVGAKPPPFQRWPSDSWIRCGAHRDWDEPPPRGGRMDGWSGDRARAAAPTGLQPPGCKDHGCSSGSPFRDPAGSSVIRSGKGDRPEGPSFLRPPAVTVKKLQKWMYKGRLLSLGMKGRARGTAPKVTGTQAASPNVGALKVRENRVLSVPPDQRITLTGRILCDENASTASLTVYRLGFCLKSQEKVMFLRQTMAGRIEVVISSRKTSVSIPKVLPKGDKDLFENAYGSSMKGRELEELKDNIEFRGHKPLNSITVSKKRNWLYQSTLRPLNLEEENKKCQDRSHLSISPVSLPKHQLSQSFLKSSKEYCTYVVCNATNSSLSKNCALDFNEENDADDEGEIWYNPIPEDDDLGISSALSFGEADSAVLKLPAVNLSMLSGSDLMKAERHTEDSLCSSEHAGDIQTTRSNGMNPIHPAHSTEFVQQYKQKLGHKTQEGIMVEDSPMLKSPFAGKNDHICVFLSSSIFELFDNS

SEQ ID NO: 844999 - protein, 551 aa, Homo sapiens
RLRTQLREAYYLLIQAMHDLPPDSGARRGGRGLADHSFPAGARAPGQPPSRGAAYRRACPRDGERGGGGRPRQQVSPPRSPQREPRGGQLRTPRMRPSCSRSLESLRVGAKPPPFQRWPSDSWIRCGAHRDWDEPPPRGGRMDGWSGDRARAAAPTGLQPPGCKDHGCSSGSPFRDPAGSSVIRSGKGDRPEGPSFLRPPAVTVKKLQKWMYKGRLLSLGMKGRARGTAPKVTGTQAASPNVGALKVRENRVLSVPPDQRITLTGRILCDENASTASLTVYRLGFCLKSQEKVMFLLTDLFENAYGSSMKGRELEELKDNIEFRGHKPLNSITVSKKRNWLYQSTLRPLNLEEENKKCQDRSHLSISPVSLPKHQLSQSFLKSSKEYCTYVVCNATNSSLSKNCALDFNEENDADDEGEIWYNPIPEDDDLGISSALSFGEADSAVLKLPAVNLSMLSGSDLMKAERHTEDSLCSSEHAGDIQTTRSNGMNPIHPAHSTEFVQQYKQKLGHKTQEGIMVEDSPMLKSPFAGKNDHICVFLSSSIFELFDNS

SEQ ID NO: 845000 - protein, 115 aa, Homo sapiens
LQVSPQVSSRAWEKQSAVPQPGLLRSSVERIYSDYNNQVLQKRCDEESEQQRFEGNKTLSTKVLLLVFSLVPIRASLEVKRADTVAEWLVGESLRDYPRNSVAARGGAASQKMEF

SEQ ID NO: 845001 - protein, 118 aa, Homo sapiens
LQVSPQVSSRAWEKQSAVPQPGLLRSSVERIYSDYNNQVLQKRCDEESEQQRFEGNKTLSTKVLLLVFSLVPIRASLEVKRADTVAEWLVGESLRDYPRNSVAARGGAASQEIFRDAR

SEQ ID NO: 845002 - protein, 131 aa, Homo sapiens
PGSHSAVVGKQGVSEGNLGTLLPSPFKDVLGWNKERWRVGCLAQPPWLLVLLSSAGSSGKAWAWGGGLGAVFSCGVVGSFVFQDGPVGSVWGRKELGAWAACVSAGCCQHRHGPSNFSEPDAGDAEVNPET

SEQ ID NO: 845003 - protein, 131 aa, Homo sapiens; identical to SEQ ID NO: 845002

SEQ ID NO: 845004 - protein, 101 aa, Homo sapiens
LKGPISKNSHIAGYCFNICIWGRGHHSVLNRVVTANMESQSLLPFRIPAPTQGWGGGAERYGKQTRRVAGTMLGWLRSASEDIWNWQGSVQGGGGPGRAVS

SEQ ID NO: 845005 - protein, 175 aa, Homo sapiens
PGSHSAVVGKQGVSEGNLGTLLPSPFKDVLGWNKERWRVGCLAQPPWLLVLLSSAGSSGKAWAWGGGLGAVFSCGVVGSFVFQDGPVGSVWGRKELGAWAACVSAGCCQVAPSGPHLQDSWPGLLFGPRVTLDSGHSDLAVRLRWFSSPLGDSLKISSSSHLLGWSLPWIGTLPG

SEQ ID NO: 845006 - protein, 131 aa, Homo sapiens; identical to SEQ ID NO: 845002

SEQ ID NO: 845007 - protein, 68 aa, Homo sapiens
RSQLDYEVPREKAFQKSSTGFSPETSFLDSQVMTALKMERYLKKIHFLYLNVAPSRYFRDGVLPHWPS

SEQ ID NO: 845008 - protein, 221 aa, Homo sapiens
MSETAPLAPTIPAPAEKTPVKKKAKKAGATAGKRKASGPPVSELITKAVAASKERSGVSLAALKKALAAAGYDVEKNNSRIKLGLKSLVSKGTLVQTKGTGASGSFKLNKKAASGEGKPKAKKAGAAKPRKPAGAAKKPKKVAGAATPKKSIKKTPKKVKKPATAAGTKKVAKSAKKVKTPQPKKAAKSPAKAKAPKPKAAKPKSGKPKVTKAKKAAPKKK

SEQ ID NO: 845009 - protein, 425 aa, Homo sapiens
AAASPAPSEEAGCGGERRLRGHGRASVALGRAHRPQPERWWQPPQKAFPGGGGGGPWSSAAGMSGSCAAPGPGSGSSPAACRFAHYFVLCGIDADSGLEPDELAGENFDQSPLRRTFKSKVLAHYPQNIEWNPFDQDAVNMIINALMTVAEGITTLLFPFQWQHVYVPILPASLLHFLDAPVPYLMGLQSKEGTDRSKLELPQEANLCFVDIDNHFIELPEEFPQFPNKVDFIQELSEVLVQFGIPPEGSLHCSESTSKLKNMVLKDLVNDKKNGNVCTNNISMYELLKGNETIARLQALAKRTGVAVEKMDLSASLGEKDKDLKLHCEEAELRDYQLNVQLREVFANRFTQMFADYEAFVIQTAQDMESWLTNREQMQNFDKVKRTIVFLLWLLVALLLILTFLNFLFFCAYAYPYIIDFVNLF

SEQ ID NO: 845010 - protein, 363 aa, Homo sapiens
AAASPAPSEEAGCGGERRLRGHGRASVALGRAHRPQPERWWQPPQKAFPGGGGGGPWSSAAGMSGSCAAPGPGSGSSPAACRFAHYFVLCGIDADSGLEPDELAGENFDQSPLRRTFKSKVLAHYPQNIEWNPFDQDAVNMLCMPKGLSFRTQTDNKDPQFHSFIITREDGSRTYGFVLTFYEEVTSKQICTAMQTLYQMHNAEQYSSVYASSSCSMDSLASSLDEGDTTSLLKLQRYNSYDISRDTLYVSKSICLITPLPFMQACKKFLIQLYKAVTSQQPPPLPLESYIHNILYEVPLPPPGRSLKFYGVYEPVICQRPGPSELPLSDYPLREAFELLGLENLVQVFTCVLLEMQILLYSQ

SEQ ID NO: 845011 - protein, 385 aa, Homo sapiens
AAASPAPSEEAGCGGERRLRGHGRASVALGRAHRPQPERWWQPPQKAFPGGGGGGPWSSAAGMSGSCAAPGPGSGSSPAACRFAHYFVLCGIDADSGLEPDELAVWYNGLEADRHGKSQGAANTTSGENFDQSPLRRTFKSKVLAHYPQNIEWNPFDQDAVNMLCMPKGLSFRTQTDNKDPQFHSFIITREDGSRTYGFVLTFYEEVTSKQICTAMQTLYQMHNAEQYSSVYASSSCSMDSLASSLDEGDTTSLLKLQRYNSYDISRDTLYVSKSICLITPLPFMQACKKFLIQLYKAVTSQQPPPLPLESYIHNILYEVPLPPPGRSLKFYGVYEPVICQRPGPSELPLSDYPLREAFELLGLENLVQVFTCVLLEMQILLYSQ

SEQ ID NO: 845012 - protein, 172 aa, Homo sapiens
SAEPYAILRRSAEQYSSVYASSSCSMDSLASSLDEGDTTSLLKLQRYNSYDISRDTLYVSKSICLITPLPFMQACKKFLIQLYKAVTSQQPPPLPLESYIHNILYEVPLPPPGRSLKFYGVYEPVICQRPGPSELPLSDYPLREAFELLGLENLVQVFTCVLLEMQILLYSQ

SEQ ID NO: 845013 - protein, 457 aa, Homo sapiens
AAASPAPSEEAGCGGERRLRGHGRASVALGRAHRPQPERWWQPPQKAFPGGGGGGPWSSAAGMSGSCAAPGPGSGSSPAACRFAHYFVLCGIDADSGLEPDELAGENFDQSPLRRTFKSKVLAHYPQNIEWNPFDQDAVNMIINALMTVAEGITTLLFPFQWQHVYVPILPASLLHFLDAPVPYLMGLQSKEGTDRSKLELPQEANLCFVDIDNHFIELPEEFPQFPNKVDFIQELSEVLVQFGIPPEGSLHCSESTSKLKNMVLKDLVNDKKNGNVCTNNISMYELLKGNETIARLQALAKRTGVAVEKMDLSASLGEKDKDLKLHCEEAELRDYQLNVQLREVFANRFTQMFADYEAFVIQTAQDMESWLTNREQMQNFDKASFLSDQPEPYLPFLSRFIETQMFATFIDNKIMSQWEEKDPLLRVFDTRIDKIRLYNVRAPTLRTSIYQKCSTL

SEQ ID NO: 845014 - protein, 171 aa, Homo sapiens
RSISDTHAAAAEQYSSVYASSSCSMDSLASSLDEGDTTSLLKLQRYNSYDISRDTLYVSKSICLITPLPFMQACKKFLIQLYKAVTSQQPPPLPLESYIHNILYEVPLPPPGRSLKFYGVYEPVICQRPGPSELPLSDYPLREAFELLGLENLVQVFTCVLLEMQILLYSQ

SEQ ID NO: 845015 - protein, 262 aa, Homo sapiens
VRRPHLTSDAVALLRDNVTPRENELWTSLGDSWTRPGLELSPEEGPPYRPEFFSGWEPPVTDPQSRAWEDPVEKQLQHERRRRQQSAPQVAVNGHRDLEPESEPQLESETAGKWVLCNYDFQARNSSELSVKQRDVLEVLDDSRKWWKVRDPAGQEGYVPYNILTPYPGPRLHHSQSPARSLNSTPPPPPAPAPAPPPALARPAGTGPAGTAAIAQRLGPQREGEISQMLIVNEELQARLARAARDRAAQSQGPAPRNRSSA

SEQ ID NO: 845016 - protein, 137 aa, Homo sapiens
RGCRGPEDPPSPLHSHRDLEPESEPQLESETAGKWVLCNYDFQARNSSELSVKQRDVLEVLDDSRKWWKVRDPAGQEGYVPPPSRFPGSRLLGMRLCVSLPASPTFSLHSFLRPGPAPLQTLPSVQPLRFAPAVSAG

SEQ ID NO: 845017 - protein, 123 aa, Homo sapiens
LVLEVSIAYEFGGGTETYERSQHEARTSEVPRHCYETPHVPLVDAAGPSMHTSRLRVTLDEPPLPAGSMLQLSHAVDENEGYDHCVGGVCVAIAGITCGIVERLSVGKKTHSEVTPIYVKLSP

SEQ ID NO: 845018 - protein, 138 aa, Homo sapiens
GQLQQKKMKRDLHQMRSRLAQERSVKLDALQRAEELQGQLHDAQRSAVPMGSSGDLISQAQYSPTSASTSSRYSQQRFLKTNLKGSKITRWIQRPQTVPIKHKKRTDDVFLPNMAENVQLTAFQVQTAPSRFPFRADW

SEQ ID NO: 845019 - protein, 121 aa, Homo sapiens
GPTAAEKNEEGPPPDEKPACPGAQCEAGCSPACRGAAGSTSRCPAVSCPHGLVRRYSQQRFLKTNLKGSKITRWIQRPQTVPIKHKKRTDDVFLPNMAENVQLTAFQVQTAPSRFPFRADW

SEQ ID NO: 845020 - protein, 138 aa, Homo sapiens; identical to SEQ ID NO: 845018

SEQ ID NO: 845021 - protein, 40 aa, Homo sapiens
MCQGWWLMPVIPALCKATVGRYLSPGVGDQPGPHGKTCSL

SEQ ID NO: 845022 - protein, 102 aa, Homo sapiens
  misc_feature (1)..(1): Xaa can be any naturally occurring amino acid
  misc_feature (11)..(11): Xaa can be any naturally occurring amino acid
XESTQRPAGFXRNRYAMIRFQLGPAAFKSHKQRPCGIVRRKGLVWQELVYNIFANLKLLHTMTSHLGGLGGRHLPLPPRVCGLDSLNCPFPYRVSSFGLLYF

SEQ ID NO: 845023 - protein, 158 aa, Homo sapiens [sequence omitted]

SEQ ID NO: 845024 - protein, 158 aa, Homo sapiens [sequence omitted]

SEQ ID NO: 845025 - protein, 158 aa, Homo sapiens [sequence omitted]

SEQ ID NO: 845026 - protein, 158 aa, Homo sapiens [sequence omitted]

SEQ ID NO: 845027 - protein, 158 aa, Homo sapiens [sequence omitted]

SEQ ID NO: 845028 - protein, 158 aa, Homo sapiens [sequence omitted]

SEQ ID NO: 845029 - protein, 158 aa, Homo sapiens [sequence omitted]

SEQ ID NO: 845030 - protein, 130 aa, Homo sapiens
MSGIALSRLAQERKAWRKDHPFTPWEGGLFKLRMLFKDDYPSSPPKCKFEPPLFHPNVYPSGTVCLSILEEDKDWRPAITIKQILLGIQELLNEPNIQDPAQAEAYTIYCQNRVEYEKRVRAQAKKFAPS

SEQ ID NO: 845031 - protein, 110 aa, Homo sapiens [sequence omitted]

SEQ ID NO: 845032 - protein, 110 aa, Homo sapiens [sequence omitted]

SEQ ID NO: 845033 - protein, 126 aa, Homo sapiens
IPQQRAHACSHSGQPRSCWCRPCAPAVWDGRGVGRSAVVSSRSPGSVPCASPWYLKSRKLPADVAVGITGQMQWSVGASVRGSCRCSWRVGFLVIPPAALDMPHCVSFRSIEREEGGCPGKRWEIA

SEQ ID NO: 845034 - protein, 91 aa, Homo sapiens
ARATGSARRRGRRSGPGGRSGARGRRAEGSPALGPAPRAPPAPGSSELLWLRAERAPEGSPETKGSAAAAAPLGPPPVRYARRGCGRPRLP

SEQ ID NO: 845035 - protein, 150 aa, Homo sapiens
ARATGSARRRGRRSGPGGRSGARGRRAEGSPALGPAPRAPPAPGSSELLWLRAERAPEGSPETKGSAAAAAPLGPPPVRYARRGCGRPRDFEHVGDRPQQTRPGEESMEERPPIWFRGCPNKKSRWHDEPHELGVRHSRKERDSVGRRLV

SEQ ID NO: 845036 - protein, 158 aa, Homo sapiens [sequence omitted]

SEQ ID NO: 845037 - protein, 110 aa, Homo sapiens
WGEGTGVLLALPAPVCGTRCPPAQPPTPVSSSPFQEGLSDSLSGHGRGPDRPLGGAGPGFRLVWEPPLSGLWPPVSSQSWRLCPRSDPLPPGPACGRQAAHLTTVYFPTG

SEQ ID NO: 845038 - protein, 185 aa, Homo sapiens
MARAPPRSVLHLSATLAGAAAARGTLNMSGIALSRLAQERKAWRKDHPFGFVAVPTKNPDGTMNLMNWECAIPGKKGTPWEGGLFKLRMLFKDDYPSSPPKCKFEPPLFHPNVYPSGTVCLSILEEDKDWRPAITIKQILLGIQELLNEPNIQDPAQAEAYTIYCQNRVEYEKRVRAQAKKFAPS

SEQ ID NO: 845039 - protein, 158 aa, Homo sapiens [sequence omitted]

SEQ ID NO: 845040 - protein, 158 aa, Homo sapiens [sequence omitted]

SEQ ID NO: 845041 - protein, 158 aa, Homo sapiens [sequence omitted]

SEQ ID NO: 845042 - protein, 198 aa, Homo sapiens
SVTVLRRFRGSLGLSGLWPPAPGPDPKETSGTCGWRGTLNMSGIALSRLAQERKAWRKDHPFGFVAVPTKNPDGTMNLMNWECAIPGKKGTPWEGGLFKLRMLFKDDYPSSPPKCKFEPPLFHPNVYPSGTVCLSILEEDKDWRPAITIKQILLGIQELLNEPNIQDPAQAEAYTIYCQNRVEYEKRVRAQAKKFAPS

SEQ ID NO: 845043 - protein, 158 aa, Homo sapiens [sequence omitted]

SEQ ID NO: 845044 - protein, 345 aa, Homo sapiens
MARAPPRSVLHLSATLAGAAAARGERVRGPGRGRGAGVGPRPLLLLGPGPRLPRAPPRRAGPRAAAELSGEPERPRARRRLGPRCWRRWAAARAAGPPQAFGAGAPPLRPRGAPGAGPGQPPAAGAPRGRAFLLRGERLPGSRSPRGRIGWAAGGESWIATSLARGGGGRRAGLFSVPENQNKWTLNMSGIALSRLAQERKAWRKDHPFGFVAVPTKNPDGTMNLMNWECAIPGKKGTPWEGGLFKLRMLFKDDYPSSPPKCKFEPPLFHPNVYPSGTVCLSILEEDKDWRPAITIKQILLGIQELLNEPNIQDPAQAEAYTIYCQNRVEYEKRVRAQAKKFAPS

SEQ ID NO: 845045 - protein, 173 aa, Homo sapiens
GTEAVLCLLCSRTLNMSGIALSRLAQERKAWRKDHPFGFVAVPTKNPDGTMNLMNWECAIPGKKGTPWEGGLFKLRMLFKDDYPSSPPKCKFEPPLFHPNVYPSGTVCLSILEEDKDWRPAITIKQILLGIQELLNEPNIQDPAQAEAYTIYCQNRVEYEKRVRAQAKKFAPS

SEQ ID NO: 845046 - protein, 224 aa, Homo sapiens
AGNGERSAAREALGAGRQERRARQACRGQPRVRPRPARPARARVLGAALAARGAGSGGKSRDKGKRRRRRPARSSTCPLRSPGLRPPEGFVAVPTKNPDGTMNLMNWECAIPGKKGTPWEGGLFKLRMLFKDDYPSSPPKCKFEPPLFHPNVYPSGTVCLSILEEDKDWRPAITIKQILLGIQELLNEPNIQDPAQAEAYTIYCQNRVEYEKRVRAQAKKFAPS

SEQ ID NO: 845047 - protein, 199 aa, Homo sapiens
GTEAVLCLLCSRTLNMSGIALSRLAQERKAWRKDHPFGFVAVPTKNPDGTMNLMNWECAIPGKKGTPWEGGLFKLRMLFKDDYPSSPPKCKFEPPLFHPNVYPSGTVCLSILEEDKDWRPAITIKQILLGIQELLNEPNIQDPAQAEAYTIYWLVAALAPLVAAPPRPSQGRLAGREWSTQAHPRDSQGPRLCGEGRGA

SEQ ID NO: 845048 - protein, 167 aa, Homo sapiens
MGSEHGESSSRSWACHVGVEGGGTCGVSESSPVRDSLETVVGGRSTPLWARTLPDPSCAPHFLPVWPLLPAPSLRGGHGEGQTVQRAGGLRAPLHHVRRAWGRTSWWGPIWGCLQPGPACLGLSRGPGGQCPAGPCHPLAVTPAPADWRTQVPSPAFSQAALRICVW

SEQ ID NO: 845049 - protein, 141 aa, Homo sapiens
VLRHELIYEDTEDARWRVPQGLGGRSACALLLLCYLNVVPSLGRQTSLTTSVIPKAEQSVAYKDFIYFTVFEGNVRNVSEVSVEYLCSQPCVVNLEAVVSSEFRSSIPVYKKRWKNEKHLHTSRTQIVHVKMIPTPPDRYS

SEQ ID NO: 845050 - protein, 1122 aa, Homo sapiens
QWWRWRRHHTKPSGNIQNVPRTSRQGGAQPGCKHASKEAVPTPQNVVPSLGRQTSLTTSVIPKAEQSVAYKDFIYFTVFEGNVRNVSEVSVEYLCSQPCVVNLEAVVSSEFRSSIPVYKKRWKNEKHLHTSRTQIVHVKFPSIMVYRDDYFIRHSISVSAVIVRAWITHKYSGRDWNVKWEENLLHAVAKNYTLLQTIPPFERPFKDHQVCLEWNMGYIWNLRANRIPQCPLENDVVALLGFPYASSGENTGIVKKFPRFRNRELEATRRQRMDYPVFTVSLWLYLLHYCKANLCGILYFVDSNEMYGTPSVFLTEEGYLHIQMHLVKGEDLAVKTKFIIPLKEWFRLDISFNGGQIVVTTSIGQDLKSYHNQTISFREDFHYNDTAGYFIIGGSRYVAGIEGFFGPLKYYRLRSLHPAQIFNPLLEKQLAEQIKLYYERCAEVQEIVSVYASAAKHGGERQEACHLHNSYLDLQRRYGRPSMCRAFPWEKELKDKHPSLFQALLEMDLLTVPRNQNESVSEIGGKIFEKAVKRLSSIDGLHQISSIVPFLTDSSCCGYHKASYYLAVFYETGLNVPRDQLQGMLYSLVGGQGSERLSSMNLGYKHYQGIDNYPLDWELSYAYYSNIATKTPLDQHTLQGDQAYVETIRLKDDEILKVQTKEDGDVFMWLKHEATRGNAAAQQRLAQMLFWGQQGVAKNPEAAIEWYAKGALETEDPALIYDYAIVLFKGQGVKKNRRLALELMKKAASKGLHQAVNGLGWYYHKFKKNYAKAAKYWLKAEEMGNPDASYNLGVLHLDGIFPGVPGRNQTLAGEYFHKAAQGGHMEGTLWCSLYYITGNLETFPRDPEKAVVWAKHVAEKNGYLGHVIRKGLNAYLEGSWHEALLYYVLAAETGIEVSQTNLAHICEERPDLARRYLGVNCVWRYYNFSVFQIDAPSFAYLKMGDLYYYGHQNQSQDLELSVQMYAQAALDGDSQGFFNLALLIEEGTIIPHHILDFLEIDSTLHSNNISILQELYERCWSHSNEESFSPCSLAWLYLHLRLLWGAILHSALIYFLGTFLLSILIAWTVQYFQSVSASDPPPRPSQASPDTATSTASPAVTPAADASDQDQPTVTNNPEPRG

SEQ ID NO: 845051 - protein, 539 aa, Homo sapiens
MLYSLVGGQGSERLSSMNLGYKHYQGIDNYPLDWELSYAYYSNIATKTPLDQHTLQGDQAYVETIRLKDDEILKVQTKEDGDVFMWLKHEATRGNAAAQQRLAQMLFWGQQGVAKNPEAAIEWYAKGALETEDPALIYDYAIVLFKGQGVKKNRRLALELMKKAASKGLHQAVNGLGWYYHKFKKNYAKAAKYWLKAEEMGNPDASYNLGVLHLDGIFPGVPGRNQTLAGEYFHKAAQGGHMEGTLWCSLYYITGNLETFPRDPEKAVVWAKHVAEKNGYLGHVIRKGLNAYLEGSWHEALLYYVLAAETGIEVSQTNLAHICEERPDLARRYLGVNCVWRYYNFSVFQIDAPSFAYLKMGDLYYYGHQNQSQDLELSVQMYAQAALDGDSQGFFNLALLIEEGTIIPHHILDFLEIDSTLHSNNISILQELYERCWSHSNEESFSPCSLAWLYLHLRLLWGAILHSALIYFLGTFLLSILIAWTVQYFQSVSASDPPPRPSQASPDTATSTASPAVTPAADASDQDQPTVTNNPEPRG

SEQ ID NO: 845052 - protein, 475 aa, Homo sapiens
TASTSLGVESAEDKEDGDVFMWLKHEATRGNAAAQQRLAQMLFWGQQGVAKNPEAAIEWYAKGALETEDPALIYDYAIVLFKGQGVKKNRRLALELMKKAASKGLHQAVNGLGWYYHKFKKNYAKAAKYWLKAEEMGNPDASYNLGVLHLDGIFPGVPGRNQTLAGEYFHKAAQGGHMEGTLWCSLYYITGNLETFPRDPEKAVVWAKHVAEKNGYLGHVIRKGLNAYLEGSWHEALLYYVLAAETGIEVSQTNLAHICEERPDLARRYLGVNCVWRYYNFSVFQIDAPSFAYLKMGDLYYYGHQNQSQDLELSVQMYAQAALDGDSQGFFNLALLIEEGTIIPHHILDFLEIDSTLHSNNISILQELYERCWSHSNEESFSPCSLAWLYLHLRLLWGAILHSALIYFLGTFLLSILIAWTVQYFQSVSASDPPPRPSQASPDTATSTASPAVTPAADASDQDQPTVTNNPEPRG

SEQ ID NO: 845053 - protein, 1114 aa, Homo sapiens
VLRHELIYEDTEDARWRVPQGLGGRSACALLLLCYLNVVPSLGRQTSLTTSVIPKAEQSVAYKDFIYFTVFEGNVRNVSEVSVEYLCSQPCVVNLEAVVSSEFRSSIPVYKKRWKNEKHLHTSRTQIVHVKFPSIMVYRDDYFIRHSISVSAVIVRAWITHKYSGRDWNVKWEENLLHAVAKNYTLLQTIPPFERPFKDHQVCLEWNMGYIWNLRANRIPQCPLENDVVALLGFPYASSGENTGIVKKFPRFRNRELEATRRQRMDYPVFTVSLWLYLLHYCKANLCGILYFVDSNEMYGTPSVFLTEEGYLHIQMHLVKGEDLAVKTKFIIPLKEWFRLDISFNGGQIVVTTSIGQDLKSYHNQTISFREDFHYNDTAGYFIIGGSRYVAGIEGFFGPLKYYRLRSLHPAQIFNPLLEKQLAEQIKLYYERCAEVQEIVSVYASAAKHGGERQEACHLHNSYLDLQRRYGRPSMCRAFPWEKELKDKHPSLFQALLEMDLLTVPRNQNESVSEIGGKIFEKAVKRLSSIDGLHQISSIVPFLTDSSCCGYHKASYYLAVFYETGLNVPRDQLQGMLYSLVGGQGSERLSSMNLGYKHYQGIDNYPLDWELSYAYYSNIATKTPLDQHTLQGDQAYVETIRLKDDEILKVQTKEDGDVFMWLKHEATRGNAAAQQRLAQMLFWGQQGVAKNPEAAIEWYAKGALETEDPALIYDYAIVLFKGQGVKKNRRLALELMKKAASKGLHQAVNGLGWYYHKFKKNYAKAAKYWLKAEEMGNPDASYNLGVLHLDGIFPGVPGRNQTLAGEYFHKAAQGGHMEGTLWCSLYYITGNLETFPRDPEKAVVWAKHVAEKNGYLGHVIRKGLNAYLEGSWHEALLYYVLAAETGIEVSQTNLAHICEERPDLARRYLGVNCVWRYYNFSVFQIDAPSFAYLKMGDLYYYGHQNQSQDLELSVQMYAQAALDGDSQGFFNLALLIEEGTIIPHHILDFLEIDSTLHSNNISILQELYERCWSHSNEESFSPCSLAWLYLHLRLLWGAILHSALIYFLGTFLLSILIAWTVQYFQSVSASDPPPRPSQASPDTATSTASPAVTPAADASDQDQPTVTNNPEPRG

SEQ ID NO: 845054 - protein, 379 aa, Homo sapiens [sequence omitted]

SEQ ID NO: 845055 - protein, 1114 aa, Homo sapiens; identical to SEQ ID NO: 845053

SEQ ID NO: 845056 - protein, 172 aa, Homo sapiens
LLVPVRIPGMKKAASKGLHQAVNGLGWYYHKFKKNYAKAAKYWLKAEEMGNPDASYNLGVLHLDGIFPGVPGRNQTLAGEYFHKAAQGGHMEGTLWCSLYYITGNLETFPRDPEKAVVWAKHVAEKNGYLGHVIRKGLNAYLEGSWPQKVQNFYLVPSKKRDQCLRFRPPLP

SEQ ID NO: 845057 - protein, 1072 aa, Homo sapiens
VLRHELIYEDTEDARWRVPQGLGGRSACALLLLCYLNVVPSLGRQTSLTTSVIPKAEQSVAYKDFIYFTVFEGNVRNVSEVSVEYLCSQPCVVNLEAVVSSEFRSSIPVYKKRWKNEKHLHTSRTQIVHVKFPSIMVYRDDYFIRHSISVSAVIVRAWITHKYSGRDWNVKWEENLLHAVAKNYTLLQTIPPFERPFKDHQVCLEWNMGYIWNLRANRIPQCPLENDVVALLGFPYASSGENTGIVKKFPRFRNRELEATRRQRMDYPVFTVSLWLYLLHYCKANLCGILYFVDSNEMYGTPSVFLTEEGYLHIQMHLVKGEDLAVKTKFIIPLKEWFRLDISFNGGQIVVTTSIGQDLKSYHNQTISFREDFHYNDTAGYFIIGGSRYVAGIEGFFGPLKYYRLRSLHPAQIFNPLLEKQLAEQIKLYYERCAEVQEIVSVYASAAKHGGERQEACHLHNSYLDLQRRYGRPSMCRAFPWEKELKDKHPSLFQALLEMDLLTVPRNQNESVSEIGGKIFEKAVKRLSSIDGLHQISSIVPFLTDSSCCGYHKASYYLAVFYETGLNVPRDQLQGMLYSLVGGQGSERLSSMNLGYKHYQGIDNYPLDWELSYAYYSNIATKTPLDQHTLQGDQAYVETIRLKDDEILKVQTKEDGDVFMWLKHEATRGNAAAQQRLAQMLFWGQQGVAKNPEAAIEWYAKGALETEDPALIYDYAIVLFKGQGVKKNRRLALELMKKAASKGLHQAVNGLGWYYHKFKKNYAKAAKYWLKAEEMGNPDASYNLGVLHLDGIFPGVPGRNQTLAGEYFHKAAQGGHMEGTLWCSLYYITGNLETFPRDPEKAVVWAKHVAEKNGYLGHVIRKGLNAYLEGSWHEALLYYVLAAETGIEVSQTNLAHICEERPDLARRYLGVNCVWRYYNFSVFQIDAPSFAYLKMGDLYYYGHQNQSQDLELSVQMYAQAALDGDSQGFFNLALLIEEGTIIPHHILDFLEIDSTLHSNNISILQELYERCWSHSNEESFSPCSLAWLYLHLRLLWGAILHSALIYFLGTFLLSILIAWTVQYFQSVSGKDL

SEQ ID NO: 845058 - protein, 1015 aa, Homo sapiens
VLRHELIYEDTEDARWRVPQGLGGRSACALLLLCYLNVVPSLGRQTSLTTSVIPKAEQSVAYKDFIYFTVFEGNVRNVSEVSVEYLCSQPCVVNLEAVVSSEFRSSIPVYKKRWKNEKHLHTSRTQIVHVKFPSIMVYRDDYFIRHSISVSAVIVRAWITHKYSGRDWNVKWEENLLHAVAKNYTLLQTIPPFERPFKDHQVCLEWNMGYIWNLRANRIPQCPLENDVVALLGFPYASSGENTGIVKKFPRFRNRELEATRRQRMDYPVFTVSLWLYLLHYCKANLCGILYFVDSNEMYGTPSVFLTEEGYLHIQMHLVKGEDLAVKTKFIIPLKEWFRLDISFNGGQIVVTTSIGQDLKSYHNQTISFREDFHYNDTAGYFIIGGSRYVAGIEGFFGPLKYYRLRSLHPAQIFNPLLEKQLAEQIKLYYERCAEVQEIVSVYASAAKHGGERQEACHLHNSYLDLQRRYGRPSMCRAFPWEKELKDKHPSLFQALLEMDLLTVPRNQNESVSEIGGKIFEKAVKRLSSIDGLHQISSIVPFLTDSSCCGYHKASYYLAVFYETGLNVPRDQLQGMLYSLVGGQGSERLSSMNLGYKHYQGIDNYPLDWELSYAYYSNIATKTPLDQHTLQGDQAYVETIRLKDDEILKVQTKEDGDVFMWLKHEATRGNAAAQQRLAQMLFWGQQGVAKNPEAAIEWYAKGALETEDPALIYDYAIVLFKGQGVKKNRRLALELMKKAASKGLHQAVNGLGWYYHKFKKNYAKAAKYWLKAEEMGNPDASYNLGVLHLDGIFPGVPGRNQTLAGEYFHKAAQGGHMEGTLWCSLYYITGNLETFPRDPEKAVVWAKHVAEKNGYLGHVIRKGLNAYLEGSWHEALLYYVLAAETGIEVSQTNLAHICEERPDLARRYLGVNCVWRYYNFSVFQIDAPSFAYLKMGDLYYYGHQNQSQDLELSVQMYAQAALDGDSQGFFNLALLIEEGTISAGATVTRSPSAPAPWPGFTCTCGFSGVLSCTQP

SEQ ID NO: 845059 - protein, 878 aa, Homo sapiens
VLRHELIYEDTEDARWRVPQGLGGRSACALLLLCYLNVVPSLGRQTSLTTSVIPKAEQSVAYKDFIYFTVFEGNVRNVSEVSVEYLCSQPCVVNLEAVVSSEFRSSIPVYKKRWKNEKHLHTSRTQIVHVKFPSIMVYRDDYFIRHSISVSAVIVRAWITHKYSGRDWNVKWEENLLHAVAKNYTLLQTIPPFERPFKDHQVCLEWNMGYIWNLRANRIPQCPLENDVVALLGFPYASSGENTGIVKKFPRFRNRELEATRRQRMDYPVFTVSLWLYLLHYCKANLCGILYFVDSNEMYGTPSVFLTEEGYLHIQMHLVKGEDLAVKTKFIIPLKEWFRLDISFNGGQIVVTTSIGQDLKSYHNQTISFREDFHYNDTAGYFIIGGSRYVAGIEGFFGPLKYYRLRSLHPAQIFNPLLEKQLAEQIKLYYERCAEVQEIVSVYASAAKHGGERQEACHLHNSYLDLQRRYGRPSMCRAFPWEKELKDKHPSLFQALLEMDLLTVPRNQNESVSEIGGKIFEKAVKRLSSIDGLHQISSIVPFLTDSSCCGYHKASYYLAVFYETGLNVPRDQLQGMLYSLVGGQGSERLSSMNLGYKHYQGIDNYPLDWELSYAYYSNIATKTPLDQHTLQGDQAYVETIRLKDDEILKVQTKEDGDVFMWLKHEATRGNAAAQQRLAQMLFWGQQGVAKNPEAAIEWYAKGALETEDPALIYDYAIVLFKGQGVKKNRRLALELMKKAASKGLHQAVNGLGWYYHKFKKNYAKAAKYWLKAEEMGNPDASYNLGVLHLDGIFPGVPGRNQTLAGEYFHKAAQGGHMEGTLWCSLYYITGNLETFPRDPEKAVVKSLSTSVLGHPHTDTLALQKIVLHNTFGFKFNLT

SEQ ID NO: 845060 - protein, 844 aa, Homo sapiens
VLRHELIYEDTEDARWRVPQGLGGRSACALLLLCYLNVVPSLGRQTSLTTSVIPKAEQSVAYKDFIYFTVFEGNVRNVSEVSVEYLCSQPCVVNLEAVVSSEFRSSIPVYKKRWKNEKHLHTSRTQIVHVKFPSIMVYRDDYFIRHSISVSAVIVRAWITHKYSGRDWNVKWEENLLHAVAKNYTLLQTIPPFERPFKDHQVCLEWNMGYIWNLRANRIPQCPLENDVVALLGFPYASSGENTGIVKKFPRFRNRELEATRRQRMDYPVFTVSLWLYLLHYCKANLCGILYFVDSNEMYGTPSVFLTEEGYLHIQMHLVKGEDLAVKTKFIIPLKEWFRLDISFNGGQIVVTTSIGQDLKSYHNQTISFREDFHYNDTAGYFIIGGSRYVAGIEGFFGPLKYYRLRSLHPAQIFNPLLEKQLAEQIKLYYERCAEVQEIVSVYASAAKHGGERQEACHLHNSYLDLQRRYGRPSMCRAFPWEKELKDKHPSLFQALLEMDLLTVPRNQNESVSEIGGKIFEKAVKRLSSIDGLHQISSIVPFLTDSSCCGYHKASYYLAVFYETGLNVPRDQLQGMLYSLVGGQGSERLSSMNLGYKHYQGIDNYPLDWELSYAYYSNIATKTPLDQHTLQGDQAYVETIRLKDDEILKVQTKEDGDVFMWLKHEATRGNAAAQQRLAQMLFWGQQGVAKNPEAAIEWYAKGALETEDPALIYDYAIVLFKGQGVKKNRRLALELMKKAASKGLHQAVNGLGWYYHKFKKNYAKAAKYWLKAEEMGNPDASYNLGVLHLDGIFPGVPGRNQTLAGEYFHKAAQGGHMEGTLWCSLYYITGNLETFPRDPEKAVV

SEQ ID NO: 845061 - protein, 505 aa, Homo sapiens
LYCVMADLEDTEDARWRVPQGLGGRSACALLLLCYLNVVPSLGRQTSLTTSVIPKAEQSVAYKDFIYFTVFEGNVRNVSEVSVEYLCSQPCVVNLEAVVSSEFRSSIPVYKKRWKNEKHLHTSRTQIVHVKFPSIMVYRDDYFIRHSISVSAVIVRAWITHKYSGRDWNVKWEENLLHAVAKNYTLLQTIPPFERPFKDHQVCLEWNMGYIWNLRANRIPQCPLENDVVALLGFPYASSGENTGIVKKFPRFRNRELEATRRQRMDYPVFTVSLWLYLLHYCKANLCGILYFVDSNEMYGTPSVFLTEEGYLHIQMHLVKGEDLAVKTKFIIPLKEWFRLDISFNGGQIVVTTSIGQDLKSYHNQTISFREDFHYNDTAGYFIIGGSRYVAGIEGFFGPLKYYRLRSLHPAQIFNPLLEKQLAEQIKLYYERCAEVQEIVSVYASAAKHGGERQEACHLHNSYLDLQRRYGRPSMCRAFPWEKELKDKHPSLFQALLEMDLLTGN

SEQ ID NO: 845062 - protein, 353 aa, Homo sapiens
VLRHELIYEDTEDARWRVPQGLGGRSACALLLLCYLNVVPSLGRQTSLTTSVIPKAEQSVAYKDFIYFTVFEGNVRNVSEVSVEYLCSQPCVVNLEAVVSSEFRSSIPVYKKRWKNEKHLHTSRTQIVHVKFPSIMVYRDDYFIRHSISVSAVIVRAWITHKYSGRDWNVKWEENLLHAVAKNYTLLQTIPPFERPFKDHQVCLEWNMGYIWNLRANRIPQCPLENDVVALLGFPYASSGENTGIVKKFPRFRNRELEATRRQRMDYPVFTVSLWLYLLHYCKANLCGILYFVDSNEMYGTPSVFLTEEGYLHIQMHLVKGEDLAVKTKFIIPLKEWFRLDISFNGGQVSVCT

SEQ ID NO: 845063 - protein, 1114 aa, Homo sapiens; identical to SEQ ID NO: 845053

SEQ ID NO: 845064 - protein, 924 aa, Homo sapiens
LYCVMSCSRGYRRCTMARPPGPRRPLCLRAAPALLPDVVALLGFPYASSGENTGIVKKFPRFRNRELEATRRQRMDYPVFTVSLWLYLLHYCKANLCGILYFVDSNEMYGTPSVFLTEEGYLHIQMHLVKGEDLAVKTKFIIPLKEWFRLDISFNGGQIVVTTSIGQDLKSYHNQTISFREDFHYNDTAGYFIIGGSRYVAGIEGFFGPLKYYRLRSLHPAQIFNPLLEKQLAEQIKLYYERCAEVQEIVSVYASAAKHGGERQEACHLHNSYLDLQRRYGRPSMCRAFPWEKELKDKHPSLFQALLEMDLLTVPRNQNESVSEIGGKIFEKAVKRLSSIDGLHQISSIVPFLTDSSCCGYHKASYYLAVFYETGLNVPRDQLQGMLYSLVGGQGSERLSSMNLGYKHYQGIDNYPLDWELSYAYYSNIATKTPLDQHTLQGDQAYVETIRLKDDEILKVQTKEDGDVFMWLKHEATRGNAAAQQRLAQMLFWGQQGVAKNPEAAIEWYAKGALETEDPALIYDYAIVLFKGQGVKKNRRLALELMKKAASKGLHQAVNGLGWYYHKFKKNYAKAAKYWLKAEEMGNPDASYNLGVLHLDGIFPGVPGRNQTLAGEYFHKAAQGGHMEGTLWCSLYYITGNLETFPRDPEKAVVWAKHVAEKNGYLGHVIRKGLNAYLEGSWHEALLYYVLAAETGIEVSQTNLAHICEERPDLARRYLGVNCVWRYYNFSVFQIDAPSFAYLKMGDLYYYGHQNQSQDLELSVQMYAQAALDGDSQGFFNLALLIEEGTIIPHHILDFLEIDSTLHSNNISILQELYERCWSHSNEESFSPCSLAWLYLHLRLLWGAILHSALIYFLGTFLLSILIAWTVQYFQSVSASDPPPRPSQASPDTATSTASPAVTPAADASDQDQPTVTNNPEPRG

SEQ ID NO: 845065 - protein, 1114 aa, Homo sapiens; identical to SEQ ID NO: 845053

SEQ ID NO: 845066 - protein, 1114 aa, Homo sapiens; identical to SEQ ID NO: 845053

SEQ ID NO: 845067 - protein, 1114 aa, Homo sapiens; identical to SEQ ID NO: 845053

SEQ ID NO: 845068 - protein, 1076 aa, Homo sapiens
VLRHELIYEDTEDARWRVPQGLGGRSACALLLLCYLNVVPSLGRQTSLTTSVIPKAEQSVAYKDFIYFTVFEGNVRNVSEVSVEYLCSQPCVVNLEAVVSSEFRSSIPVYKKRWKNEKHLHTSRTQIVHVKFPSIMVYRDDYFIRHSISVSAVIVRAWITHKYSGRDWNVKWEENLLHAVAKNYTLLQTIPPFERPFKDHQVCLEWNMGYIWNLRANRIPQCPLENDVVALLGFPYASSGENTGIVKKFPRFRNRELEATRRQRMDYPVFTVSLWLYLLHYCKANLCGILYFVDSNEMYGTPSVFLTEEGYLHIQMHLVKGEDLAVKTKFIIPLKEWFRLDISFNGGQIVVTTSIGQDLKSYHNQTISFREDFHYNDTAGYFIIGGSRYVAGIEGFFGPLKYYRLRSLHPAQIFNPLLEKQLAEQIKLYYERCAEVQEIVSVYASAAKHGGERQEACHLHNSYLDLQRRYGRPSMCRAFPWEKELKDKHPSLFQALLEMDLLTVPRNQNESVSEIGGKIFEKAVKRLSSIDGLHQISSIVPFLTDSSCCGYHKASYYLAVFYETGLNVPRDQLQGMLYSLVGGQGSERLSSMNLGYKHYQGIDNYPLDWELSYAYYSNIATKTPLDQHTLQGDQAYVETIRLKDDEILKVQTKEDGDVFMWLKHEATRGNAAAQQRLAQMLFWGQQGVAKNPEAAIEWYAKGALETEDPALIYDYAIVLFKGQGVKKNRRLALELMKKAASKGLHQAVNGLGWYYHKFKKNYAKAAKYWLKAEEMGNPDASYNLGVLHLDGIFPGVPGRNQTLAGEYFHKAAQGGHMEGTLWCSLYYITGNLETFPRDPEKAVVWAKHVAEKNGYLGHVIRKGLNAYLEGSWHEALLYYVLAAETGIEVSQTNLAHICEERPDLARRYLGVNCVWRYYNFSVFQIDAPSFAYLKMGDLYYYGHQNQSQDLELSVQMYAQAALDGDSQGFFNLALLIEEGTIIPHHILDFLEIDSTLHSNNISILQELYESWSHSKQMESFSTHASIWPRHLHMHIAAFIMGCIITCKHQEHMNHTYSWEPFHAIITIIELSSEGSH

SEQ ID NO: 845069 - protein, 1021 aa, Homo sapiens
VLRHELIYEDTEDARWRVPQGLGGRSACALLLLCYLNVVPSLGRQTSLTTSVIPKAEQSVAYKDFIYFTVFEGNVRNVSEVSVEYLCSQPCVVNLEAVVSSEFRSSIPVYKKRWKNEKHLHTSRTQIVHVKFPSIMVYRDDYFIRHSISVSAVIVRAWITHKYSGRDWNVKWEENLLHAVAKNYTLLQTIPPFERPFKDHQVCLEWNMGYIWNLRANRIPQCPLENDVVALLGFPYASSGENTGIVKKFPRFRNRELEATRRQRMDYPVFTVSLWLYLLHYCKANLCGILYFVDSNEMYGTPSVFLTEEGYLHIQMHLVKGEDLAVKTKFIIPLKEWFRLDISFNGGQIVVTTSIGQDLKSYHNQTISFREDFHYNDTAGYFIIGGSRYVAGIEGFFGPLKYYRLRSLHPAQIFNPLLEKQLAEQIKLYYERCAEVQEIVSVYASAAKHGGERQEACHLHNSYLDLQRRYGRPSMCRAFPWEKELKDKHPSLFQALLEMDLLTVPRNQNESVSEIGGKIFEKAVKRLSSIDGLHQISSIVPFLTDSSCCGYHKASYYLAVFYETGLNVPRDQLQGMLYSLVGGQGSERLSSMNLGYKHYQGIDNYPLDWELSYAYYSNIATKTPLDQHTLQGDQAYVETIRLKDDEILKVQTKEDGDVFMWLKHEATRGNAAAQQRLAQMLFWGQQGVAKNPEAAIEWYAKGALETEDPALIYDYAIVLFKGQGVKKNRRLALELMKKAASKGLHQAVNGLGWYYHKFKKNYAKAAKYWLKAEEMGNPDASYNLGVLHLDGIFPGVPGRNQTLAGEYFHKAAQGGHMEGTLWCSLYYITGNLETFPRDPEKAVVWAKHVAEKNGYLGHVIRKGLNAYLEGSWHEALLYYVLAAETGIEVSQTNLAHICEERPDLARRYLGVNCVWRYYNFSVFQIDAPSFAYLKMGDLYYYGHQNQSQDLELSVQMYAQAALDGDSQGFFNLALLIEEGTIIPHHILDFLEIDSTLHSNNISILQELYERSTFWEPFCYPY

SEQ ID NO: 845070 - protein, 803 aa, Homo sapiens
VLRHELIYEDTEDARWRVPQGLGGRSACALLLLCYLNVVPSLGRQTSLTTSVIPKAEQSVAYKDFIYFTVFEGNVRNVSEVSVEYLCSQPCVVNLEAVVSSEFRSSIPVYKKRWKNEKHLHTSRTQIVHVKFPSIMVYRDDYFIRHSISVSAVIVRAWITHKYSGRDWNVKWEENLLHAVAKNYTLLQTIPPFERPFKDHQVCLEWNMGYIWNLRANRIPQCPLENDVVALLGFPYASSGENTGIVKKFPRFRNRELEATRRQRMDYPVFTVSLWLYLLHYCKANLCGILYFVDSNEMYGTPSVFLTEEGYLHIQMHLVKGEDLAVKTKFIIPLKEWFRLDISFNGGQIVVTTSIGQDLKSYHNQTISFREDFHYNDTAGYFIIGGSRYVAGIEGFFGPLKYYRLRSLHPAQIFNPLLEKQLAEQIKLYYERCAEVQEIVSVYASAAKHGGERQEACHLHNSYLDLQRRYGRPSMCRAFPWEKELKDKHPSLFQALLEMDLLTVPRNQNESVSEIGGKIFEKAVKRLSSIDGLHQISSIVPFLTDSSCCGYHKASYYLAVFYETGLNVPRDQLQGMLYSLVGGQGSERLSSMNLGYKHYQGIDNYPLDWELSYAYYSNIATKTPLDQHTLQGDQAYVETIRLKDDEILKVQTKEDGDVFMWLKHEATRGNAAAQQRLAQMLFWGQQGVAKNPEAAIEWYAKGALETEDPALIYDYAIVLFKGQGVKKNRRLALELMKKAASKGLHQAVNGLGWYYHKFKKNYAKAAKYWLKQKTNQHHTNFLGRLGPEKVLYHTLWGPGPRVG

SEQ ID NO: 845071 - protein, 682 aa, Homo sapiens
VLRHELIYEDTEDARWRVPQGLGGRSACALLLLCYLNVVPSLGRQTSLTTSVIPKAEQSVAYKDFIYFTVFEGNVRNVSEVSVEYLCSQPCVVNLEAVVSSEFRSSIPVYKKRWKNEKHLHTSRTQIVHVKFPSIMVYRDDYFIRHSISVSAVIVRAWITHKYSGRDWNVKWEENLLHAVAKNYTLLQTIPPFERPFKDHQVCLEWNMGYIWNLRANRIPQCPLENDVVALLGFPYASSGENTGIVKKFPRFRNRELEATRRQRMDYPVFTVSLWLYLLHYCKANLCGILYFVDSNEMYGTPSVFLTEEGYLHIQMHLVKGEDLAVKTKFIIPLKEWFRLDISFNGGQIVVTTSIGQDLKSYHNQTISFREDFHYNDTAGYFIIGGSRYVAGIEGFFGPLKYYRLRSLHPAQIFNPLLEKQLAEQIKLYYERCAEVQEIVSVYASAAKHGGERQEACHLHNSYLDLQRRYGRPSMCRAFPWEKELKDKHPSLFQALLEMDLLTVPRNQNESVSEIGGKIFEKAVKRLSSIDGLHQISSIVPFLTDSSCCGYHKASYYLAVFYETGLNVPRDQLQGMLYSLVGGQGSERLSSMNLGYKHYQGIDNYPLDWELSYAYYSNIATKTPLDQHTLQGDQAYVETIRLKDDEILKVQTKEDGDVFMWLKHEATRGNAAAQPLSYSSPL

SEQ ID NO: 845072 - protein, 258 aa, Homo sapiens
CQSFRASAARHSPARPVKQSQACRREKMAVAVRTLQEQLEKAKESLKNVDENIRKLTGRDPNDVRPIQARLLALSGPGGGRGRGSLLLRRGFSDSGGGPPAKQRDLEGAVSRLGGERRTRRESRQESDPEDDDVKKPALQSSVVATSKERTRRDLIQDQNMDEKGKQRNRRIFGLLMGTLQKFKQESTVATERQKRRQEIEQKLEVQAEEERKQVENERRELFEERRAKQTELRLLEQKVELAQLRRMDDICQILILD

SEQ ID NO: 845073 - protein, 744 aa, Homo sapiens
CQSFRASAARHSPARPVKQSQACRREKMAVAVRTLQEQLEKAKESLKNVDENIRKLTGRDPNDVRPIQARLLALSGPGGGRGRGSLLLRRGFSDSGGGPPAKQRDLEGAVSRLGGERRTRRESRQESDPEDDDVKKPALQSSVVATSKERTRRDLIQDQNMDEKGKQRNRRIFGLLMGTLQKFKQESTVATERQKRRQEIEQKLEVQAEEERKQVENERRELFEERRAKQTELRLLEQKVELAQLQEEWNEHNAKIIKYIRTKTKPHLFYIPGRMCPATQKLIEESQRKMNALFEGRRIEFAEQINKMEARPRRQSMKEKEHQVVRNEEQKAEQEEGKVAQREEELEETGNQHNDVEIEEAGEEEEKEIAIVHSDAEKEQEEEEQKQEMEVKMEEETEVRESEKQQDSQPEEVMDVLEMVENVKHVIADQEVMETNRVESVEPSENEASKELEPEMEFEIEPDKECKSLSPGKENVSALDMEKESEEKEEKESEPQPEPVAQPQPQSQPQLQLQSQSQPVLQSQPPSQPEDLSLAVLQPTPQVTQEQGHLLPERKDFPVESVKLTEVPVEPVLTVHPESKSKTKTRSRSRGRARNKTSKSRSRSSSSSSSSSSSTSSSSGSSSSSGSSSSRSSSSSSSSTSGSSSRDSSSSTSSSSESRSRSRGRGHNRDRKHRRSVDRKRRDTSGLERSHKSSKGGSSRDTKGSKDKNSRSDRKRSISESSRSGKRSSRSERDRKSDRKDKRR

SEQ ID NO: 845074 - protein, 744 aa, Homo sapiens; identical to SEQ ID NO: 845073

SEQ ID NO: 845075 - protein, 744 aa, Homo sapiens; identical to SEQ ID NO: 845073

SEQ ID NO: 845076 - protein, 744 aa, Homo sapiens; identical to SEQ ID NO: 845073

SEQ ID NO: 845077 - protein, 184 aa, Homo sapiens
CTSGSSSRDSSSSTSSGSEGRKVVGKVVGRGRARNKTSKSRSRSSSSSSSSSSSTSSSSGSSSSSGSSSSRSSSSSSSSTSGSSSRDSSSSTSSSSESRSRSRGRGHNRDRKHRRSVDRKRRDTSGLERSHKSSKGGSSRDTKGSKDKNSRSDRKRSISESSRSGKRSSRSERDRKSDRKDKRR

SEQ ID NO: 845078 - protein, 744 aa, Homo sapiens; identical to SEQ ID NO: 845073

SEQ ID NO: 845079 - protein, 120 aa, Homo sapiens
KHQLRTRKYSSSSRSHMGAYSRDSSSSTSSSSESRSRSRGRGHNRDRKHRRSVDRKRRDTSGLERSHKSSKGGSSRDTKGSKDKNSRSDRKRSISESSRSGKRSSRSERDRKSDRKDKRR

SEQ ID NO: 845080 - protein, 609 aa, Homo sapiens
CQSFRASAARHSPARPVKQSQACRREKMAVAVRTLQEQLEKAKESLKNVDENIRKLTGRDPNDVRPIQARLLALSGPGGGRGRGSLLLRRGFSDSGGGPPAKQRDLEGAVSRLGGERRTRRESRQESDPEDDDVKKPALQSSVVATSKERTRRDLIQDQNMDEKGKQRNRRIFGLLMGTLQKFKQESTVATERQKRRQEIEQKLEVQAEEERKQVENERRELFEERRAKQTELRLLEQKVELAQLQEEWNEHNAKIIKYIRTKTKPHLFYIPGRMCPATQKLIEESQRKMNALFEGRRIEFAEQINKMEARPRRQSMKEKEHQVVRNEEQKAEQEEGKVAQREEELEETGNQHNDVEIEEAGEEEEKEIAIVHSDAEKEQEEEEQKQEMEVKMEEETEVRESEKQQDSQPEEVMDVLEMVENVKHVIADQEVMETNRVESVEPSENEASKELEPEMEFEIEPDKECKSLSPGKENVSALDMEKESEEKEEKESEPQPEPVAQPQPQSQPQLQLQSQSQPVLQSQPPSQPEDLSLAVLQPTPQVTQEQGHLLPERKDFPVESVKLTEVPVEPVLTVHPESKSKTKTRSRSAWVQKCAWVQKCAWVQKCAG

SEQ ID NO: 845081 - protein, 268 aa, Homo sapiens
CQSFRASAARHSPARPVKQSQACRREKMAVAVRTLQEQLEKAKESLKNVDENIRKLTGRDPNDVRPIQARLLALSGPGGGRGRGSLLLRRGFSDSGGGPPAKQRDLEGAVSRLGGERRTRRESRQESDPEDDDVKKPALQSSVVATSKERTRRDLIQDQNMDEKGKQRNRRIFGLLMGTLQKFKQESTVATERQKRRQEIEQKLEVQAEEERKQVENERRELFEERRAKQTELRLLEQKVELAQLQEEWNEHNRRSRDGTELDSLPSS

SEQ ID NO: 845082 - protein, 277 aa, Homo sapiens
CQSFRASAARHSPARPVKQSQACRREKMAVAVRTLQEQLEKAKESLKNVDENIRKLTGRDPNDVRPIQARLLALSGPGGGRGRGSLLLRRGFSDSGGGPPAKQRDLEGAVSRLGGERRTRRESRQESDPEDDDVKKPALQSSVVATSKERTRRDLIQDQNMDEKGKQRNRRIFGLLMGTLQKFKQESTVATERQKRRQEIEQKLEVQAEEERKQVENERRELFEERRAKQTELRLLEQKVELAQLQEEWNEHKCHNSLCRWKQGWASPTSLNLKNMG

SEQ ID NO: 845083 - protein, 235 aa, Homo sapiens
  misc_feature (233)..(233): Xaa can be any naturally occurring amino acid
CQSFRASAARHSPARPVKQSQACRREKMAVAVRTLQEQLEKAKESLKNVDENIRKLTGRDPNDVRPIQARLLALSGPGGGRGRGSLLLRRGFSDSGGGPPAKQRDLEGAVSRLGGERRTRRESRQESDPEDDDVKKPALQSSVVATSKERTRRDLIQDQNMDEKGKQRNRRIFGLLMGTLQKFKQESTVATERQKRRQEIEQKLEVQAEEERKQVAAFGTESELAQWQEDGMXYA

SEQ ID NO: 845084 - protein, 188 aa, Homo sapiens
CQSFRASAARHSPARPVKQSQACRREKMAVAVRTLQEQLEKAKESLKNVDENIRKLTGRDPNDVRPIQARLLALSGPGGGRGRGSLLLRRGFSDSGGGPPAKQRDLEGAVSRLGGERRTRRESRQESDPEDDDVKKPALQSSVVATSKERTRRDLIQDQNMDEKGKQRNRRIFGLLMGTLQKFKKLSQ

SEQ ID NO: 845085 - protein, 97 aa, Homo sapiens
CQSFRASAARHSPARPVKQSQACRREKMAVAVRTLQEQLEKAKESLKNVDENIRKLTGRDPNDVRPIQARLLALSGPGGGRGRGSLLLRLRWRRKLR

SEQ ID NO: 845086 - protein, 744 aa, Homo sapiens; identical to SEQ ID NO: 845073

SEQ ID NO: 845087 - protein, 584 aa, Homo sapiens
MDEKGKQRNRRIFGLLMGTLQKFKQESTVATERQKRRQEIEQKLEVQAEEERKQVENERRELFEERRAKQTELRLLEQKVELAQLQEEWNEHNAKIIKYIRTKTKPHLFYIPGRMCPATQKLIEESQRKMNALFEGRRIEFAEQINKMEARPRRQSMKEKEHQVVRNEEQKAEQEEGKVAQREEELEETGNQHNDVEIEEAGEEEEKEIAIVHSDAEKEQEEEEQKQEMEVKMEEETEVRESEKQQDSQPEEVMDVLEMVENVKHVIADQEVMETNRVESVEPSENEASKELEPEMEFEIEPDKECKSLSPGKENVSALDMEKESEEKEEKESEPQPEPVAQPQPQSQPQLQLQSQSQPVLQSQPPSQPEDLSLAVLQPTPQVTQEQGHLLPERKDFPVESVKLTEVPVEPVLTVHPESKSKTKTRSRSRGRARNKTSKSRSRSSSSSSSSSSSTSSSSGSSSSSGSSSSRSSSSSSSSTSGSSSRDSSSSTSSSSESRSRSRGRGHNRDRKHRRSVDRKRRDTSGLERSHKSSKGGSSRDTKGSKDKNSRSDRKRSISESSRSGKRSSRSERDRKSDRKDKRR

SEQ ID NO: 845088 - protein, 725 aa, Homo sapiens
CQSFRASAARHSPARPVKQSQACRREKMAVAVRTLQEQLEKAKESLKNVDENIRKLTGRDPNDVRPIQARLLALSGPGGGRGRGSLLLRRGFSDSGGGPPAKQRDLEGAVSRLGGERRTRRESRQESDPEDDDVKKPALQSSVVATSKERTRRDLIQDQNMDEKGKQRNRRIFGLLMGTLQKFKQESTVATERQKRRQEIEQKLEVQAEEERKQVENERRELFEERRAKQTELRLLEQKVELAQLQEEWNEHNAKIIKYIRTKTKPHLFYIPGRMCPATQKLIEESQRKMNALFEGRRIEFAEQINKMEARPRRQSMKEKEHQVVRNEEQKAEQEEGKVAQREEELEETGNQHNDVEIEEAGEEEEKEIAIVHSDAEKEQEEEEQKQEMEVKMEEETEVRESEKQQDSQPEEVMDVLEMVENVKHVIADQEVMETNRVESVEPSENEASKELEPEMEFEIEPDKECKSLSPGKENVSALDMEKESEEKEPQLQLQSQSQPVLQSQPPSQPEDLSLAVLQPTPQVTQEQGHLLPERKDFPVESVKLTEVPVEPVLTVHPESKSKTKTRSRSRGRARNKTSKSRSRSSSSSSSSSSSTSSSSGSSSSSGSSSSRSSSSSSSSTSGSSSRDSSSSTSSSSESRSRSRGRGHNRDRKHRRSVDRKRRDTSGLERSHKSSKGGSSRDTKGSKDKNSRSDRKRSISESSRSGKRSSRSERDRKSDRKDKRR

SEQ ID NO: 845089 - protein, 744 aa, Homo sapiens; identical to SEQ ID NO: 845073

SEQ ID NO: 845090 - protein, 744 aa, Homo sapiens; identical to SEQ ID NO: 845073

SEQ ID NO: 845091 - protein, 674 aa, Homo sapiens
CQSFRASAARHSPARPVKQSQACRREKMAVAVRTLQEQLEKAKESLKNVDENIRKLTGRDPNDVRPIQARLLALSGPGGGRGRGSLLLRRGFSDSGGGPPAKQRDLEGAVSRLGGERRTRRESRQESDPEDDDVKKPALQSSVVATSKERTRRDLIQDQNMDEKGKQRNRRIFGLLMGTLQKFKQESTVATERQKRRQEIEQKLEVQAEEERKQVENERRELFEERRAKQTELRLLEQKVELAQLQEEWNEHNAKIIKYIRTKTKPHLFYIPGRMCPATQKLIEESQRKMNALFEGRRIEFAEQINKMEARPRRQSMKEKEHQVVRNEEQKAEQEEGKVAQREEELEETGNQHNDVEIEEAGEEEEKEIAIVHSDAEKEQEEEEQKQEMEVKMEEETEVRESEKQQDSQPEEVMDVLEMVENVKHVIADQEVMETNRVESVEPSENEASKELEPEMEFEIEPDKECKSLSPGKENVSALDMEKESEEKEEKESEPQPEPVAQPQPQSQPQLQLQSQSQPVLQSQPPSQPEDLSLAVLQPTPQVTQEQGHLLPERKDFPVESVKLTEVPVEPVLTVHPESKSKTKTRSRSRGRARNKTSKSRSRSSSSSSSSSMEVVAVAVVPVAAPVQVAAAAEIVAVALVVVVRVEVGVGAGDIIEIESTEGAWIGREGILQD

SEQ ID NO: 845092 - protein, 351 aa, Homo sapiens
  misc_feature (349)..(349): Xaa can be any naturally occurring amino acid
CQSFRASAARHSPARPVKQSQACRREKMAVAVRTLQEQLEKAKESLKNVDENIRKLTGRDPNDVRPIQARLLALSGPGGGRGRGSLLLRRGFSDSGGGPPAKQRDLEGAVSRLGGERRTRRESRQESDPEDDDVKKPALQSSVVATSKERTRRDLIQDQNMDEKGKQRNRRIFGLLMGTLQKFKQESTVATERQKRRQEIEQKLEVQAEEERKQVENERRELFEERRAKQTELRLLEQKVELAQLQEEWNEHNAKIIKYIRTKTKPHLFYIPGRMCPATQKLIEESQRKMNAKAAPGNEQKLEVQAEEERKQVENERRELFEERRAKQTELRLLEQKVELAQWQEDGMXYA

SEQ ID NO: 845093 - protein, 301 aa, Homo sapiens
CQSFRASAARHSPARPVKQSQACRREKMAVAVRTLQEQLEKAKESLKNVDENIRKLTGRDPNDVRPIQARLLALSGPGGGRGRGSLLLRRGFSDSGGGPPAKQRDLEGAVSRLGGERRTRRESRQESDPEDDDVKKPALQSSVVATSKERTRRDLIQDQNMDEKGKQRNRRIFGLLMGTLQKFKQESTVATERQKRRQEIEQKLEVQAEEERKQVENERRELFEERRAKQTELRLLEQKVELAQLQEEWNEHNRRSRDIFVTGDYFGNYLVDAASDHNGCHYYEDDYIMQWAVYDYVVDLD

SEQ ID NO: 845094 - protein, 215 aa, Homo sapiens
CQSFRASAARHSPARPVKQSQACRREKMAVAVRTLQEQLEKAKESLKNVDENIRKLTGRDPNDVRPIQARLLALSGPGGGRGRGSLLLRRGFSDSGGGPPAKQRDLEGAVSRLGGERRTRRESRQESDPEDDDVKKPALQSSVVATSKERTRRDLIQDQNMDEKGKQRNRRIFGLLMGTLQKFKQESTVATERVFIQVLFCIIYLSYQSSRLMFF

SEQ ID NO: 845095 - protein, 204 aa, Homo sapiens
  misc_feature (202)..(202): Xaa can be any naturally occurring amino acid
AAAPTSEWYQDQNMDEKGKQRNRRIFGLLMGTLQKFKQESTVATERQKRRQEIEQKLEVQAEEERKQVENERRELFEERRAKQTELRLLEQKVELAQLQEEWNEHNAKIIKYIRTKTKPHLFYIPGRMCPATQKLIEESQRKMNAKAAPGNEQKLEVQAEEERKQVENERRELFEERRAKQTELRLLEQKVELAQWQEDGMXYA

SEQ ID NO: 845096 - protein, 299 aa, Homo sapiens
MAAAEEGCSVGAEADRELEELLESALDDFDKAKPSPAPPSTTTAPDASGPQKRSPGDTAKDALFASQEKFFQELFDSELASQATAEFEKAMKELAEEEPHLVEQFQKLSEAAGRVGSDMTSQQEFTSCLKETLSGLAKNATDLQNSSMSEEELTKAMEGLGMDEGDGEGNILPIMQSIMQNLLSKDVLYPSLKEITEKYPEWLQSHRESLPPEQFEKYQEQHSVMCKICEQFEAETPTDSETTQKARFEMVLDLMQQLQDLGHPPKELAGEMPPGLNFDLDALNLSGPPGASGEQCLIM

SEQ ID NO: 845097 - protein, 299 aa, Homo sapiens; identical to SEQ ID NO: 845096

SEQ ID NO: 845098 - protein, 299 aa, Homo sapiens; identical to SEQ ID NO: 845096

SEQ ID NO: 845099 - protein, 281 aa, Homo sapiens [sequence omitted]

SEQ ID NO: 845100 - protein, 284 aa, Homo sapiens
MAAAEEGCSVGAEADRELEELLESALDDFDKAKPSPAPPSTTTAPDASGPQKRSPGDTAKDALFASQEKFFQELFDSELASQATAEFEKAMKELAEEEPHLVEQFQKLSEAAGRVGSDMTSQQEFTSCLKETLSGLAKNATDLQNSSMSEEELTKAMEGLGMDEGDGEGNILPIMQSIMQNLLSKDVLYPSLKEITEKYPEWLQSHRESLPPEQFEKYQEQHSVMCKICEQFEAETPTDSETTQKARFEMVLDLMQQPPGLNFDLDALNLSGPPGASGEQCLIM

SEQ ID NO: 845101 - protein, 273 aa, Homo sapiens
PASYGKSEVARWPPLRKAVVSGPKRTGNWRSFWKDALFASQEKFFQELFDSELASQATAEFEKAMKELAEEEPHLVEQFQKLSEAAGRVGSDMTSQQEFTSCLKETLSGLAKNATDLQNSSMSEEELTKAMEGLGMDEGDGEGNILPIMQSIMQNLLSKDVLYPSLKEITEKYPEWLQSHRESLPPEQFEKYQEQHSVMCKICEQFEAETPTDSETTQKARFEMVLDLMQQLQDLGHPPKELAGEMPPGLNFDLDALNLSGPPGASGEQCLIM

SEQ ID NO: 845102 - protein, 299 aa, Homo sapiens; identical to SEQ ID NO: 845096

SEQ ID NO: 845103 - protein, 299 aa, Homo sapiens; identical to SEQ ID NO: 845096

SEQ ID NO: 845104 - protein, 118 aa, Homo sapiens
MAAAEEGCSVGAEADRELEELLESALDDFDKAKPSPAPPSTTTAPDASGPQKRSPGDTAKDALFASQEKFFQELFDSELASQATAEFEKAMKELAEEEPHLVEQFQFTSCLKALRITP

SEQ ID NO: 845105 - protein, 299 aa, Homo sapiens; identical to SEQ ID NO: 845096

SEQ ID NO: 845106 - protein, 300 aa, Homo sapiens
THASPTRRCSVGAEADRELEELLESALDDFDKAKPSPAPPSTTTAPDASGPQKRSPGDTAKDALFASQEKFFQELFDSELASQATAEFEKAMKELAEEEPHLVEQFQKLSEAAGRVGSDMTSQQEFTSCLKETLSGLAKNATDLQNSSMSEEELTKAMEGLGMDEGDGEGNILPIMQSIMQNLLSKDVLYPSLKEITEKYPEWLQSHRESLPPEQFEKYQEQHSVMCKICEQFEAETPTDSETTQKARFEMVLDLMQQLQDLGHPPKELAGEMPPGLNFDLDALNLSGPPGASGEQCLIM

SEQ ID NO: 845107 - protein, 279 aa, Homo sapiens [sequence omitted]

SEQ ID NO: 845108 - protein, 299 aa, Homo sapiens; identical to SEQ ID NO: 845096

SEQ ID NO: 845109 - protein, 299 aa, Homo sapiens; identical to SEQ ID NO: 845096

SEQ ID NO: 845110 - protein, 106 aa, Homo sapiens
PQPGRVHRRVPSPLPPPPSASISLQLPSLACGRPVLLPSPVQPGTRVRLAQVSVRDWEATEGRESGTLLELKLPTLSSLNNYRAGLGGTDSIFRSLMGCWVDGAGK

SEQ ID NO: 845111 - protein, 106 aa, Homo sapiens; identical to SEQ ID NO: 845110

SEQ ID NO: 845112 - protein, 106 aa, Homo sapiens; identical to SEQ ID NO: 845110

SEQ ID NO: 845113 - protein, 89 aa, Homo sapiens [sequence omitted]

SEQ ID NO: 845114 - protein, 482 aa, Homo sapiens
GVPVWLRDTSKLQSALWLWTPGRTMPSLVWVIQTHVGCRGQVEPSCRFCYLTVITESRKRIGNAGSLIKAEWQERGIWRLPPCLHSPSCRPGRMSDEETLSSSNTQGEVLQHQKLSANAPATAYRNCCRLESTSLPRHCTSVGNQVIAVVMDLFTDGDIFQDIVDAACKRRVPVYIILDEAGVKYFLEMCQDLQLTDFRIRNIRVRSVTGVGFYMPMGRIKGTLSSRFLMVDGDKVATGSYRFTWSSSHVDRNLLLLLTGQNVEPFDTEFRELYAISEEVDLYRQLSLAGRVGLHYSSTVARKLINPKYALVSGCRHPPGEMMRWAARQQREAGGNPEGQEEGASGGESAWRLESFLKDLVTVEQVLPPVEPIPLGELSQKDGRMVSHMHRDLKPKSREAPSRNGMGEAARGEAAPARRFSSRLFSRRAKRPAAPNGMASSVSTETSEVEFLTGKRPNENSSADISGKTSPSSAKPSNCVIS

SEQ ID NO: 845115 - protein, 532 aa, Homo sapiens
GEAPRPSAAPGAAVGPRTAAGPGPGRGRGRGAMAESQLNCLDEAHVNEKVTEAQAAFYYCERRRAALEALLGGGEQAYRERLKEEQLRDFLSSPERQALRAAWSPYEDAVPAANARGKSKAKAKAPAPAPAESGESLAYWPDRSDTEVPPLDLGWTDTGFYRGVSRVTLFTHPPKDEKAPHLKQVVRQMIQQAQKVIAVVMDLFTDGDIFQDIVDAACKRRVPVYIILDEAGVKYFLEMCQDLQLTDFRIRNIRVRSVTGVGFYMPMGRIKGTLSSRFLMVDGDKVATGSYRFTWSSSHVDRNLLLLLTGQNVEPFDTEFRELYAISEEVDLYRQLSLAGRVGLHYSSTVARKLINPKYALVSGCRHPPGEMMRWAARQQREAGGNPEGQEEGASGGESAWRLESFLKDLVTVEQVLPPVEPIPLGELSQKDGRMVSHMHRDLKPKSREAPSRNGMGEAARGEAAPARRFSSRLFSRRAKRPAAPNGMASSVSTETSEVEFLTGKRPNENSSADISGKTSPSSAKPSNCVIS

SEQ ID NO: 845116 - protein, 532 aa, Homo sapiens; identical to SEQ ID NO: 845115

SEQ ID NO: 845117 - protein, 125 aa, Homo sapiens [sequence omitted]

SEQ ID NO: 845118 - protein, 980 aa, Homo sapiens
IPNDNISDEPSLCDCDVHKHNQNENLVPNNRVQIHRSPAQNLVGENNHDVDNSDLPVLSTDQDESLLLFEDVNTEFDDVSLSPLNSKSESLPVSDKTAISETPLVSQFLISDELLLDNNSELQDQITRDANSFKSRDQRGVQEEKVKNHEDIFDCSRDLFSVTFDLGFCSPDSDDEILEHTSDSNRPLDDLYGRYLEIKEISDANYVSNQALIPRDHSKNFTSGTVIIPSNEDMQNPNYVHLPLSAAKNEELLSPGYSQFSLPVQKKVMSTPLSKSNTLNSFSKIRKEILKTPDSGKEKVNLQRFKEALNSTFDYSEFSLEKSKSSGPMYLHKSCHSVEDGQLLTSNESEDDEIFRRKVKRAKGNVLNSPEDQKNSEVDSPLHAVKKRRFPINRSELSSSDESENFPKPCSQLEDFKVCNGNARRGIKVPKRQSHLKHVARKFLDDEAELSEEDAEYVSSDENDESENEQDSSLLDFLNDETQLSQAINDSEMRAIYMKSLRSPMMNNKYKMIHKTHKNINIFSQIPEQDETYLEDSFCVDEEESCKGQSSEEEVCVDFNLITDDCFANSKKYKTRRAVMLKEMMEQNCAHSKKKLSRIILPDDSSEEENNVNDKRESNIAVNPSTVKKNKQQDHCLNSVPSGSSAQSKVRSTPRVNPLAKQSKQTSLNLKDTISEVSDFKPQNHNEVQSTTPPFTTVDSQKDCRKFPVPQKDGSALEDSSTSGASCSKSRPHLAGTHTSLRLPQEGKGTCILVGGHEITSGLEVISSLRAIHGLQVEVCPLNGCDYIVSNRMVVERRSQSEMLNSVNKNKFIEQIQHLQSMFERICVIVEKDREKTGDTSRMFRRTKSYDSLLTTLIGAGIRILFSSCQEETADLLKELSLVEQRKNVGIHVPTVVNSNKSEALQFYLSIPNISYITALNMCHQFSSVKRMANSSLQEISMYAQVTHQKAEEIYRYIHYVFDIQMLPNDLNQDRLKSDI

SEQ ID NO: 845119 - protein, 943 aa, Homo sapiens
IPNDNISDEPSLCDCDVHKHNQNENLVPNNRVQIHRSPAQNLVGENNHDVDNSDLPVLSTDQDESLLLFEDVNTEFDDVSLSPLNSKSESLPVSDKTAISETPLVSQFLISDELLLDNNSELQDQITRDANSFKSRDQRGVQEEKVKNHEDIFDCSRDLFSVTFDLGFCSPDSDDEILEHTSDSNRPLDDLYGRYLEIKEISDANYVSNQALIPRDHSKNFTSGTVIIPSNEDMQNPNYVHLPLSAAKNEELLSPGYSQFSLPVQKKVMSTPLSKSNTLNSFSKIRKEILKTPDSGKEKVNLQRFKEALNSTFDYSEFSLEKSKSSGPMYLHKSCHSVEDGQLLTSNESEDDEIFRRKVKRAKGNVLNSPEDQKNSEVDSPLHAVKKRRFPINRSELSSSDESENFPKPCSQLEDFKVCNGNARRGIKVPKRQSHLKHVARKFLDDEAELSEEDAEYVSSDENDESENEQDSSLLDFLNDETQLSQAINDSEMRAIYMKSLRSPMMNNKYKMIHKTHKNINIFSQIPEQDETYLEDSFCVDEEESCKGQSSEEEVCVDFNLITDDCFANSKKYKTRRAVMLKEMMEQNCAHSKKKLSRIILPDDSSEEENNVNDKRESNIAVNPSTVKKNKQQDHCLNSVPSGSSAQSKVRSTPRVNPLAKQSKQTSLNLKDTISEVSDFKPQNHNEVQSTTPPFTTVDSQKDCRKFPVPQKDGSALEDSSTSGASCSKSRPHLAGTHTSLRLPQEGKGTCILVGGHEITSGLEVISSLRAIHGLQVEVCPLNGCDYIVSNRMVVERRSQSEMLNSVNKNKFIEQIQHLQSMFERICVIVEKDREKTGDTSRMFRRTKSYDSLLTTLIGAGIRILFSSCQEETADLLKELSLVEQRKNVGIHVPTVVNSNKSEALQFYLSIPNISYITALNMCHQFSSVKRMANRYVCCNIFK

SEQ ID NO: 845120 - protein, 739 aa, Homo sapiens
IPNDNISDEPSLCDCDVHKHNQNENLVPNNRVQIHRSPAQNLVGENNHDVDNSDLPVLSTDQDESLLLFEDVNTEFDDVSLSPLNSKSESLPVSDKTAISETPLVSQFLISDELLLDNNSELQDQITRDANSFKSRDQRGVQEEKVKNHEDIFDCSRDLFSVTFDLGFCSPDSDDEILEHTSDSNRPLDDLYGRYLEIKEISDANYVSNQALIPRDHSKNFTSGTVIIPSNEDMQNPNYVHLPLSAAKNEELLSPGYSQFSLPVQKKVMSTPLSKSNTLNSFSKIRKEILKTPDSGKEKVNLQRFKEALNSTFDYSEFSLEKSKSSGPMYLHKSCHSVEDGQLLTSNESEDDEIFRRKVKRAKGNVLNSPEDQKNSEVDSPLHAVKKRRFPINRSELSSSDESENFPKPCSQLEDFKVCNGNARRGIKVPKRQSHLKHVARKFLDDEAELSEEDAEYVSSDENDESENEQDSSLLDFLNDETQLSQAINDSEMRAIYMKSLRSPMMNNKYKMIHKTHKNINIFSQIPEQDETYLEDSFCVDEEESCKGQSSEEEVCVDFNLITDDCFANSKKYKTRRAVMLKEMMEQNCAHSKKKLSRIILPDDSSEEENNVNDKRESNIAVNPSTVKKNKQQDHCLNSVPSGSSAQSKVRSTPRVNPLAKQSKQTSLNLKDTISEVSDFKPQNHNEVQSTTPPFTTVDSQKDCRKFPVPQKVWIKERKNIFRWLPEVFLFLSCVCVLY

SEQ ID NO: 845121 - protein, 1015 aa, Homo sapiens
IPNDNISDEPSLCDCDVHKHNQNENLVPNNRVQIHRSPAQNLVGENNHDVDNSDLPVLSTDQDESLLLFEDVNTEFDDVSLSPLNSKSESLPVSDKTAISETPLVSQFLISDELLLDNNSELQDQITRDANSFKSRDQRGVQEEKVKNHEDIFDCSRDLFSVTFDLGFCSPDSDDEILEHTSDSNRPLDDLYGRYLEIKEISDANYVSNQALIPRDHSKNFTSGTVIIPSNEDMQNPNYVHLPLSAAKNEELLSPGYSQFSLPVQKKVMSTPLSKSNTLNSFSKIRKEILKTPDSGKEKVNLQRFKEALNSTFDYSEFSLEKSKSSGPMYLHKSCHSVEDGQLLTSNESEDDEIFRRKVKRAKGNVLNSPEDQKNSEVDSPLHAVKKRRFPINRSELSSSDESENFPKPCSQLEDFKVCNGNARRGIKVPKRQSHLKHVARKFLDDEAELSEEDAEYVSSDENDESENEQDSSLLDFLNDETQLSQAINDSEMRAIYMKSLRSPMMNNKYKMIHKTHKNINIFSQIPEQDETYLEDSFCVDEEESCKGQSSEEEVCVDFNLITDDCFANSKKYKTRRAVMLKEMMEQNCAHSKKKLSRIILPDDSSEEENNVNDKRESNIAVNPSTVKKNKQQDHCLNSVPSGSSAQSKVRSTPRVNPLAKQSKQTSLNLKDTISEVSDFKPQNHNEVQSTTPPFTTVDSQKDCRKFPVPQKRFGHLALMFPMPSASAKRGAHGPQDLADYFGKESWDGSALEDSSTSGASCSKSRPHLAGTHTSLRLPQEGKGTCILVGGHEITSGLEVISSLRAIHGLQVEVCPLNGCDYIVSNRMVVERRSQSEMLNSVNKNKFIEQIQHLQSMFERICVIVEKDREKTGDTSRMFRRTKSYDSLLTTLIGAGIRILFSSCQEETADLLKELSLVEQRKNVGIHVPTVVNSNKSEALQFYLSIPNISYITALNMCHQFSSVKRMANSSLQEISMYAQVTHQKAEEIYRYIHYVFDIQMLPNDLNQDRLKSDI

SEQ ID NO: 845122 - protein, 912 aa, Homo sapiens
IPNDNISDEPSLCDCDVHKHNQNENLVPNNRVQIHRSPAQNLVGENNHDVDNSDLPVLSTDQDESLLLFEDVNTEFDDVSLSPLNSKSESLPVSDKTAISETPLVSQFLISDELLLDNNSELQDQITRDANSFKSRDQRGVQEEKVKNHEDIFDCSRDLFSVTFDLGFCSPDSDDEILEHTSDSNRPLDDLYGRYLEIKEISDANYVSNQALIPRDHSKNFTSGTVIIPSNEDMQNPNYVHLPLSAAKNEELLSPGYSQFSLPVQKKVMSTPLSKSNTLNSFSKIRKEILKTPDSGKEKVNLQRFKEALNSTFDYSEFSLEKSKSSGPMYLHKSCHSVEDGQLLTSNESEDDEIFRRKVKRAKGNVLNSPEDQKNSEVDSPLHAVKKRRFPINRSELSSSDESENFPKPCSQLEDFKVCNGNARRGIKVPKRQSHLKHVARKFLDDEAELSEEDAEYVSSDENDESENEQDSSLLDFLNDETQLSQAINDSEMRAIYMKSLRSPMMNNKYKMIHKTHKNINIFSQIPEQDETYLEDSFCVDEEESCKGQSSEEEVCVDFNLITDDCFANSKKYKTRRAVMLKEMMEQNCAHSKKKLSRIILPDDSSEEENNVNDKRESNIAVNPSTVKKNKQQDHCLNSVPSGSSAQSKVRSTPRVNPLAKQSKQTSLNLKDTISEVSDFKPQNHNEVQSTTPPFTTVDSQKDCRKFPVPQKDGSALEDSSTSGASCSKSRPHLAGTHTSLRLPQEGKGTCILVGGHEITSGLEVISSLRAIHGLQVEVCPLNGCDYIVSNRMVVERRSQSEMLNSVNKNKFIEQIQHLQSMFERICVIVEKDREKTGDTSRMFRRTKSYDSLLTTLIGAGIRILFSSCQEETADLLKELSLVEQRKNVGIHVPTVVNSNKTHFKKSPCMHK

SEQ ID NO: 845123 - protein, 963 aa, Homo sapiens
MERREEQPGAAGAGAAPALDFTVENVEKALHQLYYDPNIENKNLAQKWLMQAQVSPQAWHFSWQLLQPDKVPEIQYFGASALHIKISRYWSDIPTDQYESLKAQLFTQITRFASGSKIVLTRLCVALASLALSMMPDAWPCAVADMVRLFQAEDSPVDGQGRCLALLELLTVLPEEFQTSRLPQYRKGLVRTSLAVECGAVFPLLEQLLQQPSSPSCVRQKVLKCFSSWVQLEVPLQDCEALIQAAFAALQDSELFDSSVEAIVNAISQPDAQRYVNTLLKLIPLVLGLQEQLRQAVQNGDMETSHGICRIAVALGENHSRALLDQVEHWQSFLALVNMIMFCTGIPGHYPVNETTSSLTLTFWYTLQDDILSFEAEKQAVYQQVYRPVYFQLVDVLLHKAQFPSDEEYGFWSSDEKEQFRIYRVDISDTLMYVYEMLGAELLSNLYDKLGRLLTSSEEPYSWQHTEALLYGFQSIAETIDVNYSDVVPGLIGLIPRISISNVQLADTVMFTIGALSEWLADHPVMINSVLPLVLHALGNPELSVSSVSTLKKICRECKYDLPPYAANIVAVSQDVLMKQIHKTSQCMWLMQALGFLLSALQVEEILKNLHSLISPYIQQLEKLAEEIPNPSNKLAIVHILGLLSNLFTTLDISHHEDDHEGPELRKLPVPQGPNPVVVVLQQVFQLIQKVLSKWLNDAQVVEAVCAIFEKSVKTLLDDFAPMVPQLCEMLGRMYSTIPQASALDLTRQLVHIFAHEPAHFPPIEALFLLVTSVTLTLFQQGPRDHPDIVDSFMQLLAQALKRKPDLFLCERLDVKAVFQCAVLALKFPEAPTVKASCGFFTELLPRCGEVESVGKVVQEDGRMLLIAVLEAIGGQASRSLMDCFADILFALNKHCFSLLSMWIKEALQPPGFPSARLSPEQKDTFSQQILRERVNKRRVKEMVKEFTLLCRGLHGTDYTADY

SEQ ID NO: 845124 - protein, 963 aa, Homo sapiens; identical to SEQ ID NO: 845123

SEQ ID NO: 845125 - protein, 978 aa, Homo sapiens
MERREEQPGAAGAGAAPALDFTVENVEKDPEWPAPAQSCAVLQALHQLYYDPNIENKNLAQKWLMQAQVSPQAWHFSWQLLQPDKVPEIQYFGASALHIKISRYWSDIPTDQYESLKAQLFTQITRFASGSKIVLTRLCVALASLALSMMPDAWPCAVADMVRLFQAEDSPVDGQGRCLALLELLTVLPEEFQTSRLPQYRKGLVRTSLAVECGAVFPLLEQLLQQPSSPSCVRQKVLKCFSSWVQLEVPLQDCEALIQAAFAALQDSELFDSSVEAIVNAISQPDAQRYVNTLLKLIPLVLGLQEQLRQAVQNGDMETSHGICRIAVALGENHSRALLDQVEHWQSFLALVNMIMFCTGIPGHYPVNETTSSLTLTFWYTLQDDILSFEAEKQAVYQQVYRPVYFQLVDVLLHKAQFPSDEEYGFWSSDEKEQFRIYRVDISDTLMYVYEMLGAELLSNLYDKLGRLLTSSEEPYSWQHTEALLYGFQSIAETIDVNYSDVVPGLIGLIPRISISNVQLADTVMFTIGALSEWLADHPVMINSVLPLVLHALGNPELSVSSVSTLKKICRECKYDLPPYAANIVAVSQDVLMKQIHKTSQCMWLMQALGFLLSALQVEEILKNLHSLISPYIQQLEKLAEEIPNPSNKLAIVHILGLLSNLFTTLDISHHEDDHEGPELRKLPVPQGPNPVVVVLQQVFQLIQKVLSKWLNDAQVVEAVCAIFEKSVKTLLDDFAPMVPQLCEMLGRMYSTIPQASALDLTRQLVHIFAHEPAHFPPIEALFLLVTSVTLTLFQQGPRDHPDIVDSFMQLLAQALKRKPDLFLCERLDVKAVFQCAVLALKFPEAPTVKASCGFFTELLPRCGEVESVGKVVQEDGRMLLIAVLEAIGGQASRSLMDCFADILFALNKHCFSLLSMWIKEALQPPGFPSARLSPEQKDTFSQQILRERVNKRRVKEMVKEFTLLCRGLHGTDYTADY

SEQ ID NO: 845126 - protein, 690 aa, Homo sapiens
MYVNTLLKLIPLVLGLQEQLRQAVQNGDMETSHGICRIAVALGENHSRALLDQVEHWQSFLALVNMIMFCTGIPGHYPVNETTSSLTLTFWYTLQDDILSFEAEKQAVYQQVYRPVYFQLVDVLLHKAQFPSDEEYGFWSSDEKEQFRIYRVDISDTLMYVYEMLGAELLSNLYDKLGRLLTSSEEPYSWQHTEALLYGFQSIAETIDVNYSDVVPGLIGLIPRISISNVQLADTVMFTIGALSEWLADHPVMINSVLPLVLHALGNPELSVSSVSTLKKICRECKYDLPPYAANIVAVSQDVLMKQIHKTSQCMWLMQALGFLLSALQVEEILKNLHSLISPYIQQLEKLAEEIPNPSNKLAIVHILGLLSNLFTTLDISHHEDDHEGPELRKLPVPQGPNPVVVVLQQVFQLIQKVLSKWLNDAQVVEAVCAIFEKSVKTLLDDFAPMVPQLCEMLGRMYSTIPQASALDLTRQLVHIFAHEPAHFPPIEALFLLVTSVTLTLFQQGPRDHPDIVDSFMQLLAQALKRKPDLFLCERLDVKAVFQCAVLALKFPEAPTVKASCGFFTELLPRCGEVESVGKVVQEDGRMLLIAVLEAIGGQASRSLMDCFADILFALNKHCFSLLSMWIKEALQPPGFPSARLSPEQKDTFSQQILRERVNKRRVKEMVKEFTLLCRGLHGTDYTADY

SEQ ID NO: 845127 - protein, 532 aa, Homo sapiens [sequence omitted]

SEQ ID NO: 845128 - protein, 398 aa, Homo sapiens
TRRGSGPPRMCVMKQIHKTSQCMWLMQALGFLLSALQVEEILKNLHSLISPYIQQLEKLAEEIPNPSNKLAIVHILGLLSNLFTTLDISHHEDDHEGPELRKLPVPQGPNPVVVVLQQVFQLIQKVLSKWLNDAQVVEAVCAIFEKSVKTLLDDFAPMVPQLCEMLGRMYSTIPQASALDLTRQLVHIFAHEPAHFPPIEALFLLVTSVTLTLFQQGPRDHPDIVDSFMQLLAQALKRKPDLFLCERLDVKAVFQCAVLALKFPEAPTVKASCGFFTELLPRCGEVESVGKVVQEDGRMLLIAVLEAIGGQASRSLMDCFADILFALNKHCFSLLSMWIKEALQPPGFPSARLSPEQKDTFSQQILRERVNKRRVKEMVKEFTLLCRGLHGTDYTADY

SEQ ID NO: 845129 - protein, 420 aa, Homo sapiens
  misc_feature (4)..(4): Xaa can be any naturally occurring amino acid
  misc_feature (27)..(27): Xaa can be any naturally occurring amino acid
  misc_feature (35)..(37): Xaa can be any naturally occurring amino acid
PKKXPSREFPKYLTLPSPIPSPTFLAXCPQDVLVXXXPPQTSQCMWLMQALGFLLSALQVEEILKNLHSLISPYIQQLEKLAEEIPNPSNKLAIVHILGLLSNLFTTLDISHHEDDHEGPELRKLPVPQGPNPVVVVLQQVFQLIQKVLSKWLNDAQVVEAVCAIFEKSVKTLLDDFAPMVPQLCEMLGRMYSTIPQASALDLTRQLVHIFAHEPAHFPPIEALFLLVTSVTLTLFQQGPRDHPDIVDSFMQLLAQALKRKPDLFLCERLDVKAVFQCAVLALKFPEAPTVKASCGFFTELLPRCGEVESVGKVVQEDGRMLLIAVLEAIGGQASRSLMDCFADILFALNKHCFSLLSMWIKEALQPPGFPSARLSPEQKDTFSQQILRERVNKRRVKEMVKEFTLLCRGLHGTDYTADY

SEQ ID NO: 845130 - protein, 101 aa, Homo sapiens
MYVYEMLGAELLSNLYDKLGRLLTSSEEPYSWQVPPKPDSLSLPRPVTTLLLIQASGTLFPQHTEALLYGFQSIAETIDVNYSDVVPGLIGLIPRISISNV

SEQ ID NO: 845131 - protein, 963 aa, Homo sapiens; identical to SEQ ID NO: 845123

SEQ ID NO: 845132 - protein, 67 aa, Homo sapiens
FRAVPLGRAGLYRAVPSQNWQEWGPELEVPGTGARGSPRLAEVPAPSRPAWLVLSVTGAEAAAVAGL

SEQ ID NO: 845133 - protein, 965 aa, Homo sapiens
MERREEQPGAAGAGAAPALDFTVENVEKALHQLYYDPNIENKNLAQKWLMQAQVSPQAWHFSWQLLQPDKVPEIQYFGASALHIKISRYWSDIPTDQYESLKAQLFTQITRFASGSKIVLTRLCVALASLALSMMPDAWPCAVADMVRLFQAEDSPVDGQGRCLALLELLTVLPEEFQTSRLPQYRKGLVRTSLAVECGAVFPLLEQLLQQPSSPSCVRQKVLKCFSSWVQLEVPLQDCEALIQAAFAALQDSELFDSSVEAIVNAISQPDAQRYVNTLLKLIPLVLGLQEQLRQAVQNGDMETSHGICRIAVALGENHSRALLDQVEHWQSFLALVNMIMFCTGIPGHYPVNETTSSLTLTFWYTLQDDILSFEAEKQAVYQQVYRPVYFQLVDVLLHKAQFPSDEEYGFWSSDEKEQFRIYRVDISDTLMYVYEMLGAELLSNLYDKLGRLLTSSEEPYSWQHTEALLYGFQSIAETIDVNYSDVVPGLIGLIPRISISNVQLADTVMFTIGALSEWLADHPVMINSVLPLVLHALGNPELSVSSVSTLKKICRECKYDLPPYAANIVAVSQDVLMKQIHKTSQCMWLMQALGFLLSALQVEEILKNLHSLISPYIQQLEKLAEEIPIPPTSGGGRRILGEWKGGWWGGGGVGGVGGWWSVWMGVGGGGLCGEMVWGVGLWGGGIQLIQKVLSKWLNDAQVVEAVCAIFEKSVKTLLDDFAPMVPQLCEMLGRMYSTIPQASALDLTRQLVHIFAHEPAHFPPIEALFLLVTSVTLTLFQQGPRDHPDIVDSFMQLLAQALKRKPDLFLCERLDVKAVFQCAVLALKFPEAPTVKASCGFFTELLPRCGEVESVGKVVQEDGRMLLIAVLEAIGGQASRSLMDCFADILFALNKHCFSLLSMWIKEALQPPGFPSARLSPEQKDTFSQQILRERVNKRRVKEMVKEFTLLCRGLHGTDYTADY

SEQ ID NO: 845134 - protein, 825 aa, Homo sapiens
MERREEQPGAAGAGAAPALDFTVENVEKALHQLYYDPNIENKNLAQKWLMQAQVSPQAWHFSWQLLQPDKVPEIQYFGASALHIKISRYWSDIPTDQYESLKAQLFTQITRFASGSKIVLTRLCVALASLALSMMPDAWPCAVADMVRLFQAEDSPVDGQGRCLALLELLTVLPEEFQTSRLPQYRKGLVRTSLAVECGAVFPLLEQLLQQPSSPSCVRQKVLKCFSSWVQLEVPLQDCEALIQAAFAALQDSELFDSSVEAIVNAISQPDAQRYVNTLLKLIPLVLGLQEQLRQAVQNGDMETSHGICRIAVALGENHSRALLDQVEHWQSFLALVNMIMFCTGIPGHYPVNETTSSLTLTFWYTLQDDILSFEAEKQAVYQQVYRPVYFQLVDVLLHKAQFPSDEEYGFWSSDEKEQFRIYRVDISDTLMYVYEMLGAELLSNLYDKLGRLLTSSEEPYSWQHTEALLYGFQSIAETIDVNYSDVVPGLIGLIPRISISNVQLADTVMFTIGALSEWLADHPVMINSVLPLVLHALGNPELSVSSVSTLKKICRECKYDLPPYAANIVAVSQDVLMKQIHKTSQCMWLMQALGFLLSALQVEEILKNLHSLISPYIQQLEKLAEEIPNPSNKLAIVHILGLLSNLFTTLDISHHEDDHEGPELRKLPVPQGPNPVVVVLQQVFQLIQKVLSKWLNDAQVVEAVCAIFEKSVKTLLDDFAPMVPQLCEMLGRMYSTIPQASALDLTRQLVHIFAHEPAHFPPIEALFLLVTSVTLTLFQQGQDHPDMRFLMQFWQSSEAEPNVPCEDGCKWVSGWRGLQSRAQR

SEQ ID NO: 845135 - protein, 447 aa, Homo sapiens
RVKRLPMEPKFCTGLPLELKTLGNPELSVSSVSTLKKICRECKYDLPPYAANIVAVSQDVLMKQIHKTSQCMWLMQALGFLLSALQVEEILKNLHSLISPYIQQLEKLAEEIPNPSNKLAIVHILGLLSNLFTTLDISHHEDDHEGPELRKLPVPQGPNPVVVVLQQVFQLIQKVLSKWLNDAQVVEAVCAIFEKSVKTLLDDFAPMVPQLCEMLGRMYSTIPQASALDLTRQLVHIFAHEPAHFPPIEALFLLVTSVTLTLFQQGPRDHPDIVDSFMQLLAQALKRKPDLFLCERLDVKAVFQCAVLALKFPEAPTVKASCGFFTELLPRCGEVESVGKVVQEDGRMLLIAVLEAIGGQASRSLMDCFADILFALNKHCFSLLSMWIKEALQPPGFPSARLSPEQKDTFSQQILRERVNKRRVKEMVKEFTLLCRGLHGTDYTADY

SEQ ID NO: 845136 - protein, 103 aa, Homo sapiens
GLQGLEQHQPWTSLWRTWRRYEGSGVGTPVTEQKFWGLSLMAELRPGLGARWYGAPRAPGICSLSGQAVLQCPNGLFLSFLTGRSPVDRYSRVLGWSLQGAVT

SEQ ID NO: 845137 - protein, 285 aa, Homo sapiens
MSKKPPNRPGITFEIGARLEALDYLQKWYPSRIEKIDYEEGKMLVHFERWSHRYDEWIYWDSNRLRPLERPALRKEGLKDEEDFFDFKAGEEVLARWTDCRYYPAKIEAINKEGTFTVQFYDGVIRCLKRMHIKAMPEDAKGQDWIALVKAAAAAAAKNKTGSKPRTSANSNKDKDKDERKWFKVPSKKEETSTCIATPDVEKKEDLPTSSETFGLHVENVPKMVFPQPESTLSNKRKNNQGNSFQAKRARLNKITGLLASKAVGVDGAEKKEDYNETAPMLEQV

SEQ ID NO: 845138 - protein, 1001 aa, Homo sapiens
MSKKPPNRPGITFEIGARLEALDYLQKWYPSRIEKIDYEEGKMLVHFERWSHRYDEWIYWDSNRLRPLERPALRKEGLKDEEDFFDFKAGEEVLARWTDCRYYPAKIEAINKEGTFTVQFYDGVIRCLKRMHIKAMPEDAKGQVKSQHPLSWCCPIDPAGSCNQSMGSEDWIALVKAAAAAAAKNKTGSKPRTSANSNKDKDKDERKWFKVPSKKEETSTCIATPDVEKKEDLPTSSETFGLHVENVPKMVFPQPESTLSNKRKNNQGNSFQAKRARLNKITGLLASKAVGVDGAEKKEDYNETAPMLEQAISPKPQSQKKNEADISSSANTQKPALLSSTLSSGKARSKKCKHESGDSSGCIKPPKSPLSPELIQVEDLTLVSQLSSSVINKTSPPQPVNPPRPFKHSERRRRSQRLATLPMPDDSVEKVSSPSPATDGKVFSISSQNQQESSVPEVPDVAHLPLEKLGPCLPLDLSRGSEVTAPVASDSSYRNECPRAEKEDTQMLPNPSSKAIADGRGAPAAAGISKTEKKVKLEDKSSTAFGKRKEKDKERREKRDKDHYRPKQKKKKKKKKKSKQHDYSDYEDSSLEFLERCSSPLTRSSGSSLASRSMFTEKTTTYQYPRAILSVDLSGEILSGDEYNQDFDSTNFEESQDEDDALNEIVRCICEMDEENGFMIQCEECLCWQHSVCMGLLEESIPEQYICYICRDPPGQRWSAKYRYDKEWLNNGRMCGLSFFKENYSHLNAKKIVSTHHLLADVYGVTEVLHGLQLKIGILKNKHHPDLHLWACSGKRKDQDQIIAGVEKKIAQDTVNREEKKYVQNHKEPPRLPLKMEGTYITSEHSYQKPQSFGQDCKSLADPGSSDDDDVSSLEEEQEFHMRSKNSLQYSAKEHGMPEKNPAEGNTVFVYNDKKGTEDPGDSHLQWQLNLLTHIENVQNEVTSRMDLIEKEVDVLESWLDFTGELEPPDPLARLPQLKRHIKQLLIDMGKVQQIATLCSV

SEQ ID NO: 845139 - protein, 573 aa, Homo sapiens
MSKKPPNRPGITFEIGARLEALDYLQKWYPSRIEKIDYEEGKMLVHFERWSHRYDEWIYWDSNRLRPLERPALRKEGLKDEEDFFDFKAGEEVLARWTDCRYYPAKIEAINKEGTFTVQFYDGVIRCLKRMHIKAMPEDAKGQVKSQHPLSWCCPIDPAGSCNQSMGSEDWIALVKAAAAAAAKNKTGSKPRTSANSNKDKDKDERKWFKVPSKKEETSTCIATPDVEKKEDLPTSSETFGLHVENVPKMVFPQPESTLSNKRKNNQGNSFQAKRARLNKITGLLASKAVGVDGAEKKEDYNETAPMLEQAISPKPQSQKKNEADISSSANTQKPALLSSTLSSGKARSKKCKHESGDSSGCIKPPKSPLSPELIQVEDLTLVSQLSSSVINKTSPPQPVNPPRPFKHSERRRRSQRLATLPMPDDSVEKVSSPSPATDGKVFSISSQNQQESSVPEVPDVAHLPLEKLGPCLPLDLSRGSEVTAPVASDSSYRNECPRAEKEDTQMLPNPSSKAIADGRGAPAAAGISKTEKKVKLEDKSSTAFGIRSWDFSALLMKIPSYSPISLSGLPES

SEQ ID NO: 845140 - protein, 1002 aa, Homo sapiens
MSKKPPNRPGITFEIGARLEALDYLQKWYPSRIEKIDYEEGKMLVHFERWSHRYDEWIYWDSNRLRPLERPALRKEGLKDEEDFFDFKAGEEVLARWTDCRYYPAKIEAINKEGTFTVQFYDGVIRCLKRMHIKAMPEDAKGQDWIALVKAAAAAAAKNKTGSKPRTSANSNKDKDKDERKWFKVPSKKEETSTCIATPDVEKKEDLPTSSETFDKLSYMCSVESRLHVENVPKMVFPQPESTLSNKRKNNQGNSFQAKRARLNKITGLLASKAVGVDGAEKKEDYNETAPMLEQAISPKPQSQKKNEADISSSANTQKPALLSSTLSSGKARSKKCKHESGDSSGCIKPPKSPLSPELIQVEDLTLVSQLSSSVINKTSPPQPVNPPRPFKHSERRRRSQRLATLPMPDDSVEKVSSPSPATDGKVFSISSQNQQESSVPEVPDVAHLPLEKLGPCLPLDLSRGSEVTAPVASDSSYRNECPRAEKEDTQMLPNPSSKAIADGRGAPAAAGISKTEKKVKLEDKSSTAFGKRKEKDKERREKRDKDHYRPKQKKKKKKKKKSKQHDYSDYEDSSLEFLERCSSPLTRSSGSSLASRSMFTEKTTTYQYPRAILSVDLSGENLSDVDFLDDSSTESLLLSGDEYNQDFDSTNFEESQDEDDALNEIVRCICEMDEENGFMIQCEECLCWQHSVCMGLLEESIPEQYICYICRDPPGQRWSAKYRYDKEWLNNGRMCGLSFFKENYSHLNAKKIVSTHHLLADVYGVTEVLHGLQLKIGILKNKHHPDLHLWACSGKRKDQDQIIAGVEKKIAQDTVNREEKKYVQNHKEPPRLPLKMEGTYITSEHSYQKPQSFGQDCKSLADPGSSDDDDVSSLEEEQEFHMRSKNSLQYSAKEHGMPEKNPAEGNTVFVYNDKKGTEDPGDSHLQWQLNLLTHIENVQNEVTSRMDLIEKEVDVLESWLDFTGELEPPDPLARLPQLKRHIKQLLIDMGKVQQIATLCSV

SEQ ID NO: 845141 - protein, 505 aa, Homo sapiens
MSKKPPNRPGITFEIGARLEALDYLQKWYPSRIEKIDYEEGKMLVHFERWSHRYDEWIYWDSNRLRPLERPALRKEGLKDEEDFFDFKAGEEVLARWTDCRYYPAKIEAINKEGTFTVQFYDGVIRCLKRMHIKAMPEDAKGQDWIALVKAAAAAAAKNKTGSKPRTSANSNKDKDKDERKWFKVPSKKEETSTCIATPDVEKKEDLPTSSETFGLHVENVPKMVFPQPESTLSNKRKNNQGNSFQAKRARLNKITGRDQLVYFIANIEYWKVCNFIGLLASKAVGVDGAEKKEDYNETAPMLEQAISPKPQSQKKNEADISSSANTQKPALLSSTLSSGKARSKKCKHESGDSSGCIKPPKSPLSPELIQVEDLTLVSQLSSSVINKTMPDVAHLPLEKLGPCLPLDLSRGSEVTAPVASDSSYRNECPRAEKEDTQMLPNPSSKAIADGRGAPAAAGISKTEKKVKLEDKSSTAFGIRSWDFSALLMKIPSYSPISLSGLPES

SEQ ID NO: 845142 - protein, 422 aa, Homo sapiens
MSKKPPNRPGITFEIGARLEALDYLQKWYPSRIEKIDYEEGKMLVHFERWSHRYDEWIYWDSNRLRPLERPALRKEGLKDEEDFFDFKAGEEVLARWTDCRYYPAKIEAINKEGTFTVQFYDGVIRCLKRMHIKAMPEDAKGQDWIALVKAAAAAAAKNKTGSKPRTSANSNKDKDKDERKWFKVPSKKEETSTCIATPDVEKKEDLPTSSETFGLHVENVPKMVFPQPESTLSNKRKNNQGNSFQAKRARLNKITGLLASKAVGVDGAEKKEDYNETAPMLEQAISPKPQSQKKNEADISSSANTQKPALLSSTLSSGKARSKKCKHESGDSSGCIKPPKSPLSPELIQVEDLTLVSQLSSSVINKTSPPQPVNPPRPFKHSERRRRSQRLATLPMPDDSVEKVSSPSPATDGKVFSISSH

SEQ ID NO: 845143 - protein, 636 aa, Homo sapiens
MYLRRLNIEDLFLGPPQPVNPPRPFKHSERRRRSQRLATLPMPDDSVEKVSSPSPATDGKVFSISSQNQQESSVPEVPDVAHLPLEKLGPCLPLDLSRGSEVTAPVASDSSYRNECPRAEKEDTQMLPNPSSKAIADGRGAPAAAGISKTEKKVKLEDKSSTAFGKRKEKDKERREKRDKDHYRPKQKKKKKKKKKSKQHDYSDYEDSSLEFLERCSSPLTRSSGSSLASRSMFTEKTTTYQYPRAILSVDLSGENLSDVDFLDDSSTESLLLSGDEYNQDFDSTNFEESQDEDDALNEIVRCICEMDEENGFMIQCEECLCWQHSVCMGLLEESIPEQYICYICRDPPGQRWSAKYRYDKEWLNNGRMCGLSFFKENYSHLNAKKIVSTHHLLADVYGVTEVLHGLQLKIGILKNKHHPDLHLWACSGKRKDQDQIIAGVEKKIAQDTVNREEKKYVQNHKEPPRLPLKMEGTYITSEHSYQKPQSFGQDCKSLADPGSSDDDDVSSLEEEQEFHMRSKNSLQYSAKEHGMPEKNPAEGNTVFVYNDKKGTEDPGDSHLQWQLNLLTHIENVQNEVTSRMDLIEKEVDVLESWLDFTGELEPPDPLARLPQLKRHIKQLLIDMGKVQQIATLCSV

SEQ ID NO: 845144 - protein, 511 aa, Homo sapiens
MLPNPSSKAIADGRGAPAAAGISKTEKKVKLEDKSSTAFGKRKEKDKERREKRDKDHYRPKQKKKKKKKKKSKQHDYSDYEDSSLEFLERCSSPLTRSSGSSLASRSMFTEKTTTYQYPRAILSVDLSGENLSDVDFLDDSSTESLLLSGDEYNQDFDSTNFEESQDEDDALNEIVRCICEMDEENGFMIQCEECLCWQHSVCMGLLEESIPEQYICYICRDPPGQRWSAKYRYDKEWLNNGRMCGLSFFKENYSHLNAKKIVSTHHLLADVYGVTEVLHGLQLKIGILKNKHHPDLHLWACSGKRKDQDQIIAGVEKKIAQDTVNREEKKYVQNHKEPPRLPLKMEGTYITSEHSYQKPQSFGQDCKSLADPGSSDDDDVSSLEEEQEFHMRSKNSLQYSAKEHGMPEKNPAEGNTVFVYNDKKGTEDPGDSHLQWQLNLLTHIENVQNEVTSRMDLIEKEVDVLESWLDFTGELEPPDPLARLPQLKRHIKQLLIDMGKVQQIATLCSV

SEQ ID NO: 845145 - protein, 404 aa, Homo sapiens
MFTEKTTTYQYPRAILSVDLSGENLSDVDFLDDSSTESLLLSGDEYNQDFDSTNFEESQDEDDALNEIVRCICEMDEENGFMIQCEECLCWQHSVCMGLLEESIPEQYICYICRDPPGQRWSAKYRYDKEWLNNGRMCGLSFFKENYSHLNAKKIVSTHHLLADVYGVTEVLHGLQLKIGILKNKHHPDLHLWACSGKRKDQDQIIAGVEKKIAQDTVNREEKKYVQNHKEPPRLPLKMEGTYITSEHSYQKPQSFGQDCKSLADPGSSDDDDVSSLEEEQEFHMRSKNSLQYSAKEHGMPEKNPAEGNTVFVYNDKKGTEDPGDSHLQWQLNLLTHIENVQNEVTSRMDLIEKEVDVLESWLDFTGELEPPDPLARLPQLKRHIKQLLIDMGKVQQIATLCSV

SEQ ID NO: 845146 - protein, 404 aa, Homo sapiens; identical to SEQ ID NO: 845145

SEQ ID NO: 845147 - protein, 1017 aa, Homo sapiens
MSKKPPNRPGITFEIGARLEALDYLQKWYPSRIEKIDYEEGKMLVHFERWSHRYDEWIYWDSNRLRPLERPALRKEGLKDEEDFFDFKAGEEVLARWTDCRYYPAKIEAINKEGTFTVQFYDGVIRCLKRMHIKAMPEDAKGQVKSQHPLSWCCPIDPAGSCNQSMGSEDWIALVKAAAAAAAKNKTGSKPRTSANSNKDKDKDERKWFKVPSKKEETSTCIATPDVEKKEDLPTSSETFGLHVENVPKMVFPQPESTLSNKRKNNQGNSFQAKRARLNKITGLLASKAVGVDGAEKKEDYNETAPMLEQAISPKPQSQKKNEADISSSANTQKPALLSSTLSSGKARSKKCKHESGDSSGCIKPPKSPLSPELIQVEDLTLVSQLSSSVINKTSPPQPVNPPRPFKHSERRRRSQRLATLPMPDDSVEKVSSPSPATDGKVFSISSQNQQESSVPEVPDVAHLPLEKLGPCLPLDLSRGSEVTAPVASDSSYRNECPRAEKEDTQMLPNPSSKAIADGRGAPAAAGISKTEKKVKLEDKSSTAFGKRKEKDKERREKRDKDHYRPKQKKKKKKKKKSKQHDYSDYEDSSLEFLERCSSPLTRSSGSSLASRSMFTEKTTTYQYPRAILSVDLSGENLSDVDFLDDSSTESLLLSGDEYNQDFDSTNFEESQDEDDALNEIVRCICEMDEENGFMIQCEECLCWQHSVCMGLLEESIPEQYICYICRDPPGQRWSAKYRYDKEWLNNGRMCGLSFFKENYSHLNAKKIVSTHHLLADVYGVTEVLHGLQLKIGILKNKHHPDLHLWACSGKRKDQDQIIAGVEKKIAQDTVNREEKKYVQNHKEPPRLPLKMEGTYITSEHSYQKPQSFGQDCKSLADPGSSDDDDVSSLEEEQEFHMRSKNSLQYSAKEHGMPEKNPAEGNTVFVYNDKKGTEDPGDSHLQWQLNLLTHIENVQNEVTSRMDLIEKEVDVLESWLDFTGELEPPDPLARLPQLKRHIKQLLIDMGKVQQIATLCSV

SEQ ID NO: 845148 - protein, 938 aa, Homo sapiens
MSKKPPNRPGITFEIGARLEALDYLQKWYPSRIEKIDYEEGKMLVHFERWSHRYDEWIYWDSNRLRPLERPALRKEGLKDEEDFFDFKAGEEVLARWTDCRYYPAKIEAINKEGTFTVQFYDGVIRCLKRMHIKAMPEDAKGQVKSQHPLSWCCPIDPAGSCNQSMGSEDWIALVKAAAAAAAKNKTGSKPRTSANSNKDKDKDERKWFKVPSKKEETSTCIATPDVEKKEDLPTSSETFGLHVENVPKMVFPQPESTLSNKRKNNQGNSFQAKRARLNKITGLLASKAVGVDGAEKKEDYNETAPMLEQAISPKPQSQKKNEADISSSANTQKPALLSSTLSSGKARSKKCKHESGDSSGCIKPPKSPLSPELIQVEDLTLVSQLSSSVINKTSPPQPVNPPRPFKHSERRRRSQRLATLPMPDDSVEKVSSPSPATDGKVFSISSQNQQESSVPEVPDVAHLPLEKLGPCLPLDLSRGSEVTAPVASDSSYRNECPRAEKEDTQMLPNPSSKAIADGRGAPAAAGISKTEKKVKLEDKSSTAFGKRKEKDKERREKRDKDHYRPKQKKKKKKKKKSKQHDYSDYEDSSLEFLERCSSPLTRSSGSSLASRSMFTEKTTTYQYPRAILSVDLSGENLSDVDFLDDSSTESLLLSGDEYNQDFDSTNFEESQDEDDALNEIVRCICEMDEENGFMIQCEECLCWQHSVCMGLLEESIPEQYICYICRDPPGQRWSAKYRYDKEWLNNGRMCGLSFFKENYSHLNAKKIVSTHHLLADVYGVTEVLHGLQLKIGILKNKHHPDLHLWACSGKRKDQDQIIAGVEKKIAQDTVNREEKKYVQNHKEPPRLPLKMEGTYITSEHSYQKPQSFGQDCKSLADPGSSDDDDVSSLEEEQEFHMRSKNSLQYSAKEHGMPEKVKLVHFSLLGNYERRTKENFIK

SEQ ID NO: 845149 - protein, 642 aa, Homo sapiens
MSKKPPNRPGITFEIGARLEALDYLQKWYPSRIEKIDYEEGKMLVHFERWSHRYDEWIYWDSNRLRPLERPALRKEGLKDEEDFFDFKAGEEVLARWTDCRYYPAKIEAINKEGTFTVQFYDGVIRCLKRMHIKAMPEDAKGQVKSQHPLSWCCPIDPAGSCNQSMGSEDWIALVKAAAAAAAKNKTGSKPRTSANSNKDKDKDERKWFKVPSKKEETSTCIATPDVEKKEDLPTSSETFGLHVENVPKMVFPQPESTLSNKRKNNQGNSFQAKRARLNKITGLLASKAVGVDGAEKKEDYNETAPMLEQAISPKPQSQKKNEADISSSANTQKPALLSSTLSSGKARSKKCKHESGDSSGCIKPPKSPLSPELIQVEDLTLVSQLSSSVINKTSPPQPVNPPRPFKHSERRRRSQRLATLPMPDDSVEKVSSPSPATDGKVFSISSQNQQESSVPEVPDVAHLPLEKLGPCLPLDLSRGSEVTAPVASDSSYRNECPRAEKEDTQMLPNPSSKAIADGRGAPAAAGISKTEKKVKLEDKSSTAFGKRKEKDKERREKRDKDHYRPKQKKKKKKKKKSKQHDYSDYEDSSLEFLERCSSPLTRSSGSSLASRSMFTEKTTTYQYPRAILSVDLSGEKVCVTM

SEQ ID NO: 845150 - protein, 679 aa, Homo sapiens
MSKKPPNRPGITFEIGARLEALDYLQKWYPSRIEKIDYEEGKMLVHFERWSHRYDEWIYWDSNRLRPLERPALRKEGLKDEEDFFDFKAGEEVLARWTDCRYYPAKIEAINKEGTFTVQFYDGVIRCLKRMHIKAMPEDAKGQVKSQHPLSWCCPIDPAGSCNQSMGSEDWIALVKAAAAAAAKNKTGSKPRTSANSNKDKDKDERKWFKVPSKKEETSTCIATPDVEKKEDLPTSSETFGLHVENVPKMVFPQPESTLSNKRKNNQGNSFQAKRARLNKITGLLASKAVGVDGAEKKEDYNETAPMLEQAISPKPQSQKKNEADISSSANTQKPALLSSTLSSGKARSKKCKHESGDSSGCIKPPKSPLSPELIQVEDLTLVSQLSSSVINKTSPPQPVNPPRPFKHSERRRRSQRLATLPMPDDSVEKVSSPSPATDGKVFSISSQNQQESSVPEVPDVAHLPLEKLGPCLPLDLSRGSEVTAPVASDSSYRNECPRAEKEDTQMLPNPSSKAIADGRGAPAAAGISKTEKKVKLEDKSSTAFGKRKEKDKERREKRDKDHYRPKQKKKKKKKKKSKQHDYSDYEDSSLEFLERCSSPLTRSSGSSLASRSMFTEKTTTYQYPRAILSVDLSGENLSDVDFLDDSSTESLLLSGDEYNQDFDSTNFEESQDEDDALF

SEQ ID NO: 845151 - protein, 384 aa, Homo sapiens
MSKKPPNRPGITFEIGARLEALDYLQKWYPSRIEKIDYEEGKMLVHFERWSHRYDEWIYWDSNRLRPLERPALRKEGLKDEEDFFDFKAGEEVLARWTDCRYYPAKIEAINKEGTFTVQFYDGVIRCLKRMHIKAMPEDAKGQDWIALVKAAAAAAAKNKTGSKPRTSANSNKDKDKDERKWFKVPSKKEETSTCIATPDVEKKEDLPTSSETFGLHVENVPKMVFPQPESTLSNKRKNNQGNSFQAKRARLNKITGLLASKAVGVDGAEKKEDYNETAPMLEQAISPKPQSQKKNEADISSSANTQKPALLSSTLSSGKARSKKCKHESGDSSGCIKPPKSPLSPELIQVEDLTLVSQLSSSVINKTSEHRFLKNSYLSYKIH

SEQ ID NO: 845152 - protein, 150 aa, Homo sapiens
MFCVFPLEDWIALVKAAAAAAAKNKTGSKPRTSANSNKDKDKDERKWFKVPSKKEETSTCIATPDVEKKEDLPTSSETFGLHVENVPKMVFPQPESTLSNKRKNNQGNSFQAKRARLNKITGLLASKAVGVDGAEKKEDYNETAPMLEQV

SEQ ID NO: 845153 - protein, 1017 aa, Homo sapiens; identical to SEQ ID NO: 845147

SEQ ID NO: 845154 - protein, 991 aa, Homo sapiens
MSKKPPNRPGITFEIGARLEALDYLQKWYPSRIEKIDYEEGKMLVHFERWSHRYDEWIYWDSNRLRPLERPALRKEGLKDEEDFFDFKAGEEVLARWTDCRYYPAKIEAINKEGTFTVQFYDGVIRCLKRMHIKAMPEDAKGQDWIALVKAAAAAAAKNKTGSKPRTSANSNKDKDKDERKWFKVPSKKEETSTCIATPDVEKKEDLPTSSETFGLHVENVPKMVFPQPESTLSNKRKNNQGNSFQAKRARLNKITGLLASKAVGVDGAEKKEDYNETAPMLEQAISPKPQSQKKNEADISSSANTQKPALLSSTLSSGKARSKKCKHESGDSSGCIKPPKSPLSPELIQVEDLTLVSQLSSSVINKTSPPQPVNPPRPFKHSERRRRSQRLATLPMPDDSVEKVSSPSPATDGKVFSISSQNQQESSVPEVPDVAHLPLEKLGPCLPLDLSRGSEVTAPVASDSSYRNECPRAEKEDTQMLPNPSSKAIADGRGAPAAAGISKTEKKVKLEDKSSTAFGKRKEKDKERREKRDKDHYRPKQKKKKKKKKKSKQHDYSDYEDSSLEFLERCSSPLTRSSGSSLASRSMFTEKTTTYQYPRAILSVDLSGENLSDVDFLDDSSTESLLLSGDEYNQDFDSTNFEESQDEDDALNEIVRCICEMDEENGFMIQCEECLCWQHSVCMGLLEESIPEQYICYICRDPPGQRWSAKYRYDKEWLNNGRMCGLSFFKENYSHLNAKKIVSTHHLLADVYGVTEVLHGLQLKIGILKNKHHPDLHLWACSGKRKDQDQIIAGVEKKIAQDTVNREEKKYVQNHKEPPRLPLKMEGTYITSEHSYQKPQSFGQDCKSLADPGSSDDDDVSSLEEEQEFHMRSKNSLQYSAKEHGMPEKNPAEGNTVFVYNDKKGTEDPGDSHLQWQLNLLTHIENVQNEVTSRMDLIEKEVDVLESWLDFTGELEPPDPLARLPQLKRHIKQLLIDMGKVQQIATLCSV

SEQ ID NO: 845155 - protein, 852 aa, Homo sapiens
MGSEDWIALVKAAAAAAAKNKTGSKPRTSANSNKDKDKDERKWFKVPSKKEETSTCIATPDVEKKEDLPTSSETFGLHVENVPKMVFPQPESTLSNKRKNNQGNSFQAKRARLNKITGLLASKAVGVDGAEKKEDYNETAPMLEQAISPKPQSQKKNEADISSSANTQKPALLSSTLSSGKARSKKCKHESGDSSGCIKPPKSPLSPELIQVEDLTLVSQLSSSVINKTSPPQPVNPPRPFKHSERRRRSQRLATLPMPDDSVEKVSSPSPATDGKVFSISSQNQQESSVPEVPDVAHLPLEKLGPCLPLDLSRGSEVTAPVASDSSYRNECPRAEKEDTQMLPNPSSKAIADGRGAPAAAGISKTEKKVKLEDKSSTAFGKRKEKDKERREKRDKDHYRPKQKKKKKKKKKSKQHDYSDYEDSSLEFLERCSSPLTRSSGSSLASRSMFTEKTTTYQYPRAILSVDLSGENLSDVDFLDDSSTESLLLSGDEYNQDFDSTNFEESQDEDDALNEIVRCICEMDEENGFMIQCEECLCWQHSVCMGLLEESIPEQYICYICRDPPGQRWSAKYRYDKEWLNNGRMCGLSFFKENYSHLNAKKIVSTHHLLADVYGVTEVLHGLQLKIGILKNKHHPDLHLWACSGKRKDQDQIIAGVEKKIAQDTVNREEKKYVQNHKEPPRLPLKMEGTYITSEHSYQKPQSFGQDCKSLADPGSSDDDDVSSLEEEQEFHMRSKNSLQYSAKEHGMPEKNPAEGNTVFVYNDKKGTEDPGDSHLQWQLNLLTHIENVQNEVTSRMDLIEKEVDVLESWLDFTGELEPPDPLARLPQLKRHIKQLLIDMGKVQQIATLCSV

SEQ ID NO: 845156 - protein, 856 aa, Homo sapiens
MFCVFPLEDWIALVKAAAAAAAKNKTGSKPRTSANSNKDKDKDERKWFKVPSKKEETSTCIATPDVEKKEDLPTSSETFGLHVENVPKMVFPQPESTLSNKRKNNQGNSFQAKRARLNKITGLLASKAVGVDGAEKKEDYNETAPMLEQAISPKPQSQKKNEADISSSANTQKPALLSSTLSSGKARSKKCKHESGDSSGCIKPPKSPLSPELIQVEDLTLVSQLSSSVINKTSPPQPVNPPRPFKHSERRRRSQRLATLPMPDDSVEKVSSPSPATDGKVFSISSQNQQESSVPEVPDVAHLPLEKLGPCLPLDLSRGSEVTAPVASDSSYRNECPRAEKEDTQMLPNPSSKAIADGRGAPAAAGISKTEKKVKLEDKSSTAFGKRKEKDKERREKRDKDHYRPKQKKKKKKKKKSKQHDYSDYEDSSLEFLERCSSPLTRSSGSSLASRSMFTEKTTTYQYPRAILSVDLSGENLSDVDFLDDSSTESLLLSGDEYNQDFDSTNFEESQDEDDALNEIVRCICEMDEENGFMIQCEECLCWQHSVCMGLLEESIPEQYICYICRDPPGQRWSAKYRYDKEWLNNGRMCGLSFFKENYSHLNAKKIVSTHHLLADVYGVTEVLHGLQLKIGILKNKHHPDLHLWACSGKRKDQDQIIAGVEKKIAQDTVNREEKKYVQNHKEPPRLPLKMEGTYITSEHSYQKPQSFGQDCKSLADPGSSDDDDVSSLEEEQEFHMRSKNSLQYSAKEHGMPEKNPAEGNTVFVYNDKKGTEDPGDSHLQWQLNLLTHIENVQNEVTSRMDLIEKEVDVLESWLDFTGELEPPDPLARLPQLKRHIKQLLIDMGKVQQIATLCSV

SEQ ID NO: 845157 - protein, 595 aa, Homo sapiens
MPDDSVEKVSSPSPATDGKVFSISSQNQQESSVPEVPDVAHLPLEKLGPCLPLDLSRGSEVTAPVASDSSYRNECPRAEKEDTQMLPNPSSKAIADGRGAPAAAGISKTEKKVKLEDKSSTAFGKRKEKDKERREKRDKDHYRPKQKKKKKKKKKSKQHDYSDYEDSSLEFLERCSSPLTRSSGSSLASRSMFTEKTTTYQYPRAILSVDLSGENLSDVDFLDDSSTESLLLSGDEYNQDFDSTNFEESQDEDDALNEIVRCICEMDEENGFMIQCEECLCWQHSVCMGLLEESIPEQYICYICRDPPGQRWSAKYRYDKEWLNNGRMCGLSFFKENYSHLNAKKIVSTHHLLADVYGVTEVLHGLQLKIGILKNKHHPDLHLWACSGKRKDQDQIIAGVEKKIAQDTVNREEKKYVQNHKEPPRLPLKMEGTYITSEHSYQKPQSFGQDCKSLADPGSSDDDDVSSLEEEQEFHMRSKNSLQYSAKEHGMPEKNPAEGNTVFVYNDKKGTEDPGDSHLQWQLNLLTHIENVQNEVTSRMDLIEKEVDVLESWLDFTGELEPPDPLARLPQLKRHIKQLLIDMGKVQQIATLCSV

SEQ ID NO: 845158 - protein, 1017 aa, Homo sapiens; identical to SEQ ID NO: 845147

SEQ ID NO: 845159 - protein, 497 aa, Homo sapiens
FTSYPTGISKTEKKVKLEDKSSTAFGKRKEKDKERREKRDKDHYRPKQKKKKKKKKKSKQHDYSDYEDSSLEFLERCSSPLTRSSGSSLASRSMFTEKTTTYQYPRAILSVDLSGENLSDVDFLDDSSTESLLLSGDEYNQDFDSTNFEESQDEDDALNEIVRCICEMDEENGFMIQCEECLCWQHSVCMGLLEESIPEQYICYICRDPPGQRWSAKYRYDKEWLNNGRMCGLSFFKENYSHLNAKKIVSTHHLLADVYGVTEVLHGLQLKIGILKNKHHPDLHLWACSGKRKDQDQIIAGVEKKIAQDTVNREEKKYVQNHKEPPRLPLKMEGTYITSEHSYQKPQSFGQDCKSLADPGSSDDDDVSSLEEEQEFHMRSKNSLQYSAKEHGMPEKNPAEGNTVFVYNDKKGTEDPGDSHLQWQLNLLTHIENVQNEVTSRMDLIEKEVDVLESWLDFTGELEPPDPLARLPQLKRHIKQLLIDMGKVQQIATLCSV

SEQ ID NO: 845160 - protein, 330 aa, Homo sapiens
MDEENGFMIQCEECLCWQHSVCMGLLEESIPEQYICYICRDPPGQRWSAKYRYDKEWLNNGRMCGLSFFKENYSHLNAKKIVSTHHLLADVYGVTEVLHGLQLKIGILKNKHHPDLHLWACSGKRKDQDQIIAGVEKKIAQDTVNREEKKYVQNHKEPPRLPLKMEGTYITSEHSYQKPQSFGQDCKSLADPGSSDDDDVSSLEEEQEFHMRSKNSLQYSAKEHGMPEKNPAEGNTVFVYNDKKGTEDPGDSHLQWQLNLLTHIENVQNEVTSRMDLIEKEVDVLESWLDFTGELEPPDPLARLPQLKRHIKQLLIDMGKVQQIATLCSV

SEQ ID NO: 845161 - protein, 573 aa, Homo sapiens; identical to SEQ ID NO: 845139

SEQ ID NO: 845162 - protein, 711 aa, Homo sapiens
MSKKPPNRPGITFEIGARLEALDYLQKWYPSRIEKIDYEEGKMLVHFERWSHRYDEWIYWDSNRLRPLERPALRKEGLKDEEDFFDFKAGEEVLARWTDCRYYPAKIEAINKEGTFTVQFYDGVIRCLKRMHIKAMPEDAKGQVKSQHPLSWCCPIDPAGSCNQSMGSEDWIALVKAAAAAAAKNKTGSKPRTSANSNKDKDKDERKWFKVPSKKEETSTCIATPDVEKKEDLPTSSETFGLHVENVPKMVFPQPESTLSNKRKNNQGNSFQAKRARLNKITGLLASKAVGVDGAEKKEDYNETAPMLEQAISPKPQSQKKNEADISSSANTQKPALLSSTLSSGKARSKKCKHESGDSSGCIKPPKSPLSPELIQVEDLTLVSQLSSSVINKTSPPQPVNPPRPFKHSERRRRSQRLATLPMPDDSVEKVSSPSPATDGKVFSISSQNQQESSVPEVPDVAHLPLEKLGPCLPLDLSRGSEVTAPVASDSSYRNECPRAEKEDTQMLPNPSSKAIADGRGAPAAAGISKTEKKVKLEDKSSTAFGKRKEKDKERREKRDKDHYRPKQKKKKKKKKKSKQHDYSDYEDSSLEFLERCSSPLTRSSGSSLASRSMFTEKTTTYQYPRAILSVDLSGENLSDVDFLDDSSTESLLLSGDEYNQDFDSTNFEESQDEDDALNEIVRCICEMDEENGFMIQCEECLCAPRVLGRT

SEQ ID NO: 845163 - protein, 512 aa, Homo sapiens
MSKKPPNRPGITFEIGARLEALDYLQKWYPSRIEKIDYEEGKMLVHFERWSHRYDEWIYWDSNRLRPLERPALRKEGLKDEEDFFDFKAGEEVLARWTDCRYYPAKIEAINKEGTFTVQFYDGVIRCLKRMHIKAMPEDAKGQDWIALVKAAAAAAAKNKTGSKPRTSANSNKDKDKDERKWFKVPSKKEETSTCIATPDVEKKEDLPTSSETFGLHVENVPKMVFPQPESTLSNKRKNNQGNSFQAKRARLNKITGLLASKAVGVDGAEKKEDYNETAPMLEQAISPKPQSQKKNEADISSSANTQKPALLSSTLSSGKARSKKCKHESGDSSGCIKPPKSPLSPELIQVEDLTLVSQLSSSVINKTSPPQPVNPPRPFKHSERRRRSQRLATLPMPDDSVEKVSSPSPATDGKVFSISSQNQQESSVPEVPDVAHLPLEKLGPCLPLDLSRGSEVTAPVASDSSYRNECPRAEKEDTQMLPNPSSKAIADGRGAPAAAGKRKKIKAPISR

SEQ ID NO: 845164 - protein, 160 aa, Homo sapiens
MSKKPPNRPGITFEIGARLEALDYLQKWYPSRIEKIDYEEGKMLVHFERWSHRYDEWIYWDSNRLRPLERPALRKEGLKDEEDFFDFKAGEEVLARWTDCRYYPAKIEAINKEGTFTVQFYDGVIRCLKRMHIKAMPEDAKGQVRVFSIPSYPKGYLLER

SEQ ID NO: 845165 - protein, 406 aa, Homo sapiens
MKKKQQHPGGGADPWPHGAPMGGAPPGLGSWKRRVPLLPFLRFSLRDYGFCMATLLVFCLGSLLYQLSGGPPRFLLDLRQYLGNSTYLDDHGPPPSKVLPFPSQVVYNRVGKCGSRTVVLLLRILSEKHGFNLVTSDIHNKTRLTKNEQMELIKNISTAEQPYLFTRHVHFLNFSRFGGDQPVYINIIRDPVNRFLSNYFFRRFGDWRGEQNHMIRTPSMRQEERYLDINECILENYPECSNPRLFYIIPYFCGQHPRCREPGEWALERAKLNVNENFLLVGILEELEDVLLLLERFLPHYFKGVLSIYKDPEHRKLGNMTVTVKKTVPSPEAVQILYQRMRYEYEFYHYVKEQFHLLKRKFGLKSHVSKPPLRPHFFIPTPLETEEPIDDEEQDDEKWLEDIYKR

SEQ ID NO: 845166 - protein, 120 aa, Homo sapiens
VRRPLSYQQGSESELNGVQKEQKAGFEHRKLGNMTVTVKKTVPSPEAVQILYQRMRYEYEFYHYVKEQFHLLKRKFGLKSHVSKPPLRPHFFIPTPLETEEPIDDEEQDDEKWLEDIYKR

SEQ ID NO: 845167 - protein, 230 aa, Homo sapiens
MKKKQQHPGGGADPWPHGAPMGGAPPGLGSWKRRVPLLPFLRFSLRDYGFCMATLLVFCLGSLLYQLSGGPPRFLLDLRQYLGNSTYLDDHGPPPSKVLPFPSQVVYNRVGKCGSRTVVLLLRILSEKHGFNLVTSDIHNKTRLTKNEQMELIKNISTAEQPYLFTRHVHFLNFSRFGGDQPVYINIIRDPVNRFLSNYFFRRFGDWRGEQNHMIRTPSMRQEERYLDQP

SEQ ID NO: 845168 - protein, 1002 aa, Homo sapiens
MIFPVARYALRWLRRPEDRAFSRAAMEMALRGVRKVLCVAEKNDAAKGIADLLSNGRMRRREGLSKFNKIYEFDYHLYGQNVTMVMTSVSGHLLAHDFQMQFRKWQSCNPLVLFEAEIEKYCPENFVDIKKTLERETRQCQALVIWTDCDREGENIGFEIIHVCKAVKPNLQVLRARFSEITPHAVRTACENLTEPDQRVSDAVDVRQELDLRIGAAFTRFQTLRLQRIFPEVLAEQLISYGSCQFPTLGFVVERFKAIQAFVPEIFHRIKVTHDHKDGIVEFNWKRHRLFNHTACLVLYQLCVEDPMATVVEVRSKPKSKWRPQALDTVELEKLASRKLRINAKETMRIAEKLYTQGYISYPRTETNIFPRDLNLTVLVEQQTPDPRWGAFAQSILERGGPTPRNGNKSDQAHPPIHPTKYTNNLQGDEQRLYEFIVRHFLACCSQDAQGQETTVEIDIAQERFVAHGLMILARNYLDVYPYDHWSDKILPVYEQGSHFQPSTVEMVDGETSPPKLLTEADLIALMEKHGIGTDATHAEHIETIKARMYVGLTPDKRFLPGHLGMGLVEGYDSMGYEMSKPDLRAELEADLKLICDGKKDKFVVLRQQVQKYKQVFIEAVAKAKKLDEALAQYFGNGTELAQQEDIYPAMPEPIRKCPQCNKDMVLKTKKNGGFYLSCMGFPECRSAVWLPDSVLEASRDSSVCPVCQPHPVYRLKLKFKRGSLPPTMPLEFVCCIGGCDDTLREILDLRFSGGPPRASQPSGRLQANQSLNRMDNSQHPQPADSRQTGSSKALAYSTLPPPTAAGESNSVTCNCGQEAVLLTVRKEGPNRGRQFFKCNGGSCNFFLWADSPNPGAGGPPALAYRPLGASLGCPPGPGIHLGGFGNPGDGSGSGTSCLCSQPSVTRTVQKDGPNKGRQFHTCAKPREQQCGFFQWVDENTAPGTSGAPSWTGDRGRTLESEARSKRPRASSSDMGSTAKKPRKCSLCHQPGHTRPFCPQNR

SEQ ID NO: 845169 - protein, 114 aa, Homo sapiens
MIFPVARYALRWLRRPEDRAFSRAAMEMALRGVRKVLCVAEKNDAAKGIADLLSNGRMRRREGLSKFNKIYEFDYHLYGQVGAKIFLKYFNHKQEKVVSLVICRICRCLKNNNC

SEQ ID NO: 845170 - protein, 1002 aa, Homo sapiens; identical to SEQ ID NO: 845168

SEQ ID NO: 845171 - protein, 1002 aa, Homo sapiens; identical to SEQ ID NO: 845168

SEQ ID NO: 845172 - protein, 1002 aa, Homo sapiens; identical to SEQ ID NO: 845168

SEQ ID NO: 845173 - protein, 590 aa, Homo sapiens
MIFPVARYALRWLRRPEDRAFSRAAMEMALRGVRKVLCVAEKNDAAKGIADLLSNGRMRRREGLSKFNKIYEFDYHLYGQNVTMVMTSVSGHLLAHDFQMQFRKWQSCNPLVLFEAEIEKYCPENFVDIKKTLERETRQCQALVIWTDCDREGENIGFEIIHVCKAVKPNLQVLRARFSEITPHAVRTACENLTEPDQRVSDAVDVRQELDLRIGAAFTRFQTLRLQRIFPEVLAEQLISYGSCQFPTLGFVVERFKAIQAFVPEIFHRIKVTHDHKDGIVEFNWKRHRLFNHTACLVLYQLCVEDPMATVVEVRSKPKSKWRPQALDTVELEKLASRKLRINAKETMRIAEKLYTQGYISYPRTETNIFPRDLNLTVLVEQQTPDPRWGAFAQSILERGGPTPRNGNKSDQAHPPIHPTKYTNNLQGDEQRLYEFIVRHFLACCSQDAQGQETTVEIDIAQERFVAHGLMILARNYLDVYPYDHWSDKILPVYEQGSHFQPSTVEMVDGETSPPKLLTEADLIALMEKHGIGTDATHAEHIETIKARMYVGPPRMVAVSRGLVQSQLKPTVCQRKKLPGLLPSPAESPK

SEQ ID NO: 845174 - protein, 107 aa, Homo sapiens
  misc_feature (39)..(39): Xaa can be any naturally occurring amino acid
  misc_feature (76)..(76): Xaa can be any naturally occurring amino acid
MTPVLIVVLYVTRIHCFSVASDHARVHRVWGTFAKAMGXRVSAGWSFALAGLVSLLLLLGMITLGDSTVGTKTPAXTRTCSTMDIGLFVALKNFTSSSIYNVLPSSS

SEQ ID NO: 845175 - protein, 385 aa, Homo sapiens
  misc_feature (363)..(363): Xaa can be any naturally occurring amino acid
  misc_feature (371)..(371): Xaa can be any naturally occurring amino acid
MIFPVARYALRWLRRPEDRAFSRAAMEMALRGVRKVLCVAEKNDAAKGIADLLSNGRMRRREGLSKFNKIYEFDYHLYGQNVTMVMTSVSGHLLAHDFQMQFRKWQSCNPLVLFEAEIEKYCPENFVDIKKTLERETRQCQALVIWTDCDREGENIGFEIIHVCKAVKPNLQVLRARFSEITPHAVRTACENLTEPDQRVSDAVDVRQELDLRIGAAFTRFQTLRLQRIFPEVLAEQLISYGSCQFPTLGFVVERFKAIQAFVPEIFHRIKVTHDHKDGIVEFNWKRHRLFNHTACLVLYQLCVEDPMATVVEVRSKPKSKWRPQALDTVELEKLASRKLRINAKETMRIAEKLYTQGVHQAXPPNRKPNXFFPKKTFKTLDPVV

SEQ ID NO: 845176 - protein, 171 aa, Homo sapiens [sequence omitted]

SEQ ID NO: 845177 - protein, 1002 aa, Homo sapiens; identical to SEQ ID NO: 845168

SEQ ID NO: 845178 - protein, 669 aa, Homo sapiens
MGATLIGTLSAAAMAHPHNSPTVPLEYCNALIRLSPSALAGTTPPARGSLRPTAIHGAGVAHCRHCQGNPECEQSLHLNQFNPPNYHQTKFIGTGDEQRLYEFIVRHFLACCSQDAQGQETTVEIDIAQERFVAHGLMILARNYLDVYPYDHWSDKILPVYEQGSHFQPSTVEMVDGETSPPKLLTEADLIALMEKHGIGTDATHAEHIETIKARMYVGLTPDKRFLPGHLGMGLVEGYDSMGYEMSKPDLRAELEADLKLICDGKKDKFVVLRQQVQKYKQVFIEAVAKAKKLDEALAQYFGNGTELAQQEDIYPAMPEPIRKCPQCNKDMVLKTKKNGGFYLSCMGFPECRSAVWLPDSVLEASRDSSVCPVCQPHPVYRLKLKFKRGSLPPTMPLEFVCCIGGCDDTLREILDLRFSGGPPRASQPSGRLQANQSLNRMDNSQHPQPADSRQTGSSKALAYSTLPPPTAAGESNSVTCNCGQEAVLLTVRKEGPNRGRQFFKCNGGSCNFFLWADSPNPGAGGPPALAYRPLGASLGCPPGPGIHLGGFGNPGDGSGSGTSCLCSQPSVTRTVQKDGPNKGRQFHTCAKPREQQCGFFQWVDENTAPGTSGAPSWTGDRGRTLESEARSKRPRASSSDMGSTAKKPRKCSLCHQPGHTRPFCPQNR

SEQ ID NO: 845179 - protein, 1002 aa, Homo sapiens; identical to SEQ ID NO: 845168

SEQ ID NO: 845180 - protein, 696 aa, Homo sapiens
MIFPVARYALRWLRRPEDRAFSRAAMEMALRGVRKVLCVAEKNDAAKGIADLLSNGRMRRREGLSKFNKIYEFDYHLYGQNVTMVMTSVSGHLLAHDFQMQFRKWQSCNPLVLFEAEIEKYCPENFVDIKKTLERETRQCQALVIWTDCDREGENIGFEIIHVCKAVKPNLQVLRARFSEITPHAVRTACENLTEPDQRVSDAVDVRQELDLRIGAAFTRFQTLRLQRIFPEVLAEQLISYGSCQFPTLGFVVERFKAIQAFVPEIFHRIKVTHDHKDGIVEFNWKRHRLFNHTACLVLYQLCVEDPMATVVEVRSKPKSKWRPQALDTVELEKLASRKLRINAKETMRIAEKLYTQGYISYPRTETNIFPRDLNLTVLVEQQTPDPRWGAFAQSILERGGPTPRNGNKSDQAHPPIHPTKYTNNLQGDEQRLYEFIVRHFLACCSQDAQGQETTVEIDIAQERFVAHGLMILARNYLDVYPYDHWSDKILPVYEQGSHFQPSTVEMVDGETSPPKLLTEADLIALMEKHGIGTDATHAEHIETIKARMYVGLTPDKRFLPGHLGMGLVEGYDSMGYEMSKPDLRAELEADLKLICDGKKDKFVVLRQQVQKYKQVFIEAVAKAKKLDEALAQYFGNGTELAQQEDIYPAMPEPIRKCPQCNKDMVLKTKKNGGFYLSCMGFPECRSAVWLPDSVL

SEQ ID NO: 845181 - protein, 479 aa, Homo sapiens
MDETSPLVSPERAQPPDYTFPSGSGAHFPQVPGGAVRVAAAAGSGPSPPGSPGHDRERQPLLDRARGAAAQGQTQTVAAQAQALAAQAAAAAHAAQAHRERNEFPEDPEFEAVVRQAELAIERCIFPERIYQGSSGSYFVKDPQGRIIAVFKPKNEEPYGHLNPKWTKWLQKLCCPCCFGRDCLVLNQGYLSEAGASLVDQKLELNIVPRTKVVYLASETFNYSAIDRVKSRGKRLALEKVPKVGQRFNRIGLPPKVGSFQLFVEGYKDADYWLRRFEAEPLPENTNRQLLLQFERLVVLDYIIRNTDRGNDNWLIKYDCPMDSSSSRDTDWVVVKEPVIKVAAIDNGLAFPLKHPDSWRAYPFYWAWLPQAKVPFSQEIKDLILPKISDPNFVKDLEEDLYELFKKDPGFDRGQFHKQIAVMRGQILNLTQALKDNKSPLHLVQMPPVIVETARSHQRSSSESYTQSFQSRKPFFSWW

SEQ ID NO: 845182 - protein, 479 aa, Homo sapiens; identical to SEQ ID NO: 845181

SEQ ID NO: 845183 - protein, 479 aa, Homo sapiens; identical to SEQ ID NO: 845181

SEQ ID NO: 845184 - protein, 479 aa, Homo sapiens; identical to SEQ ID NO: 845181

SEQ ID NO: 845185 - protein, 142 aa, Homo sapiens
MVCALLIASEIFLTAEESLYYFGERRTNKTHSNKFQGVETPSQNRYVGYFAQVKHLYNWNLPPRRILFIKRFIIYSIRGDVCDLKVQVVMEKKVVFSSTSLGNCSILHDIETDKILINVYDGPPLYDDVKVQFFSSALSTKK

SEQ ID NO: 845186 - protein, 684 aa, Homo sapiens
MSAIPAEESDQLLIRPLGAGQEVGRSCIILEFKGRKIMLDCGIHPGLEGMDALPYIDLIDPAEIDLLLISHFHLDHCGALPWFLQKTSFKGRTFMTHATKAIYRWLLSDYVKVSNISADDMLYTETDLEESMDKIETINFHEVKEVAGIKFWCYHAGHVLGAAMFMIEIAGVKLLYTGDFSRQEDRHLMAAEIPNIKPDILIIESTYGTHIHEKREEREARFCNTVHDIVNRGGRGLIPVFALGRAQELLLILDEYWQNHPELHDIPIYYASSLAKKCMAVYQTYVNAMNDKIRKQININNPFVFKHISNLKSMDHFDDIGPSVVMASPGMMQSGLSRELFESWCTDKRNGVIIAGYCVEGTLAKHIMSEPEEITTMSGQKLPLKMSVDYISFSAHTDYQQTSEFIRALKPPHVILVHGEQNEMARLKAALIREYEDNDEVHIEVHNPRNTEAVTLNFRGEKLAKVMGFLADKKPEQGQRVSGILVKRNFNYHILSPCDLSNYTDLAMSTVKQTQAIPYTGPFNLLCYQLQKLTGDVEELEIQEKPALKVFKNITVIQEPGMVVLEWLANPSNDMYADTVTTVILEVQSNPKIRKGAVQKVSKKLEMHVYSKRLEIMLQDIFGEDCVSVKDDSILSVTVDGKTANLNLETRTVECEEGSEDDESLREMVELAAQRLYEALTPVH

SEQ ID NO: 845187 - protein, 684 aa, Homo sapiens; identical to SEQ ID NO: 845186

SEQ ID NO: 845188 - protein, 528 aa, Homo sapiens
EPLGRTLGRTDEIAGVKLLYTGDFSRQEDRHLMAAEIPNIKPDILIIESTYGTHIHEKREEREARFCNTVHDIVNRGGRGLIPVFALGRAQELLLILDEYWQNHPELHDIPIYYASSLAKKCMAVYQTYVNAMNDKIRKQININNPFVFKHISNLKSMDHFDDIGPSVVMASPGMMQSGLSRELFESWCTDKRNGVIIAGYCVEGTLAKHIMSEPEEITTMSGQKLPLKMSVDYISFSAHTDYQQTSEFIRALKPPHVILVHGEQNEMARLKAALIREYEDNDEVHIEVHNPRNTEAVTLNFRGEKLAKVMGFLADKKPEQGQRVSGILVKRNFNYHILSPCDLSNYTDLAMSTVKQTQAIPYTGPFNLLCYQLQKLTGDVEELEIQEKPALKVFKNITVIQEPGMVVLEWLANPSNDMYADTVTTVILEVQSNPKIRKGAVQKVSKKLEMHVYSKRLEIMLQDIFGEDCVSVKDDSILSVTVDGKTANLNLETRTVECEEGSEDDESLREMVELAAQRLYEALTPVH

SEQ ID NO: 845189 - protein, 391 aa, Homo sapiens
MTNRTITSSSLNQHISQLKSMDHFDDIGPSVVMASPGMMQSGLSRELFESWCTDKRNGVIIAGYCVEGTLAKHIMSEPEEITTMSGQKLPLKMSVDYISFSAHTDYQQTSEFIRALKPPHVILVHGEQNEMARLKAALIREYEDNDEVHIEVHNPRNTEAVTLNFRGEKLAKVMGFLADKKPEQGQRVSGILVKRNFNYHILSPCDLSNYTDLAMSTVKQTQAIPYTGPFNLLCYQLQKLTGDVEELEIQEKPALKVFKNITVIQEPGMVVLEWLANPSNDMYADTVTTVILEVQSNPKIRKGAVQKVSKKLEMHVYSKRLEIMLQDIFGEDCVSVKDDSILSVTVDGKTANLNLETRTVECEEGSEDDESLREMVELAAQRLYEALTPVH

SEQ ID NO: 845190 - protein, 282 aa, Homo sapiens
WRNCSLNYPALQILVHGEQNEMARLKAALIREYEDNDEVHIEVHNPRNTEAVTLNFRGEKLAKVMGFLADKKPEQGQRVSGILVKRNFNYHILSPCDLSNYTDLAMSTVKQTQAIPYTGPFNLLCYQLQKLTGDVEELEIQEKPALKVFKNITVIQEPGMVVLEWLANPSNDMYADTVTTVILEVQSNPKIRKGAVQKVSKKLEMHVYSKRLEIMLQDIFGEDCVSVKDDSILSVTVDGKTANLNLETRTVECEEGSEDDESLREMVELAAQRLYEALTPVH

SEQ ID NO: 845191 - protein, 611 aa, Homo sapiens
MSAIPAEESDQLLIRPLGAGQEVGRSCIILEFKGRKIMLDCGIHPGLEGMDALPYIDLIDPAEIDLLLISHFHLDHCGALPWFLQKTSFKGRTFMTHATKAIYRWLLSDYVKVSNISADDMLYTETDLEESMDKIETINFHEVKEVAGIKFWCYHAGHVLGAAMFMIEIAGVKLLYTGDFSRQEDRHLMAAEIPNIKPDILIIESTYGTHIHEKREEREARFCNTVHDIVNRGGRGLIPVFALGRAQELLLILDEYWQNHPELHDIPIYYASSLAKKCMAVYQTYVNAMNDKIRKQININNPFVFKHISNLKSMDHFDDIGPSVVMASPGMMQSGLSRELFESWCTDKRNGVIIAGYCVEGTLAKHIMSEPEEITTMSGQKLPLKMSVDYISFSAHTDYQQTSEFIRALKPPHVILVHGEQNEMARLKAALIREYEDNDEVHIEVHNPRNTEAVTLNFRGEKLAKVMGFLADKKPEQGQRVSGILVKRNFNYHILSPCDLSNYTDLAMSTVKQTQAIPYTGPFNLLCYQLQKLTGDVEELEIQEKPALKVFKNITVIQEPGMVVLEWLANPSNDMYADTVTTVILEVQSNPKIRKESCFVAQAALKCLGLK

SEQ ID NO: 845192 - protein, 539 aa, Homo sapiens
MSAIPAEESDQLLIRPLGAGQEVGRSCIILEFKGRKIMLDCGIHPGLEGMDALPYIDLIDPAEIDLLLISHFHLDHCGALPWFLQKTSFKGRTFMTHATKAIYRWLLSDYVKVSNISADDMLYTETDLEESMDKIETINFHEVKEVAGIKFWCYHAGHVLGAAMFMIEIAGVKLLYTGDFSRQEDRHLMAAEIPNIKPDILIIESTYGTHIHEKREEREARFCNTVHDIVNRGGRGLIPVFALGRAQELLLILDEYWQNHPELHDIPIYYASSLAKKCMAVYQTYVNAMNDKIRKQININNPFVFKHISNLKSMDHFDDIGPSVVMASPGMMQSGLSRELFESWCTDKRNGVIIAGYCVEGTLAKHIMSEPEEITTMSGQKLPLKMSVDYISFSAHTDYQQTSEFIRALKPPHVILVHGEQNEMARLKAALIREYEDNDEVHQSNPKIRKGAVQKVSKKLEMHVYSKRLEIMLQDIFGEDCVSVKDDSILSVTVDGKTANLNLETRTVECEEGSEDDESLREMVELAAQRLYEALTPVH

SEQ ID NO: 845193 - protein, 137 aa, Homo sapiens
MSAIPAEESDQLLIRPLGAGQEVGRSCIILEFKGRKIMLDCGIHPGLEGMDALPYIDLIDPAEIDLLLISHFHLDHCGALPWFLQKTSFKGRTFMTHATKAIYRWLLSDYVKVSNISADDMLYTETDLEGTYLEKTV

SEQ ID NO: 845194 - protein, 684 aa, Homo sapiens; identical to SEQ ID NO: 845186

SEQ ID NO: 845195 - protein, 674 aa, Homo sapiens
MRLQPCSGAGQEVGRSCIILEFKGRKIMLDCGIHPGLEGMDALPYIDLIDPAEIDLLLISHFHLDHCGALPWFLQKTSFKGRTFMTHATKAIYRWLLSDYVKVSNISADDMLYTETDLEESMDKIETINFHEVKEVAGIKFWCYHAGHVLGAAMFMIEIAGVKLLYTGDFSRQEDRHLMAAEIPNIKPDILIIESTYGTHIHEKREEREARFCNTVHDIVNRGGRGLIPVFALGRAQELLLILDEYWQNHPELHDIPIYYASSLAKKCMAVYQTYVNAMNDKIRKQININNPFVFKHISNLKSMDHFDDIGPSVVMASPGMMQSGLSRELFESWCTDKRNGVIIAGYCVEGTLAKHIMSEPEEITTMSGQKLPLKMSVDYISFSAHTDYQQTSEFIRALKPPHVILVHGEQNEMARLKAALIREYEDNDEVHIEVHNPRNTEAVTLNFRGEKLAKVMGFLADKKPEQGQRVSGILVKRNFNYHILSPCDLSNYTDLAMSTVKQTQAIPYTGPFNLLCYQLQKLTGDVEELEIQEKPALKVFKNITVIQEPGMVVLEWLANPSNDMYADTVTTVILEVQSNPKIRKGAVQKVSKKLEMHVYSKRLEIMLQDIFGEDCVSVKDDSILSVTVDGKTANLNLETRTVECEEGSEDDESLREMVELAAQRLYEALTPVH

SEQ ID NO: 845196 - protein, 688 aa, Homo sapiens
MRMKIEKLAKEQTLGISTFKGGAGQEVGRSCIILEFKGRKIMLDCGIHPGLEGMDALPYIDLIDPAEIDLLLISHFHLDHCGALPWFLQKTSFKGRTFMTHATKAIYRWLLSDYVKVSNISADDMLYTETDLEESMDKIETINFHEVKEVAGIKFWCYHAGHVLGAAMFMIEIAGVKLLYTGDFSRQEDRHLMAAEIPNIKPDILIIESTYGTHIHEKREEREARFCNTVHDIVNRGGRGLIPVFALGRAQELLLILDEYWQNHPELHDIPIYYASSLAKKCMAVYQTYVNAMNDKIRKQININNPFVFKHISNLKSMDHFDDIGPSVVMASPGMMQSGLSRELFESWCTDKRNGVIIAGYCVEGTLAKHIMSEPEEITTMSGQKLPLKMSVDYISFSAHTDYQQTSEFIRALKPPHVILVHGEQNEMARLKAALIREYEDNDEVHIEVHNPRNTEAVTLNFRGEKLAKVMGFLADKKPEQGQRVSGILVKRNFNYHILSPCDLSNYTDLAMSTVKQTQAIPYTGPFNLLCYQLQKLTGDVEELEIQEKPALKVFKNITVIQEPGMVVLEWLANPSNDMYADTVTTVILEVQSNPKIRKGAVQKVSKKLEMHVYSKRLEIMLQDIFGEDCVSVKDDSILSVTVDGKTANLNLETRTVECEEGSEDDESLREMVELAAQRLYEALTPVH

SEQ ID NO: 845197 - protein, 371 aa, Homo sapiens [sequence omitted]

SEQ ID NO: 845198 - protein, 619 aa, Homo sapiens
MSAIPAEESDQLLIRPLGAGQEVGRSCIILEFKGRKIMLDCGIHPGLEGMDALPYIDLIDPAEIDLLLISHFHLDHCGALPWFLQKTSFKGRTFMTHATKAIYRWLLSDYVKVSNISADDMLYTETDLEESMDKIETINFHEVKEVAGIKFWCYHAGHVLGAAMFMIEIAGVKLLYTGDFSRQEDRHLMAAEIPNIKPDILIIESTYGTHIHEKREEREARFCNTVHDIVNRGGRGLIPVFALGRAQELLLILDEYWQNHPELHDIPIYYASSLAKKCMAVYQTYVNAMNDKIRKQININNPFVFKHISNLKSMDHFDDIGPSVVMASPGMMQSGLSRELFESWCTDKRNGVIIAGYCVEGTLAKHIMSEPEEITTMSGQKLPLKMSVDYISFSAHTDYQQTSEFIRALKPPHVILVHGEQNEMARLKAALIREYEDNDEVHIEVHNPRNTEAVTLNFRGEKLAKVMGFLADKKPEQGQRVSGILVKRNFNYHILSPCDLSNYTDLAMSTVKQTQAIPYTGPFNLLCYQLQKLTGDVEELEIQEKPALKVFKNITVIQEPGMVVLEWLANPSNDMYADTVTTVILEVQSNPKIRKGAVQKVSKKLEMHVYSKRLEIMLQ

SEQ ID NO: 845199 - protein, 446 aa, Homo sapiens
MSAIPAEESDQLLIRPLGAGQEVGRSCIILEFKGRKIMLDCGIHPGLEGMDALPYIDLIDPAEIDLLLISHFHLDHCGALPWFLQKTSFKGRTFMTHATKAIYRWLLSDYVKVSNISADDMLYTETDLEESMDKIETINFHEVKEVAGIKFWCYHAGHVLGAAMFMIEIAGVKLLYTGDFSRQEDRHLMAAEIPNIKPDILIIESTYGTHIHEKREEREARFCNTVHDIVNRGGRGLIPVFALGRAQELLLILDEYWQNHPELHDIPIYYASSLAKKCMAVYQTYVNAMNDKIRKQININNPFVFKHISNLKSMDHFDDIGPSVVMASPGMMQSGLSRELFESWCTDKRNGVIIAGYCVEGTLAKHIMSEPEEITTMSGQKLPLKMSVDYISFSAHTDYQQTSEFIRALKPPHVILVHGEQNEMARLKAALIREYEDNDEVHIQKQ

SEQ ID NO: 845200 - protein, 98 aa, Homo sapiens
LEKWFDQCSLNTRVTVATKINELDSELELHLHLHQPRAQQIEKDIHNVRAGTDAAWECLPCPQPLLQRLLHRGSMFISCPSLYHAMFSMFSSHHGRCT

SEQ ID NO: 845201 - protein, 102 aa, Homo sapiens
MEVTVSQGTGSSAQPVPFPPSGPQRLWLHVPLAGQNQKWGPSGLPIWGSWRRSLACPPWGAGGQTGCFMESGGVLRQLYLLNAKKPSWFNMIVAAALINQNN

SEQ ID NO: 845202 - protein, 279 aa, Homo sapiens
MKIIILLGFLGATLSAPLIPQRLMSASNSNELLLNLNNGQLLPLQLQGPLNSWIPPFSGILQQQQQAQIPGLSQFSLSALDQFAGLLPNQIPLTGEASFAQGAQAGQVDPLQLQTPPQTQPGPSHVMPYVFSFKMPQEQGQMFQYYPVYMVLPWEQPQQTVPRSPQQTRQQQYEEQIPFYAQFGYIPQLAEPAISGGQQQLAFDPQLGTAPEIAVMSTGEEIPYLQKEAINFRHDSAGVFMPSTSPKPSTTNVFTSAVDQTITPELPEEKDKTDSLREP

SEQ ID NO: 845203 - protein, 197 aa, Homo sapiens
NFTEFNENPVPFSPTTLPPFIYHMKMKIIILLGFLGATLSAPLIPQRLMSASNSNELLLNLNNGQLLPLQLQGPLNSWIPPFSGILQQQQQAQIPGLSQFSLSALDQFAGLLPNQIPLTGEASFAQGAQAGQVDPLQLQTPPQTQPGPSHVMPYVFSFKMPQEQGQMFQYYPVYMVLPWEQPQQTYYPRAPRREGQD

SEQ ID NO: 845204 - protein, 265 aa, Homo sapiens
MKIIILLGFLGATLSAPLLLNLNNGQLLPLQLQGPLNSWIPPFSGILQQQQQAQIPGLSQFSLSALDQFAGLLPNQIPLTGEASFAQGAQAGQVDPLQLQTPPQTQPGPSHVMPYVFSFKMPQEQGQMFQYYPVYMVLPWEQPQQTVPRSPQQTRQQQYEEQIPFYAQFGYIPQLAEPAISGGQQQLAFDPQLGTAPEIAVMSTGEEIPYLQKEAINFRHDSAGVFMPSTSPKPSTTNVFTSAVDQTITPELPEEKDKTDSLREP

SEQ ID NO: 845205 - protein, 265 aa, Homo sapiens; identical to SEQ ID NO: 845204

SEQ ID NO: 845206 - protein, 97 aa, Homo sapiens
EKGKGTLSPCGQFTTKVCYAMVCSLLFSRKKSWKNKHLVLGMSGRRKTIQNPISVFERNTDSFILLVWTTVPHADFTELEVVGIMRKSRKSLNHTSL

SEQ ID NO: 845207 - protein, 503 aa, Homo sapiens
WEPLLVPALRPAGEAARRRQRRRQRVLGPQDHGFFPARSIHLAIHPWGSAMATFSRQEFFQQLLQGCLLPTAQQGLDQIWLLLAICLACRLLWRLGLPSYLKHASTVAGGFFSLYHFFQLHMVWVVLLSLLCYLVLFLCRHSSHRGVFLSVTILIYLLMGEMHMVDTVTWHKMRGAQMIVAMKAVSLGFDLDRGEVGTVPSPVEFMGYLYFVGTIVFGPWISFHSYLQAVQGRPLSCRWLQKVARSLALALLCLVLSTCVGPYLFPYFIPLNGDRLLRKRKRWLRAYESAVSFHFSNYFVGFLSEATATLAGAGFTEEKDHLEWDLTVSKPLNVELPRSMVEVVTSWNLPMSYWLNNYVFKNALRLGTFSAVLVTYAASALLHGFSFHLAAVLLSLAFITYVEHVLRKRLARILSACVLSKRCPPDCSHQHRLGLGVRALNLLFGALAIFHLAYLGSLFDVDVDDTTEEQGYGMAYTVHKWSELSWASHWVTFGCWIFYRLIG

SEQ ID NO: 845208 - protein, 566 aa, Homo sapiens
MGLKCMPSHHHRTGLFTALERQRSFIHSRSQAVRVHAEHPHAHSWWLSLMYLTSHAFPQSSSTVPLHGLGSPKLKCECQSASFKRGLPHGHPLPLCPCFDRSIHLAIHPWGSAMATFSRQEFFQQLLQGCLLPTAQQGLDQIWLLLAICLACRLLWRLGLPSYLKHASTVAGGFFSLYHFFQLHMVWVVLLSLLCYLVLFLCRHSSHRGVFLSVTILIYLLMGEMHMVDTVTWHKMRGAQMIVAMKAVSLGFDLDRGEVGTVPSPVEFMGYLYFVGTIVFGPWISFHSYLQAVQGRPLSCRWLQKVARSLALALLCLVLSTCVGPYLFPYFIPLNGDRLLRKRKRWLRAYESAVSFHFSNYFVGFLSEATATLAGAGFTEEKDHLEWDLTVSKPLNVELPRSMVEVVTSWNLPMSYWLNNYVFKNALRLGTFSAVLVTYAASALLHGFSFHLAAVLLSLAFITYVEHVLRKRLARILSACVLSKRCPPDCSHQHRLGLGVRALNLLFGALAIFHLAYLGSLFDVDVDDTTEEQGYGMAYTVHKWSELSWASHWVTFGCWIFYRLIG

SEQ ID NO: 845209 - protein, 485 aa, Homo sapiens
WEPLLVPALRPAGEAARRRQRRRQRVLGPQDHGFFPARSIHLAIHPWGSAMATFSRQEFFQQLLQGCLLPTAQQGLDQIWLLLAICLACRLLWRLGLPSYLKHASTVAGGFFSLYHFFQLHMVWVVLLSLLCYLVLFLCRHSSHRGVFLSVTILIYLLMGEMHMVDTVTWHKMRGAQMIVAMKAVSLGFDLDRGEVGTVPSPVEFMGYLYFVGTIVFGPWISFHSYLQAVQGRPLSCRWLQKVARSLALALLCLVLSTCVGPYLFPYFIPLNGDRLLRKRKRWLRAYESAVSFHFSNYFVGFLSEATATLAGAGFTEEKDHLEWDLTVSKPLNVELPRSMVEVVTSWNLPMSYWLNNYVFKNALRLGTFSAVLVTYAASALLHGFSFHLAAVLLSLAFITYVEHVLRKRLARILSACVLSKRCPPDCSHQHRLVRVQPGQPCAQHSLSKMFLLSLSCMCLRVPTFFFWCLSHPHNLSSIRWHPFP

SEQ ID NO: 845210 - protein, 86 aa, Homo sapiens
PGEGTAKTEVWRSDELRSQMDLHISSAPRDLTVSKPLNVELPRSMVEVVTSWNLPMSYWLNNCESPSHHSSCVGNPGPFIHSYNIY

SEQ ID NO: 845211 - protein, 518 aa, Homo sapiens
  misc_feature (18)..(18): Xaa can be any naturally occurring amino acid
KKTYGRLRGKRRPLGGWXKKSAEGPACEEAARRRQRRRQRVLGPQDHGFFPARSIHLAIHPWGSAMATFSRQEFFQQLLQGCLLPTAQQGLDQIWLLLAICLACRLLWRLGLPSYLKHASTVAGGFFSLYHFFQLHMVWVVLLSLLCYLVLFLCRHSSHRGVFLSVTILIYLLMGEMHMVDTVTWHKMRGAQMIVAMKAVSLGFDLDRGEVGTVPSPVEFMGYLYFVGTIVFGPWISFHSYLQAVQGRPLSCRWLQKVARSLALALLCLVLSTCVGPYLFPYFIPLNGDRLLRKRKRWLRAYESAVSFHFSNYFVGFLSEATATLAGAGFTEEKDHLEWDLTVSKPLNVELPRSMVEVVTSWNLPMSYWLNNYVFKNALRLGTFSAVLVTYAASALLHGFSFHLAAVLLSLAFITYVEHVLRKRLARILSACVLSKRCPPDCSHQHRLGLGVRALNLLFGALAIFHLAYLGSLFDVDVDDTTEEQGYGMAYTVHKWSELSWASHWVTFGCWIFYRLIG

SEQ ID NO: 845212 - protein, 514 aa, Homo sapiens
WEPLLVPALRPAGEAARRRQRRRQRVLGPQDHGFFPARSIHLAIHPWGSAMATFSRQEFFQQLLQGCLLPTAQQGLDQIWLLLAICLACRLLWRLGLPSYLKHASTVAGGFFSLYHFFQLHMVWVVLLSLLCYLVLFLCRHSSHRGVFLSVTILIYLLMGEMHMVDTVTWHKMRGAQMIVAMKAVSLGFDLDRGEVGTVPSPVEFMGYLYFVGTIVFGPWISFHSYLQAVQGRPLSCRWLQKVARSLALALLCLVLSTCVGPYLFPYFIPLNGDRLLRKRKQETQSQGHHGKRWLRAYESAVSFHFSNYFVGFLSEATATLAGAGFTEEKDHLEWDLTVSKPLNVELPRSMVEVVTSWNLPMSYWLNNYVFKNALRLGTFSAVLVTYAASALLHGFSFHLAAVLLSLAFITYVEHVLRKRLARILSACVLSKRCPPDCSHQHRLGLGVRALNLLFGALAIFHLAYLGSLFDVDVDDTTEEQGYGMAYTVHKWSELSWASHWVTFGCWIFYRLIG

SEQ ID NO: 845213 - protein, 151 aa, Homo sapiens
  misc_feature (18)..(18): Xaa can be any naturally occurring amino acid
KKTYGRLRGKRRPLGGWXKKSAEGPACERLPGGGSGGGSASSVPRTTASFLPDLSIWPSIRGGLQWPPLAARNFSSSYCKAVSCLLPSRALTRSGCSLPSASPAASSGGSLHMVWVVLLSLLCYLVLFLCRHSSHRGVFLSVTILIYLLMG

SEQ ID NO: 845214 - protein, 217 aa, Homo sapiens
KSYKCDQYGKNFSQSQDLIVHCKTHSGETPYEFHEWPMGCKQSSDLPRYQKVPSGNKPYKCKECGKGFRCNSFLYNHHGVHTREMPYKCDACGKGFGFRSLLCIHQGVHTGKSPIKVKSVGRALIRAPTFLSIRESTLERSPTNAVSVASALVQAPFFKSTGGFTQGRNLIGVMSVERASAKVHTFTFTRESTQGRNHTNAMCVERILRIALFFTLI

SEQ ID NO: 845215 - protein, 330 aa, Homo sapiens
MTTSLLLHPRWPESLMYVYEDSAAESGIGGGGGGGGGGTGGAGGGCSGASPGKAPSMDGLGSSCPASHCRDLLPHPVLGRPPAPLGAPQGAVYTDIPAPEAARQCAPPPAPPTSSSATLGYGYPFGGSYYGCRLSHNVNLQQKPCAYHPGDKYPEPSGALPGDDLSSRAKEFAFYPSFASSYQAMPGYLDVSVVPGISGHPEPRHDALIPVEGYQHWALSNGWDSQVYCSKEQSQSAHLWKSPFPDVVPLQPEVSSYRRGRKKRVPYTKVQLKELEKEYAASKFITKEKRRRISATTNLSERQVTIWFQNRRVKEKKVVSKSKAPHLHST

SEQ ID NO: 845216 - protein, 330 aa, Homo sapiens; identical to SEQ ID NO: 845215

SEQ ID NO: 845217 - protein, 155 aa, Homo sapiens
MRHLPYFCRGQVVRGFGRGSKQLGIPTANFPEQVVDNLPADISTGIYYGWASVGSGDVHKMVVSIGWNPYYKNTKKSMETHIMHTFKEDFYGEILNVAIVGYLRPEKNFDSLESLISAIQGDIEEAKKRLELPEHLKIKEDNFFQVSKSKIMNGH

SEQ ID NO: 845218 - protein, 155 aa, Homo sapiens; identical to SEQ ID NO: 845217

SEQ ID NO: 845219 - protein, 155 aa, Homo sapiens; identical to SEQ ID NO: 845217

SEQ ID NO: 845220 - protein, 132 aa, Homo sapiens
MGALSNFPEQVVDNLPADISTGIYYGWASVGSGDVHKMVVSIGWNPYYKNTKKSMETHIMHTFKEDFYGEILNVAIVGYLRPEKNFDSLESLISAIQGDIEEAKKRLELPEHLKIKEDNFFQVSKSKIMNGH

SEQ ID NO: 845221 - protein, 168 aa, Homo sapiens
RVRLRKGAHAGGAEAGSALRAAPSPHPAHTRHLLRLSPLPSSGDAAPQAPGGICWVGGVRDSQWPVVGVVRPLVRPRGRQSSRSCPPAGPGSGRRVDGGSAGRADRAAAHAPSGLHYEAPALLLPGSSGAGLRPRLQAAGHPHRKHISCIPSKRTSMGKSSMWPLLAT

SEQ ID NO: 845222 - protein, 155 aa, Homo sapiens; identical to SEQ ID NO: 845217

SEQ ID NO: 845223 - protein, 155 aa, Homo sapiens; identical to SEQ ID NO: 845217

SEQ ID NO: 845224 - protein, 137 aa, Homo sapiens
MRHLPYFCRGQVVRGFGRGSKQLGIPTANFPEQVVDNLPADISTGIYYGWASVGSGDVHKMVVSIGWNPYYKNTKKSMETHIMHTFKEDFYGEILNVAIVGYLRPEKAKKRLELPEHLKIKEDNFFQVSKSKIMNGH

SEQ ID NO: 845225 - protein, 155 aa, Homo sapiens; identical to SEQ ID NO: 845217

SEQ ID NO: 845226 - protein, 84 aa, Homo sapiens
VGSTTDRLKSERVCGRGGRQWREAADQGVKAGPLLSRAGWYLELSTLTQRDLPLDVSPSPAWSARCTCHSYNLGKCAVTASLGE

SEQ ID NO: 845227 - protein, 68 aa, Homo sapiens
GSIKVINFNPSRPREWLGIILQMRHRKYTGSSLQTSDSEQWLGFQSQALAEHSPPTISRDRISLYCSG

SEQ ID NO: 845228 - protein, 548 aa, Homo sapiens
MPLQGSVSFKDVTVDFTQEEWQQLDPAQKALYRDVMLENYCHFVSVGFHMAKPDMIRKLEQGEELWTQRIFPSYSYLEEDGKTEDVLVKFKEYQDRHSRPLIFINHKKLIKERSNIYGKTFTLGKNRITILCEYKPDGKVLKNISELVIRNISPIKEKFGDSTGWEKSLLNTKHEKIHPAVNLHKQTERVLSGKQELIQHQKVQAPEQPFDHNECEKSFLMKGMLFTHTRAHRGERTFEYNKDGIAFIEKSSLSVHPSNLMEKKPSAYNKYGKFLCRKPVFIMPQRPQTEEKPFHCPYCGNNFRRKSYLIEHQRIHTGEKPYVCNQCGKAFRQKTALTLHEKTHIEGKPFICIDCGKSFRQKATLTRHHKTHTGEKAYECPQCGSAFRKKSYLIDHQRTHTGEKPYQCNECGKAFIQKTTLTVHQRTHTGEKPYICNECGKSFCQKTTLTLHQRIHTGEKPYICNECGKSFRQKAILTVHHRIHTGEKSNGCPQCGKAFSRKSNLIRHQKTHTGEKPYECKQCGKFFSCKSNLIVHQKTHKVETTGIQ

SEQ ID NO: 845229 - protein, 469 aa, Homo sapiens
MAFLMHLLVCVFGMGSWVTINGLWVELPLLVMELPEGWYLPSYLTVVIQLANIGPLLVTLLHHFRPSCLSEVPIIFTLLGVGTVTCIIFAFLWNMTSWVLDGHHSIAFLVLTFFLALVDCTSSVTFLPFMSRLPTYYLTTFFVGEGLSGLLPALVALAQGSGLTTCVNVTEISDSVPSPVPTRETDIAQGVPRALVSALPGMEAPLSHLESRYLPAHFSPLVFFLLLSIMMACCLVAFFVLQRQPRCWEASVEDLLNDQVTLHSIRLREENDLGPAGMVDSSQGQGYLEEKAAPCCPAHLAFVYTLVAFVNALTNGMLPSVQTYSCLSYGPVAYHLAATLSIVANPLASLVSMFLPNRSLLFLGVLSVLGTCFGGYNMAMAVMSPCPLLQGHWGGEVLIVASWVLFSGCLSYVKVMLGVVLRDLSRSALLWCGAAVQLGSLLGALLMFPLVNVLRLFSSADFCNLHCPA

SEQ ID NO: 845230 - protein, 481 aa, Homo sapiens
MLTPKSQQAPEGGSCQPGKTENTITMTTSHQPQDRYKAVWLIFFMLGLGTLLPWNFFMTATQYFTNRLDMSQNVSLVTAELSKDAQASAAPAAPLPERNSLSAIFNNVMTLCAMLPLLLFTYLNSFLHQRIPQSVRILGSLVAILLVFLITAILVKVQLDALPFFVITMIKIVLINSFGAILQGSLFGLAGLLPASYTAPIMSGQGLAGFFASVAMICAIASGSELSESAFGYFITACAVIILTIICYLGLPRLEFYRYYQQLKLEGPGEQETKLDLISKGEEPRAGKEESGVSVSNSQPTNESHSIKAILKNISVLAFSVCFIFTITIGMFPAVTVEVKSSIAGSSTWERYFIPVSCFLTFNIFDWLGRSLTAVFMWPGKDSRWLPSLVLARLVFVPLLLLCNIKPRRYLTVVFEHDAWFIFFMAAFAFSNGYLASLCMCFGPKKVKPAEAETAGAIMAFFLCLGLALGAVFSFLFRAIV

SEQ ID NO: 845231 - protein, 490 aa, Homo sapiens
LQRERADLSAGAVLLRQAPEGGSCQPGKTENTITMTTSHQPQDRYKAVWLIFFMLGLGTLLPWNFFMTATQYFTNRLDMSQNVSLVTAELSKDAQASAAPAAPLPERNSLSAIFNNVMTLCAMLPLLLFTYLNSFLHQRIPQSVRILGSLVAILLVFLITAILVKVQLDALPFFVITMIKIVLINSFGAILQGSLFGLAGLLPASYTAPIMSGQGLAGFFASVAMICAIASGSELSESAFGYFITACAVIILTIICYLGLPRLEFYRYYQQLKLEGPGEQETKLDLISKGEEPRAGKEESGVSVSNSQPTNESHSIKAILKNISVLAFSVCFIFTITIGMFPAVTVEVKSSIAGSSTWERYFIPVSCFLTFNIFDWLGRSLTAVFMWPGKDSRWLPSLVLARLVFVPLLLLCNIKPRRYLTVVFEHDAWFIFFMAAFAFSNGYLASLCMCFGPKKVKPAEAETAGAIMAFFLCLGLALGAVFSFLFRAIV

SEQ ID NO: 845232 - protein, 327 aa, Homo sapiens
LQRERADLSAGAVLLRQAPEGGSCQPGKTENTITMTTSHQPQDRYKAVWLIFFMLGLGTLLPWNFFMTATQYFTNRLDMSQNVSLVTAELSKDAQASAAPAAPLPERNSLSAIFNNVMTLCAMLPLLLFTYLNSFLHQRIPQSVRILGSLVAILLVFLITAILVKVQLDALPFFVITMIKIVLINSFGAILQGSLFGLAGLLPASYTAPIMSGQGLAGFFASVAMICAIASGSELSESAFGYFITACAVIILTIICYLGLPRLEFYRYYQQLKLEGPGEQETKLDLISKGEEPRAGKEESGVSVSNSQPTNESHSIKAILKNGCFQP

SEQ ID NO: 845233 - protein, 525 aa, Homo sapiens
AARARGSQRGSSASAAGARGQGPLPEPELGAPPRDCPGLLCSDPSAGQSGHLAPEGGSCQPGKTENTITMTTSHQPQDRYKAVWLIFFMLGLGTLLPWNFFMTATQYFTNRLDMSQNVSLVTAELSKDAQASAAPAAPLPERNSLSAIFNNVMTLCAMLPLLLFTYLNSFLHQRIPQSVRILGSLVAILLVFLITAILVKVQLDALPFFVITMIKIVLINSFGAILQGSLFGLAGLLPASYTAPIMSGQGLAGFFASVAMICAIASGSELSESAFGYFITACAVIILTIICYLGLPRLEFYRYYQQLKLEGPGEQETKLDLISKGEEPRAGKEESGVSVSNSQPTNESHSIKAILKNISVLAFSVCFIFTITIGMFPAVTVEVKSSIAGSSTWERYFIPVSCFLTFNIFDWLGRSLTAVFMWPGKDSRWLPSLVLARLVFVPLLLLCNIKPRRYLTVVFEHDAWFIFFMAAFAFSNGYLASLCMCFGPKKVKPAEAETAGAIMAFFLCLGLALGAVFSFLFRAIV

SEQ ID NO: 845234 - protein, 315 aa, Homo sapiens
LQRERADLSAGAVLLRQAPEGGSCQPGKTENTITMTTSHQPQDRYKAVWLIFFMLGLGTLLPWNFFMTATQYFTNRLDMSQNVSLVTAELSKDAQASAAPAAPLPERNSLSAIFNNVMTLCAMLPLLLFTYLNSFLHQRIPQSVRILGSLVAILLVFLITAILVKVQLDALPFFVITMIKIVLINSFGAILQGSLFGLAGLLPASYTAPIMSGQGLAGFFASVAMICAIASGSELSESAFGYFITACAVIILTIICYLGLPRLEFYRYYQQLKLEGPGEQETKLDLISKVSVSNSQPTNESHSIKAILKNGCFQP

SEQ ID NO: 845235 - protein, 426 aa, Homo sapiens
LQRERADLSAGAVLLRQAPEGGSCQPGKTENTITMTTSHQPQDRYKAVWLIFFMLGLGTLLPWNFFMTATQYFTNRLDMSQNVSLVTAELSKDAQASAAPAAPLPERNSLSAIFNNVMTLCAMLPLLLFTYLNSFLHQRIPQSVRILGSLVAILLVFLITAILVKVQLDALPFFVITMIKIVLINSFGAILQGSLFGLAGLLPASYTAPIMSGQGLAGFFASVAMICAIASGSELSESAFGYFITACAVIILTIICYLGLPRLEFYRYYQQLKLEGPGEQETKLDLISKGEEPRAGKEESGVSVSNSQPTNESHSIKAILKNISVLAFSVCFIFTITIGMFPAVTVEVKSSIAGSSTWERYFIPVSCFLTFNIFDWLGRSLTAVFMWVSGGRGPQAPVGSKSPAWTQRGNPRKYGSKGTICFKVEA

SEQ ID NO: 845236 - protein, 581 aa, Homo sapiens
MLTPKSQQAPEGGSCQPGKTENTITMTTSHQPQDRYKAVWLIFFMLGLGTLLPWNFFMTATQYFTNRLDMSQNVSLVTAELSKDAQASAAPAAPLPERNSLSAIFNNVMTLCAMLPLLLFTYLNSFLHQRIPQSVRILGSLVAILLVFLITAILVKVQLDALPFFVITMIKIVLINCKLGQEGAYGRRHAQLPPLFFQTSVSQREAQPPPGGSGCCEQLGFRGLSGPGPGLGGGREKGSSASRLTKSKVGMTGICLLGHPQPPALAPLLMPALFAPAFGAILQGSLFGLAGLLPASYTAPIMSGQGLAGFFASVAMICAIASGSELSESAFGYFITACAVIILTIICYLGLPRLEFYRYYQQLKLEGPGEQETKLDLISKGEEPRAGKEESGVSVSNSQPTNESHSIKAILKNISVLAFSVCFIFTITIGMFPAVTVEVKSSIAGSSTWERYFIPVSCFLTFNIFDWLGRSLTAVFMWPGKDSRWLPSLVLARLVFVPLLLLCNIKPRRYLTVVFEHDAWFIFFMAAFAFSNGYLASLCMCFGPKKVKPAEAETAGAIMAFFLCLGLALGAVFSFLFRAIV

SEQ ID NO: 845237 - protein, 323 aa, Homo sapiens
IKASTRLVYIGRGIALINSFGAILQGSLFGLAGLLPASYTAPIMSGQGLAGFFASVAMICAIASGSELSESAFGYFITACAVIILTIICYLGLPRLEFYRYYQQLKLEGPGEQETKLDLISKGEEPRAGKEESGVSVSNSQPTNESHSIKAILKNISVLAFSVCFIFTITIGMFPAVTVEVKSSIAGSSTWERYFIPVSCFLTFNIFDWLGRSLTAVFMWPGKDSRWLPSLVLARLVFVPLLLLCNIKPRRYLTVVFEHDAWFIFFMAAFAFSNGYLASLCMCFGPKKVKPAEAETAGAIMAFFLCLGLALGAVFSFLFRAIV

SEQ ID NO: 845238 - protein, 490 aa, Homo sapiens; identical to SEQ ID NO: 845231

SEQ ID NO: 845239 - protein, 455 aa, Homo sapiens
LQRERADLSAGAVLLRQAPEGGSCQPGKTENTITMTTSHQPQDRYKAVWLIFFMLGLGTLLPWNFFMTATQYFTNRLDMSQNVSLVTAELSKDAQASAAPAAPLPERNSLSAIFNNVMTLCAMLPLLLFTYLNSFLHQRIPQSVRILGSLVAILLVFLITAILVKVQLDALPFFVITMIKIVLINSFGAILQGSLFGLAGLLPASYTAPIMSGQGLAGFFASVAMICAIASGSELSESAFGYFITACAVIILTIICYLGLPRLEFYRYYQQLKLEGPGEQETKLDLISKGEEPRAGKEESGVSVSNSQPTNESHSIKAILKNISVLAFSVCFIFTITIGMFPAVTVEVKSSIAGSSTWERYFIPVSCFLTFNIFDWLGRSLTAVFMWPGKDSRWLPSLVLARLVFVPLLLLCNIKPRRYLTVVFEHDAWFIFFMAAFAFSNGYLASLCMCFGPKS

SEQ ID NO: 845240 - protein, 116 aa, Homo sapiens
AKLTWVEVETGLQEGVKDNPTIHVPSRRRSQVGVRQPGWVDQQNEVRQSSCSTPPLLPPRGSGLGYSHSEVALPFLPRLGKVKPAEAETAGAIMAFFLCLGLALGAVFSFLFRAIV

SEQ ID NO: 845241 - protein, 528 aa, Homo sapiens
MYEAGCNWPRQRGSSASAAGARGQGPLPEPELGAPPRDCPGLLCSDPSAGQSGHLAPEGGSCQPGKTENTITMTTSHQPQDRYKAVWLIFFMLGLGTLLPWNFFMTATQYFTNRLDMSQNVSLVTAELSKDAQASAAPAAPLPERNSLSAIFNNVMTLCAMLPLLLFTYLNSFLHQRIPQSVRILGSLVAILLVFLITAILVKVQLDALPFFVITMIKIVLINSFGAILQGSLFGLAGLLPASYTAPIMSGQGLAGFFASVAMICAIASGSELSESAFGYFITACAVIILTIICYLGLPRLEFYRYYQQLKLEGPGEQETKLDLISKGEEPRAGKEESGVSVSNSQPTNESHSIKAILKNISVLAFSVCFIFTITIGMFPAVTVEVKSSIAGSSTWERYFIPVSCFLTFNIFDWLGRSLTAVFMWPGKDSRWLPSLVLARLVFVPLLLLCNIKPRRYLTVVFEHDAWFIFFMAAFAFSNGYLASLCMCFGPKKVKPAEAETAGAIMAFFLCLGLALGAVFSFLFRAIV

SEQ ID NO: 845242 - protein, 456 aa, Homo sapiens [sequence omitted]

SEQ ID NO: 845243 - protein, 456 aa, Homo sapiens [sequence omitted]

SEQ ID NO: 845244 - protein, 527 aa, Homo sapiens
RAARGAHGRREPEDPAGTGTQAGRGGLAPGPKTGCGHVDLRKGQASGRVIPIDLAPEGGSCQPGKTENTITMTTSHQPQDRYKAVWLIFFMLGLGTLLPWNFFMTATQYFTNRLDMSQNVSLVTAELSKDAQASAAPAAPLPERNSLSAIFNNVMTLCAMLPLLLFTYLNSFLHQRIPQSVRILGSLVAILLVFLITAILVKVQLDALPFFVITMIKIVLINSFGAILQGSLFGLAGLLPASYTAPIMSGQGLAGFFASVAMICAIASGSELSESAFGYFITACAVIILTIICYLGLPRLEFYRYYQQLKLEGPGEQETKLDLISKGEEPRAGKEESGVSVSNSQPTNESHSIKAILKNISVLAFSVCFIFTITIGMFPAVTVEVKSSIAGSSTWERYFIPVSCFLTFNIFDWLGRSLTAVFMWPGKDSRWLPSLVLARLVFVPLLLLCNIKPRRYLTVVFEHDAWFIFFMAAFAFSNGYLASLCMCFGPKKVKPAEAETAGAIMAFFLCLGLALGAVFSFLFRAIV

SEQ ID NO: 845245 - protein, 490 aa, Homo sapiens; identical to SEQ ID NO: 845231

SEQ ID NO: 845246 - protein, 490 aa, Homo sapiens; identical to SEQ ID NO: 845231

SEQ ID NO: 845247 - protein, 490 aa, Homo sapiens; identical to SEQ ID NO: 845231

SEQ ID NO: 845248 - protein, 553 aa, Homo sapiens
MLTPKSQQAPEGGSCQPGKTENTITMTTSHQPQDRYKAVWLIFFMLGLGTLLPWNFFMTATQYFTNRLDMSQNVSLVTAELSKDAQASAAPAAPLPERNSLSAIFNNVMTLCAMLPLLLFTYLNSFLHQRIPQSVRILGSLVAILLVFLITAILVKVQLDALPFFVITMIKIVLINCKLGQEGAYGRRHAQLPPLFFQTSVSQREAQPPPGGSGCCEQLGFRGLSGPGPGLGGGREKGSSASRLTKSETFGAILQGSLFGLAGLLPASYTAPIMSGQGLAGFFASVAMICAIASGSELSESAFGYFITACAVIILTIICYLGLPRLEFYRYYQQLKLEGPGEQETKLDLISKGEEPRAGKEESGVSVSNSQPTNESHSIKAILKNISVLAFSVCFIFTITIGMFPAVTVEVKSSIAGSSTWERYFIPVSCFLTFNIFDWLGRSLTAVFMWPGKDSRWLPSLVLARLVFVPLLLLCNIKPRRYLTVVFEHDAWFIFFMAAFAFSNGYLASLCMCFGPKKVKPAEAETAGAIMAFFLCLGLALGAVFSFLFRAIV

SEQ ID NO: 845249 - protein, 490 aa, Homo sapiens; identical to SEQ ID NO: 845231

SEQ ID NO: 845250 - protein, 490 aa, Homo sapiens; identical to SEQ ID NO: 845231

SEQ ID NO: 845251 - protein, 314 aa, Homo sapiens
MFSINPLENLKVYISSRPPLVVFMISVSAMAIAFLTLGYFFKIKEIKSPEMAEDWNTFLLRFNDLDLCVSENETLKHLTNDTTTPESTMTSGQARASTQSPQALEDSGPVNISVSITLTLDPLKPFGGYSRNVTHLYSTILGHQIGLSGREAHEEINITFTLPTAWSSDDCALHGHCEQVVFTACMTLTASPGVFPVTVQPPHCVPDTYSNATLWYKIFTTARDANTKYAQDYNPFWCYKGAIGKVYHALNPKLTVIVPDDDRSLINLHLMHTSYFLFVMVITMFCYAVIKGRPSKLRQSNPEFCPEKVALAEA

SEQ ID NO: 845252 - protein, 314 aa, Homo sapiens; identical to SEQ ID NO: 845251

SEQ ID NO: 845253 - protein, 343 aa, Homo sapiens
SGPYALLALTRLLDLRAAARRGGVELIRIMFSINPLENLKVYISSRPPLVVFMISVSAMAIAFLTLGYFFKIKEIKSPEMAEDWNTFLLRFNDLDLCVSENETLKHLTNDTTTPESTMTSGQARASTQSPQALEDSGPVNISVSITLTLDPLKPFGGYSRNVTHLYSTILGHQIGLSGREAHEEINITFTLPTAWSSDDCALHGHCEQVVFTACMTLTASPGVFPVTVQPPHCVPDTYSNATLWYKIFTTARDANTKYAQDYNPFWCYKGAIGKVYHALNPKLTVIVPDDDRSLINLHLMHTSYFLFVMVITMFCYAVIKGRPSKLRQSNPEFCPEKVALAEA

SEQ ID NO: 845254 - protein, 314 aa, Homo sapiens; identical to SEQ ID NO: 845251

SEQ ID NO: 845255 - protein, 203 aa, Homo sapiens
MFSINPLENLKVYISSRPPLVVFMISVSAMAIAFLTLGYFFKIKEIKSPEMAEDWNTFLLRFNDLDLCVSENETLKHLTNDTTTPESTMTSGQARASTQSPQALEDSGPVNISVSITLTLDPLKPFGGYSRNVTHLYSTILGHQIGLSGREAHEEINITFTLPTAWSSDDCALHGHCEQVVFTACMTLTASPGVFPVTVMTVH

SEQ ID NO: 845256 - protein, 314 aa, Homo sapiens; identical to SEQ ID NO: 845251

SEQ ID NO: 845257 - protein, 314 aa, Homo sapiens; identical to SEQ ID NO: 845251

SEQ ID NO: 845258 - protein, 161 aa, Homo sapiens
MFSINPLENLKVYISSRPPLVVFMISVSAMAIAFLTLGYFFKIKEIKSPEMAEDWNTFLLRFNDLDLCVSENETLKHLTNDTTTPESTMTSGQARASTQSPQALEDSGPVNISVSITLTLDPLKPFGGYSRNVTHLYSTILGHQIGLSGKGKAPPKGGFKP

SEQ ID NO: 845259 - protein, 140 aa, Homo sapiens
RVAHASPTRRRAVAGARTEAAAGARLASGLRVGPAEPDAAPGAGRRWCLAASGPPRAATSEPSATAGVRRAAGPAGPGARSCPPGRGGADQNNVQHQPPGEPEGVHQQSASPGGLHDQRKRHGHSFPDPGLLLPTVLIWL

SEQ ID NO: 845260 - protein, 314 aa, Homo sapiens; identical to SEQ ID NO: 845251

SEQ ID NO: 845261 - protein, 286 aa, Homo sapiens [sequence omitted]

SEQ ID NO: 845262 - protein, 148 aa, Homo sapiens
MFSINPLENLKVYISSRPPLVVFMISVSAMAIAFLTLGYFFKIKEIKSPEMAEDWNTFLLRFNDLDLCVSENETLKHLTNDTTTPESTMTSGQARASTQSPQALEDSGPVNISVSITLTLDPLKPFGGYSRNVTYSDSGDTSRDDQQN

SEQ ID NO: 845263 - protein, 445 aa, Homo sapiens
MAEYDLTTRIAHFLDRHLVFPLLEFLSVKEIYNEKELLQGKLDLLSDTNMVDFAMDVYKNLYSDDIPHALREKRTTVVAQLKQLQAETEPIVKMFEDPETTRQMQSTRDGRMLFDYLADKHGFRQEYLDTLYRYAKFQYECGNYSGAAEYLYFFRVLVPATDRNALSSLWGKLASEILMQNWDAAMEDLTRLKETIDNNSVSSPLQSLQQRTWLIHWSLFVFFNHPKGRDNIIDLFLYQPQYLNAIQTMCPHILRYLTTAVITNKDVRKRRQVLKDLVKVIQQESYTYKDPITEFVECLYVNFDFDGAQKKLRECESVLVNDFFLVACLEDFIENARLFIFETFCRIHQCISINMLADKLNMTPEEAERWIVNLIRNARLDAKIDSKLGHVVMGNNAVSPYQQVIEKTKSLSFRSQMLAMNIEKKLNQNSRSEAPNWATQDSGFY

SEQ ID NO: 845264 - protein, 445 aa, Homo sapiens; identical to SEQ ID NO: 845263

SEQ ID NO: 845265 - protein, 445 aa, Homo sapiens; identical to SEQ ID NO: 845263

SEQ ID NO: 845266 - protein, 445 aa, Homo sapiens; identical to SEQ ID NO: 845263

SEQ ID NO: 845267 - protein, 161 aa, Homo sapiens
  misc_feature (68)..(68): Xaa can be any naturally occurring amino acid
GQQSTSPCPADEFQWIRVKPTHVPKGWIKGNANDIGMDYDYALLELKKPPQEKIYEDVGVSPPAKQLXGGRIHFFGYDNDRPGNLVYRFCDLKDETYDLLYQQCDAQPGASGSGVYVRMWKRQQQKWERNIIDLFLYQPQYLNAIQNNVSTHSSLFDYQQS

SEQ ID NO: 845268 - protein, 108 aa, Homo sapiens
ADTTTKKNAAVCRISINMLADKLNMTPEEAERWIVNLIRNARLDAKIDSKLGHVVMGNNAVSPYQQVIEKTKSLSFRSQMLAMNIEKKLNQNSRSEAPNWATQDSGFY

SEQ ID NO: 845269 - protein, 108 aa, Homo sapiens; identical to SEQ ID NO: 845268

SEQ ID NO: 845270 - protein, 94 aa, Homo sapiens
VGATNKVLVSTDSLFFGKMAEYDLTTRIAHFLDRHLVFPLLEFLSVKGALREKRTTVVAQLKQLQAETEPIVKMFEDPETTRQMQSTRDGRMLL

SEQ ID NO: 845271 - protein, 81 aa, Homo sapiens
PLLRQDGGVRIDYSYRAVGDRHLGLPAVSEWLVCRRSTIKLEGRNCDEVIMDPILELNTKAVVTMCALLRVLYEKPVLCRE

SEQ ID NO: 845272 - protein, 445 aa, Homo sapiens; identical to SEQ ID NO: 845263

SEQ ID NO: 845273 - protein, 445 aa, Homo sapiens; identical to SEQ ID NO: 845263

SEQ ID NO: 845274 - protein, 445 aa, Homo sapiens; identical to SEQ ID NO: 845263

SEQ ID NO: 845275 - protein, 305 aa, Homo sapiens
RAISFVTKNFFSKANGNRSGAPNVVVVMVDGWPTDKVEEASRLARESGINIFFITIEGAAENEKQYVVEPNFANKAVCRTNGFYSLHVQSWFGLHKTLQPLVKRVCDTDRLACSKTCLNSADIGFVIDGSSSVGTGNFRTVLQFVTNLTKEFEISDTDTRIGAVQYTYEQRLEFGFDKYSSKPDILNAIKRVGYWSGGTSTGAAINFALEQLFKKSKPNKRKLMILITDGRSYDDVRIPAMAAHLKGVITYAIGVAWAAQEELEVIATHPARDHSFFVDEFDNLHQYVPRIIQNICTEFNSQPRN

SEQ ID NO: 845276 - protein, 120 aa, Homo sapiens
VNLYCYQYFIPFYCSLIVHWMNILQFVYPFACTFTCKSLGGPMFLSGINSEIAGLYGNSVRKWKTVSKRFHFTFTPAVSESSTCSESMSTIGIVRLLNCGHSYLCVIWSVCAFNLCLLDY

SEQ ID NO: 845277 - protein, 184 aa, Homo sapiens
MLLPPGSLSRPRTFSSRPPQTKLMTHNGLFRPIPYLTAVSADEATASQQPPQAQLHRYNGLFRPSSCLPAFSLGPELSQVDVTRPSSCFLAASPGPALPPGGLCRPRLSSSRPVQGQLLPPGALCRPKSSSSWPPQAQLQPLGGLSGCKSSSSQPLQAQLLLPPSASFGPAQLMPLGGLPRPRF

SEQ ID NO: 845278 - protein, 106 aa, Homo sapiens
MVSSGGLVCRFPRYIHYRVPSNLGCRMRLWSMTRILVDDERRQSESEGQGQAKLPYSVDAAHVRNLSRRVSSVVYGSRRSRKNSRKGLQFLAGERARSCQESCRLL

SEQ ID NO: 845279 - protein, 214 aa, Homo sapiens
MEVKPPPGRPQPDSGRRRRRRGEEGHDPKEPEQLRKLFIGGLSFETTDDSLREHFEKWGTLTDCVVMRDPQTKRSRGFGFVTYSCVEEVDAAMCARPHKVDGRVVEPKRAVSREDSVKPGAHLTVKKIFVGGIKEDTEEYNLRDYFEKYGKIETIEVMEDRQSGKKRGFAFVTFDDHDTVDKIVVQKYHITYSPEQFQLRIYTPTNNVQTSNYY

SEQ ID NO: 845280 - protein, 125 aa, Homo sapiens
  misc_feature (1)..(1): Xaa can be any naturally occurring amino acid
XRSHFRLVTGDGGYNGFGGDGGNYGGGPGYSSRGGYGGGGPGYGNQGGGYGGGGGYDGYNEGGNFGGGNYGGGGNYNDFGNYSGQQQSNYGPMKGGSFGGRSSGSPYGGGYGSGGGSGGYGSRRF

SEQ ID NO: 845281 - protein, 209 aa, Homo sapiens
IVQKITFRAEDHLIVQKITLSCRRSPHRAEDHLSKQEMQSAGSQRGRGGGSGNFMGRGGNFGGGGGNFGRGGNFGGRGGYGGGGGGSRGSYGGGDGGYNGFGGDGGNYGGGPGYSSRGGYGGGGPGYGNQGGGYGGGGGYDGYNEGGNFGGGNYGGGGNYNDFGNYSGQQQSNYGPMKGGSFGGRSSGSPYGGGYGSGGGSGGYGSRRF

SEQ ID NO: 845282 - protein, 209 aa, Homo sapiens; identical to SEQ ID NO: 845281

SEQ ID NO: 845283 - protein, 209 aa, Homo sapiens; identical to SEQ ID NO: 845281

SEQ ID NO: 845284 - protein, 209 aa, Homo sapiens; identical to SEQ ID NO: 845281

SEQ ID NO: 845285 - protein, 68 aa, Homo sapiens
RGVTVDMSGSGNYGGGGNYNDFGNYSGQQQSNYGPMKGGSFGGRSSGSPYGGGYGSGGGSGGYGSRRF

SEQ ID NO: 845286 - protein, 209 aa, Homo sapiens; identical to SEQ ID NO: 845281

SEQ ID NO: 845287 - protein, 68 aa, Homo sapiens; identical to SEQ ID NO: 845285

SEQ ID NO: 845288 - protein, 209 aa, Homo sapiens; identical to SEQ ID NO: 845281

SEQ ID NO: 845289 - protein, 209 aa, Homo sapiens; identical to SEQ ID NO: 845281

SEQ ID NO: 845290 - protein, 98 aa, Homo sapiens
VLLVMVNVMAKVVLMDTDDVVIIVVIMVVVVVPKVEVVVFNGSDKVVVMDLVVEVVDMVAEGSKNSRKGLNENPTCLNEECLSYHLKYEGFWLGKVCS

SEQ ID NO: 845291 - protein, 209 aa, Homo sapiens; identical to SEQ ID NO: 845281

SEQ ID NO: 845292 - protein, 209 aa, Homo sapiens; identical to SEQ ID NO: 845281

SEQ ID NO: 845293 - protein, 209 aa, Homo sapiens; identical to SEQ ID NO: 845281

SEQ ID NO: 845294 - protein, 209 aa, Homo sapiens; identical to SEQ ID NO: 845281

SEQ ID NO: 845295 - protein, 209 aa, Homo sapiens; identical to SEQ ID NO: 845281

SEQ ID NO: 845296 - protein, 209 aa, Homo sapiens; identical to SEQ ID NO: 845281

SEQ ID NO: 845297 - protein, 226 aa, Homo sapiens
IVQKITFRAEDHLIVQKITLSCRRSPHRAEDHLSKQEMQSAGSQRGRGGGSGNFMGRGGNFGGGGGNFGRGGNFGGRGGYGGGGGGSRGSYGGGDGGYNGFGGDGGNYGGGPGYSSRGGYGGGGPGYGNQGGGYGGGGGYDGYNEGGNFGGGNYGGGGNYNDFGNYSGQQQSNYGPMKGGSFGGRSSGSPYGGGYGSGGGSGGYGSRRLKAAGYFETVVPNALEEL

SEQ ID NO: 845298 - protein, 174 aa, Homo sapiens
IVQKITFRAEDHLIVQKITLSCRRSPHRAEDHLSKQEMQSAGSQRGRGGGSGNFMGRGGNFGGGGGNFGRGGNFGGRGGYGGGGGGSRGSYGGGDGGYNGFGGDGGNYGGGPGYSSRGGYGGGGPGYGNQGGGYGGGGGYDGYNEGGNFGGAMVVVGTIMISFKLKSFTGCFEG

SEQ ID NO: 845299 - protein, 134 aa, Homo sapiens
KVHSSISTKRAVSREDSVKPGAHLTVKKIFVGGIKEDTEEYNLRDYFEKYGKIETIEVMEDRQSGKKRGFAFVTFDDHDTVDKIVVQKYHTINGHNCEVKKALSKQEMQSAGSQRGLEVDLAFYGHECSGTEIE

SEQ ID NO: 845300 - protein, 209 aa, Homo sapiens; identical to SEQ ID NO: 845281

SEQ ID NO: 845301 - protein, 209 aa, Homo sapiens; identical to SEQ ID NO: 845281

SEQ ID NO: 845302 - protein, 209 aa, Homo sapiens; identical to SEQ ID NO: 845281

SEQ ID NO: 845303 - protein, 209 aa, Homo sapiens; identical to SEQ ID NO: 845281

SEQ ID NO: 845304 - protein, 209 aa, Homo sapiens; identical to SEQ ID NO: 845281

SEQ ID NO: 845305 - protein, 209 aa, Homo sapiens; identical to SEQ ID NO: 845281

SEQ ID NO: 845306 - protein, 209 aa, Homo sapiens; identical to SEQ ID NO: 845281

SEQ ID NO: 845307 - protein, 188 aa, Homo sapiens
SCRRSPYRAEDHLIVQKITLSCRRSPHRAEDHLSKQEMQSAGSQRGRGGGSGNFMGRGGNFGGGGGNFGRGGNFGGRGGYGGGGGGSRGSYGGGDGGYNGFGGDGGNYGGGPGYSSRGGYGGGGPGYGNQGNYGGGGNYNDFGNYSGQQQSNYGPMKGGSFGGRSSGSPYGGGYGSGGGSGGYGSRRF

SEQ ID NO: 845308 - protein, 209 aa, Homo sapiens; identical to SEQ ID NO: 845281

SEQ ID NO: 845309 - protein, 209 aa, Homo sapiens; identical to SEQ ID NO: 845281

SEQ ID NO: 845310 - protein, 209 aa, Homo sapiens; identical to SEQ ID NO: 845281

SEQ ID NO: 845311 - protein, 127 aa, Homo sapiens
MQNGEAHSVGSTHWQCPGKMCFLCCSWTEFSSSRARAAGEKGSICHARGQGSRVQDRGERICFGVQPVSRALLPLPRKDSGDSRSMGPRRSHVHPHMGLGPRPPKTRPSPARCRRAGLHAPPGLGPR

SEQ ID NO: 845312 - protein, 234 aa, Homo sapiens
SQQYASCTSGRLLLPPSATGGLSGWAASDDPIEKVIEGINRGLSNAEREVGKALDGINSGITHAGREVEKVFNGLSNMGSHTGKELDKGVQGLNHGMDKVAHEINHGIGQAGKGRKQTKRSKGSTLGSTRLGRKQRNLAKGSNHAADQAGKEVEKLGQGAHHAAGQAGKELQNAHNGVNQASKEANQLLNGNHQSGSSSHQGGATTTPLASGASVNTPFINLPALWRSVANIMP

SEQ ID NO: 845313 - protein, 134 aa, Homo sapiens
LGKRFYSSSPLFQAQRAVGDVGGNILGNVTQPASSSTLERLSTKTRRFSPLCNLEITIAASFSDPTQSTWTSGITLFSAGGLITLLLAAQGNHQSGSSSHQGGATTTPLASGASVNTPFINLPALWRSVANIMP

SEQ ID NO: 845314 - protein, 70 aa, Homo sapiens
LRVCIGVCESASYPEGNFGGNHELLNGNHQSGSSSHQGGATTTPLASGASVNTPFINLPALWRSVANIMP

SEQ ID NO: 845315 - protein, 249 aa, Homo sapiens
SQQYASCTSGRLLLPPSATGGLSGWAASDDPIEKVIEGINRGLSNAEREVGKALDGINSGITHAGREVEKVFNGLSNMGSHTGKELDKGVQGLNHGMDKVAHEINHGIGQAGKEAEKLGHGVNNAAGQGRKQTKRSKGSTLGSTRLGRKQRNLAKGSNHAADQAGKEVEKLGQGAHHAAGQAGKELQNAHNGVNQASKEANQLLNGNHQSGSSSHQGGATTTPLASGASVNTPFINLPALWRSVANIMP

SEQ ID NO: 845316 - protein, 250 aa, Homo sapiens
SQQYASCTSGRLLLPPSATGGLSGWAASDDPIEKVIEGINRGLSNAEREVGKALDGINSGITHAGREVEKVFNGLSNMGSHTGKELDKGVQGLNHGMDKVAHEINHGIGQAGKEAEKLGHGVNNAAGQVGKEADKLIHHGVHHGANQAGSEAGKFGQGNHAADQAGKEVEKLGQGAHHAAGQAGKELQNAHNGVNQASKEANQLLNGNHQSGSSSHQGGATTTPLASGASVNTPFINLPALWRSVANIMP

SEQ ID NO: 845317 - protein, 172 aa, Homo sapiens
SQQYASCTSGRLLLPPSATGGLSGWAASDDPIEKVIEGINRGLSNAEREVGKALDGINSGITHAGREVEKVFNGLSNMGSHTGKELDKGVQGLNHGMDKVAHEINHGIGQAGKEAEKLGHGVNNAAGQGNHQSGSSSHQGGATTTPLASGASVNTPFINLPALWRSVANIMP

SEQ ID NO: 845318 - protein, 472 aa, Homo sapiens
SQQYASCTSGRLLLPPSATGGLSGWAASDDPIEKVIEGINRGLSNAEREVGKALDGINSGITHAGREVEKVFNGLSNMGSHTGKELDKGVQGLNHGMDKVAHEINHGIGQAGKEAEKLGHGVNNAAGQVGKEADKLIHHGVHHGANQAGSEAGKFGQGLARGSTILLVRLGRRQRSLARGPTMLRGRPEMRQGRFGQGAHHAAGQAGNEAGRFGQGVHHGLSEGWKETEKFGQGVHHAASQFGKETEKLGHGVHHGVNEAWKEAEKFGQGVHHAASQVGKEEDRVVQGLHHGVSQAGREAGQFGHDIHHTAGQAGKEGDIAVHGVQPGVHEAGKEAGQFGQGVHHTLEQAGKEADKAVQGFHTGVHQAGKEAEKLGQGVVNHAADQAGKEVEKLGQGAHHAAGQAGKELQNAHNGVNQASKEANQLLNGNHQSGSSSHQGGATTTPLASGASVNTPFINLPALWRSVANIMP

SEQ ID NO: 845319 - protein, 223 aa, Homo sapiens
DAHGTQRRTMAGENFATPFHGHVGRGAFSDVYEPAEDTFLLLDALEAAAAELAGVEICLEVGSGSGVVSAFLASMIGPQALYMCTDINPEAAACTLETARCNKVHIQPVITDLVKGLLPRLTEKVDLLVFNPPYVVTPPQEVGSHGIEAAWAGGRNGREVMDRFFPLVPDLLSPRGLFYLVTIKENNPEEILKIMKTKGLQGTTALSRQAGQETLSVLKFTKS

SEQ ID NO: 845320 - protein, 195 aa, Homo sapiens
DAHGTQRRTMAGENFATPFHGHVGRGAFSDVYEPAEDTFLLLDALEAAAAELAGVEICLEVGSGSGVVSAFLASMIGPQALYMCTDINPEAAACTLETARCNKVHIQPVITDLVGSHGIEAAWAGGRNGREVMDRFFPLVPDLLSPRGLFYLVTIKENNPEEILKIMKTKGLQGTTALSRQAGQETLSVLKFTKS

SEQ ID NO: 845321 - protein, 223 aa, Homo sapiens; identical to SEQ ID NO: 845319

SEQ ID NO: 845322 - protein, 223 aa, Homo sapiens; identical to SEQ ID NO: 845319

SEQ ID NO: 845323 - protein, 195 aa, Homo sapiens; identical to SEQ ID NO: 845320

SEQ ID NO: 845324 - protein, 58 aa, Homo sapiens
MPTSSAVLLRVLSIPLLTVLILARDLSALGGCPWGPLPLRCHCLLPDPLFCAGEVQAF

SEQ ID NO: 845325 - protein, 68 aa, Homo sapiens
PGEKGGHSAQGHARARTGHWPPPAESTRGKARLRVPRLTNVCCLCHRREKGKEGKRNKDITRCKWLDF

SEQ ID NO: 845326 - protein, 283 aa, Homo sapiens
PNMGFALERFAEAVDPALECKLCGQVLEEPLCTPCGHVFCASCLLPWAVRRRRCPLQCQPLAPGELYRVLPLRSLIQKLRVQCDYRARGCGHSVRLHELEAHVEHCDFGPARRLRSRGGCASGLGGGEVPARGGCGPTPRAGRGGGARGGPPGGRWGRGRGPGPRVLAWRRREKALLAQLWALQGEVQLTARRYQEKFTQYMAHVRNFVGDLGGGHRRDGEHKPFTIVLERENDTLGFNIIGGRPNQNNQEGTSTEGIYVSKILENGPADRADGLEIHDKIME

SEQ ID NO: 845327 - protein, 146 aa, Homo sapiens
AELCKERLCLRSFRHLRSFQHLRSFSLTETQPVVRDMSEHVTRSQSSERGNDQESSQPVGPVIVQQPTEEKRQEEEPPTDNQGIAPSGEIKNEGAPAVQGTDVEAFQQELALLKIEDAPGDGPDVREGTLPTFDPTKVLEAGEGQL

SEQ ID NO: 845328 - protein, 146 aa, Homo sapiens; identical to SEQ ID NO: 845327

SEQ ID NO: 845329 - protein, 130 aa, Homo sapiens
MQAPWAGNRGWAGTREEVRDMSEHVTRSQSSERGNDQESSQPVGPVIVQQPTEEKRQEEEPPTDNQGIAPSGEIKNEGAPAVQGTDVEAFQQELALLKIEDAPGDGPDVREGTLPTFDPTKVLEAGEGQL

SEQ ID NO: 845330 - protein, 130 aa, Homo sapiens; identical to SEQ ID NO: 845329

SEQ ID NO: 845331 - protein, 130 aa, Homo sapiens; identical to SEQ ID NO: 845329

SEQ ID NO: 845332 - protein, 222 aa, Homo sapiens
MALSAETESHIYRALRTASGAAAHLVALGFTIFVAVLARPGSSLFSWHPVLMSLAFSFLMTEALLVFSPESSLLHSLSRKGRARCHWVLQLLALLCALLGLGLVILHKEQLGKAHLVTRHGQAGLLAVLWAGLQCSGGVGLLYPKLLPRWPLAKLKLYHATSGLVGYLLGSASLLLGMCSLWFTASVTGAAWYLAVLCPVLTSLVIMNQVSNAYLYRKRIQP

SEQ ID NO: 845333 - protein, 222 aa, Homo sapiens; identical to SEQ ID NO: 845332

SEQ ID NO: 845334 - protein, 163 aa, Homo sapiens
MTEALLVFSPESSLLHSLSRKGRARCHWVLQLLALLCALLGLGLVILHKEQLGKAHLVTRHGQAGLLAVLWAGLQCSGGVGLLYPKLLPRWPLAKLKLYHATSGLVGYLLGSASLLLGMCSLWFTASVTGAAWYLAVLCPVLTSLVIMNQVSNAYLYRKRIQP

SEQ ID NO: 845335 - protein, 163 aa, Homo sapiens; identical to SEQ ID NO: 845334

SEQ ID NO: 845336 - protein, 222 aa, Homo sapiens; identical to SEQ ID NO: 845332

SEQ ID NO: 845337 - protein, 166 aa, Homo sapiens
MALSAETESHIYRALRTASGAAAHLVALGFTIFVAVLARPGSSLFSWHPVLMSLAFSFLMTEALLVFSPESSLLHSLSRKGRARCHWVLQLLALLCALLGLGLVILHKEQLGKAHLVTRHGQAGLLAVLWAGLQCSGGVGLLYPKLLPRWPLAKLKLYLYRKRIQP

SEQ ID NO: 845338 - protein, 222 aa, Homo sapiens; identical to SEQ ID NO: 845332

SEQ ID NO: 845339 - protein, 272 aa, Homo sapiens
LPVKNNNICNILRYGLCAYVVTSAYRGYGNISEHICTAAEAWLQPLARLTMALSAETESHIYRALRTASGAAAHLVALGFTIFVAVLARPGSSLFSWHPVLMSLAFSFLMTEALLVFSPESSLLHSLSRKGRARCHWVLQLLALLCALLGLGLVILHKEQLGKAHLVTRHGQAGLLAVLWAGLQCSGGVGLLYPKLLPRWPLAKLKLYHATSGLVGYLLGSASLLLGMCSLWFTASVTGAAWYLAVLCPVLTSLVIMNQVSNAYLYRKRIQP

SEQ ID NO: 845340 - protein, 213 aa, Homo sapiens
MALSAETESHIYRALRTASGAAAHLVALGFTIFVAVLARPGSSLFSWHPVLMSLAFSFLMTEALLVFSPESSLLHSLSRKGRARCHWVLQLLALLCALLGLGLVILHKEQLGKAHLVTRHGQAGLLAVLWAGLQCSGGVGLLYPKLLPRWPLAKLKLYLLGSASLLLGMCSLWFTASVTGAAWYLAVLCPVLTSLVIMNQVSNAYLYRKRIQP

SEQ ID NO: 845341 - protein, 222 aa, Homo sapiens; identical to SEQ ID NO: 845332

SEQ ID NO: 845342 - protein, 180 aa, Homo sapiens [sequence omitted]

SEQ ID NO: 845343 - protein, 398 aa, Homo sapiens
MRLREPLLSGSAAMPGASLQRACRLLVAVCALHLGVTLVYYLAGRDLSRLPQLVGVSTPLQGGSNSAAAIGQSSGELRTGGARPPPPLGASSQPRPGGDSSPVVDSGPGPASNLTSVPVPHTTALSLPACPEESPLLVGPMLIEFNMPVDLELVAKQNPNVKMGGRYAPRDCVSPHKVAIIIPFRNRQEHLKYWLYYLHPVLQRQQLDYGIYVINQAGDTIFNRAKLLNVGFQEALKDYDYTCFVFSDVDLIPMNDHNAYRCFSQPRHISVAMDKFGFSLPYVQYFGGVSALSKQQFLTINGFPNNYWGWGGEDDDIFNRLVFRGMSISRPNAVVGRCRMIRHSRDKKNEPNPQRFDRIAHTKETMLSDGLNSLTYQVLDVQRYPLYTQITVDIGTPS

SEQ ID NO: 845344 - protein, 308 aa, Homo sapiens
GKHAKSSFKQFLLQIKELSNPIDLDSVPVPHTTALSLPACPEESPLLVGPMLIEFNMPVDLELVAKQNPNVKMGGRYAPRDCVSPHKVAIIIPFRNRQEHLKYWLYYLHPVLQRQQLDYGIYVINQAGDTIFNRAKLLNVGFQEALKDYDYTCFVFSDVDLIPMNDHNAYRCFSQPRHISVAMDKFGFSLPYVQYFGGVSALSKQQFLTINGFPNNYWGWGGEDDDIFNRLVFRGMSISRPNAVVGRCRMIRHSRDKKNEPNPQRFDRIAHTKETMLSDGLNSLTYQVLDVQRYPLYTQITVDIGTPS

SEQ ID NO: 845345 - protein, 398 aa, Homo sapiens; identical to SEQ ID NO: 845343

SEQ ID NO: 845346 - protein, 398 aa, Homo sapiens; identical to SEQ ID NO: 845343

SEQ ID NO: 845347 - protein, 219 aa, Homo sapiens
MRLREPLLSGSAAMPGASLQRACRLLVAVCALHLGVTLVYYLAGRDLSRLPQLVGVSTPLQGGSNSAAAIGQSSGELRTGGARPPPPLGASSQPRPGGDSSPVVDSGPGPASNLTSVPVPHTTALSLPACPEESPLLVGPMLIEFNMPVDLELVAKQNPNVKMGGRYAPRDCVSPHKVAIIIPFRNRQEHLKYWLYYLHPVLQRQQLDYGIYVINQISF

SEQ ID NO: 845348 - protein, 223 aa, Homo sapiens
MRLREPLLSGSAAMPGASLQRACRLLVAVCALHLGVTLVYYLAGRDLSRLPQLVGVSTPLQGGSNSAAAIGQSSGELRTGGARPPPPLGASSQPRPGGDSSPVVDSGPGPASNLTSVPVPHTTALSLPACPEESPLLVGPMLIEFNMPVDLELVAKQNPNVKMGGRYAPRDCVSPHKVAIIIPFRNRQEHLKYWLYYLHPVLQRQQLDYGIYVINQVRPGKVE

SEQ ID NO: 845349 - protein, 225 aa, Homo sapiens
MRLREPLLSGSAAMPGASLQRACRLLVAVCALHLGVTLVYYLAGRDLSRLPQLVGVSTPLQGGSNSAAAIGQSSGELRTGGARPPPPLGASSQPRPGGDSSPVVDSGPGPASNLTSVPVPHTTALSLPACPEESPLLVGPMLIEFNMPVDLELVAKQNPNVKMGGRYAPRDCVSPHKVAIIIPFRNRQEHLKYWLYYLHPVLQRQQLDYGIYVINQYEKIRRLLW

SEQ ID NO: 845350 - protein, 398 aa, Homo sapiens; identical to SEQ ID NO: 845343

SEQ ID NO: 845351 - protein, 398 aa, Homo sapiens; identical to SEQ ID NO: 845343

SEQ ID NO: 845352 - protein, 398 aa, Homo sapiens; identical to SEQ ID NO: 845343

SEQ ID NO: 845353 - protein, 398 aa, Homo sapiens; identical to SEQ ID NO: 845343

SEQ ID NO: 845354 - protein, 115 aa, Homo sapiens
MTALRGSVGNKKNESLSFCPQILTFPKCLKRNQTNALSGNFCVILLLKPNSTFSCCFFFFFFFFWLPSHSCQVCGSFLEPREILLPPFADVVLSWAHLGPRHSQGTVRPGCLPGP

SEQ ID NO: 845355 - protein, 1055 aa, Homo sapiens
MALRRLGAALLLLPLLAAVEETLMDSTTATAELGWMVHPPSGWEEVSGYDENMNTIRTYQVCNVFESSQNNWLRTKFIRRRGAHRIHVEMKFSVRDCSSIPSVPGSCKETFNLYYYEADFDSATKTFPNWMENPWVKVDTIAADESFSQVDLGGRVMKINTEVRSFGPVSRSGFYLAFQDYGGCMSLIAVRVFYRKCPRIIQNGAIFQETLSGAESTSLVAARGSCIANAEEVDVPIKLYCNGDGEWLVPIGRCMCKAGFEAVENGTVCRGCPSGTFKANQGDEACTHCPINSRTTSEGATNCVCRNGYYRADLDPLDMPCTTIPSAPQAVISSVNETSLMLEWTPPRDSGGREDLVYNIICKSCGSGRGACTRCGDNVQYAPRQLGLTEPRIYISDLLAHTQYTFEIQAVNGVTDQSPFSPQFASVNITTNQAAPSAVSIMHQVSRTVDSITLSWSQPDQPNGVILDYELQYYEKELSEYNATAIKSPTNTVTVQGLKAGAIYVFQVRARTVAGYGRYSGKMYFQTMTEAEYQTSIQEKLPLIIGSSAAGLVFLIAVVVIAIVCNRRGFERADSEYTDKLQHYTSGHMTPGMKIYIDPFTYEDPNEAVREFAKEIDISCVKIEQVIGAGEFGEVCSGHLKLPGKREIFVAIKTLKSGYTEKQRRDFLSEASIMGQFDHPNVIHLEGVVTKSTPVMIITEFMENGSLDSFLRQNDGQFTVIQLVGMLRGIAAGMKYLADMNYVHRDLAARNILVNSNLVCKVSDFGLSRFLEDDTSDPTYTSALGGKIPIRWTAPEAIQYRKFTSASDVWSYGIVMWEVMSYGERPYWDMTNQDVINAIEQDYRLPPPMDCPSALHQLMLDCWQKDRNHRPKFGQIVNTLDKMIRNPNSLKAMAPLSSGINLPLLDRTIPDYTSFNTVDEWLEAIKMGQYKESFANAGFTSFDVVSQMMMEDILRVGVTLAGHQKKILNSIQVMRAQMNQIQSVEGQPLARRPRATGRTKRCQPRDVTKKTCNSNDGKKKGMGKKKTDPGRGREIQGIFFKEDSHKESNDCSCGG

SEQ ID NO: 845356 - protein, 980 aa, Homo sapiens
MWVPVLALPVCTYAETLMDSTTATAELGWMVHPPSGWEEVSGYDENMNTIRTYQVCNVFESSQNNWLRTKFIRRRGAHRIHVEMKFSVRDCSSIPSVPGSCKETFNLYYYEADFDSATKTFPNWMENPWVKVDTIAADESFSQVDLGGRVMKINTEVRSFGPVSRSGFYLAFQDYGGCMSLIAVRVFYRKCPRIIQNGAIFQETLSGAESTSLVAARGSCIANAEEVDVPIKLYCNGDGEWLVPIGRCMCKAGFEAVENGTVCRGCPSGTFKANQGDEACTHCPINSRTTSEGATNCVCRNGYYRADLDPLDMPCTTIPSAPQAVISSVNETSLMLEWTPPRDSGGREDLVYNIICKSCGSGRGACTRCGDNVQYAPRQLGLTEPRIYISDLLAHTQYTFEIQAVNGVTDQSPFSPQFASVNITTNQAAPSAVSIMHQVSRTVDSITLSWSQPDQPNGVILDYELQYYEKELSEYNATAIKSPTNTVTVQGLKAGAIYVFQVRARTVAGYGRYSGKMYFQTMTEAEYQTSIQEKLPLIIGSSAAGLVFLIAVVVIAIVCNRRGFERADSEYTDKLQHYTSGHMTPGMKIYIDPFTYEDPNEAVREFAKEIDISCVKIEQVIGAGEFGEVCSGHLKLPGKREIFVAIKTLKSGYTEKQRRDFLSEASIMGQFDHPNVIHLEGVVTKSTPVMIITEFMENGSLDSFLRQNDGQFTVIQLVGMLRGIAAGMKYLADMNYVHRDLAARNILVNSNLVCKVSDFGLSRFLEDDTSDPTYTSALGGKIPIRWTAPEAIQYRKFTSASDVWSYGIVMWEVMSYGERPYWDMTNQDVINAIEQDYRLPPPMDCPSALHQLMLDCWQKDRNHRPKFGQIVNTLDKMIRNPNSLKAMAPLSSGINLPLLDRTIPDYTSFNTVDEWLEAIKMGQYKESFANAGFTSFDVVSQMMMEDILRVGVTLAGHQKKILNSIQVMRAQMNQIQSVEV

SEQ ID NO: 845357 - protein, 305 aa, Homo sapiens
  misc_feature (27)..(27): Xaa can be any naturally occurring amino acid
HSYGVDIQVSLRLDPDNLRYYEFMDAXDPFPQNDGQFTVIQLVGMLRGIAAGMKYLADMNYVHRDLAARNILVNSNLVCKVSDFGLSRFLEDDTSDPTYTSALGGKIPIRWTAPEAIQYRKFTSASDVWSYGIVMWEVMSYGERPYWDMTNQDVINAIEQDYRLPPPMDCPSALHQLMLDCWQKDRNHRPKFGQIVNTLDKMIRNPNSLKAMAPLSSGINLPLLDRTIPDYTSFNTVDEWLEAIKMGQYKESFANAGFTSFDVVSQMMMEDILRVGVTLAGHQKKILNSIQVMRAQMNQIQSVEV

SEQ ID NO: 845358 - protein, 210 aa, Homo sapiens
MHRGLSGLGGKIPIRWTAPEAIQYRKFTSASDVWSYGIVMWEVMSYGERPYWDMTNQDVINAIEQDYRLPPPMDCPSALHQLMLDCWQKDRNHRPKFGQIVNTLDKMIRNPNSLKAMAPLSSGINLPLLDRTIPDYTSFNTVDEWLEAIKMGQYKESFANAGFTSFDVVSQMMMEDILRVGVTLAGHQKKILNSIQVMRAQMNQIQSVEV

SEQ ID NO: 845359 - protein, 496 aa, Homo sapiens
MALRRLGAALLLLPLLAAVEETLMDSTTATAELGWMVHPPSGWEEVSGYDENMNTIRTYQVCNVFESSQNNWLRTKFIRRRGAHRIHVEMKFSVRDCSSIPSVPGSCKETFNLYYYEADFDSATKTFPNWMENPWVKVDTIAADESFSQVDLGGRVMKINTEVRSFGPVSRSGFYLAFQDYGGCMSLIAVRVFYRKCPRIIQNGAIFQETLSGAESTSLVAARGSCIANAEEVDVPIKLYCNGDGEWLVPIGRCMCKAGFEAVENGTVCRGCPSGTFKANQGDEACTHCPINSRTTSEGATNCVCRNGYYRADLDPLDMPCTTIPSAPQAVISSVNETSLMLEWTPPRDSGGREDLVYNIICKSCGSGRGACTRCGDNVQYAPRQLGLTEPRIYISDLLAHTQYTFEIQAVNGVTDQSPFSPQFASVNITTNQAAPSAVSIMHQVSRTVDSITLSWSQPDQPNGVILDYELQYYEKVPIGWVLSPSPTSLRAPLPG

SEQ ID NO: 845360 - protein, 233 aa, Homo sapiens
MALRRLGAALLLLPLLAAVEETLMDSTTATAELGWMVHPPSGWEEVSGYDENMNTIRTYQVCNVFESSQNNWLRTKFIRRRGAHRIHVEMKFSVRDCSSIPSVPGSCKETFNLYYYEADFDSATKTFPNWMENPWVKVDTIAADESFSQVDLGGRVMKINTEVRSFGPVSRSGFYLAFQDYGGCMSLIAVRVFYRKCPRIIQNGAIFQETLSGAESTSLVAARGSCITGTSLS

SEQ ID NO: 845361 - protein, 132 aa, Homo sapiens
LGGRVMKINTEVRSFGPVSRSGFYLAFQDYGGCMSLIAVRVFYRKCPRIIQNGAIFQETLSGAESTSLVAARGSCIANAEEVDVPIKLYCNGDGEWLVPIGRCMCKAGFEAVENGTVCRGKGQGGARAPANA

SEQ ID NO: 845362 - protein, 986 aa, Homo sapiens
MALRRLGAALLLLPLLAAVEETLMDSTTATAELGWMVHPPSGWEEVSGYDENMNTIRTYQVCNVFESSQNNWLRTKFIRRRGAHRIHVEMKFSVRDCSSIPSVPGSCKETFNLYYYEADFDSATKTFPNWMENPWVKVDTIAADESFSQVDLGGRVMKINTEVRSFGPVSRSGFYLAFQDYGGCMSLIAVRVFYRKCPRIIQNGAIFQETLSGAESTSLVAARGSCIANAEEVDVPIKLYCNGDGEWLVPIGRCMCKAGFEAVENGTVCRGCPSGTFKANQGDEACTHCPINSRTTSEGATNCVCRNGYYRADLDPLDMPCTTIPSAPQAVISSVNETSLMLEWTPPRDSGGREDLVYNIICKSCGSGRGACTRCGDNVQYAPRQLGLTEPRIYISDLLAHTQYTFEIQAVNGVTDQSPFSPQFASVNITTNQAAPSAVSIMHQVSRTVDSITLSWSQPDQPNGVILDYELQYYEKELSEYNATAIKSPTNTVTVQGLKAGAIYVFQVRARTVAGYGRYSGKMYFQTMTEAEYQTSIQEKLPLIIGSSAAGLVFLIAVVVIAIVCNRRGFERADSEYTDKLQHYTSGHMTPGMKIYIDPFTYEDPNEAVREFAKEIDISCVKIEQVIGAGEFGEVCSGHLKLPGKREIFVAIKTLKSGYTEKQRRDFLSEASIMGQFDHPNVIHLEGVVTKSTPVMIITEFMENGSLDSFLRQNDGQFTVIQLVGMLRGIAAGMKYLADMNYVHRDLAARNILVNSNLVCKVSDFGLSRFLEDDTSDPTYTSALGGKIPIRWTAPEAIQYRKFTSASDVWSYGIVMWEVMSYGERPYWDMTNQDVINAIEQDYRLPPPMDCPSALHQLMLDCWQKDRNHRPKFGQIVNTLDKMIRNPNSLKAMAPLSSGINLPLLDRTIPDYTSFNTVDEWLEAIKMGQYKESFANAGFTSFDVVSQMMMEDILRVGVTLAGHQKKILNSIQVMRAQMNQIQSVEV

SEQ ID NO: 845363 - protein, 986 aa, Homo sapiens; identical to SEQ ID NO: 845362

SEQ ID NO: 845364 - protein, 668 aa, Homo sapiens
MPCTTIPSAPQAVISSVNETSLMLEWTPPRDSGGREDLVYNIICKSCGSGRGACTRCGDNVQYAPRQLGLTEPRIYISDLLAHTQYTFEIQAVNGVTDQSPFSPQFASVNITTNQAAPSAVSIMHQVSRTVDSITLSWSQPDQPNGVILDYELQYYEKELSEYNATAIKSPTNTVTVQGLKAGAIYVFQVRARTVAGYGRYSGKMYFQTMTEAEYQTSIQEKLPLIIGSSAAGLVFLIAVVVIAIVCNRRGFERADSEYTDKLQHYTSGHMTPGMKIYIDPFTYEDPNEAVREFAKEIDISCVKIEQVIGAGEFGEVCSGHLKLPGKREIFVAIKTLKSGYTEKQRRDFLSEASIMGQFDHPNVIHLEGVVTKSTPVMIITEFMENGSLDSFLRQNDGQFTVIQLVGMLRGIAAGMKYLADMNYVHRDLAARNILVNSNLVCKVSDFGLSRFLEDDTSDPTYTSALGGKIPIRWTAPEAIQYRKFTSASDVWSYGIVMWEVMSYGERPYWDMTNQDVINAIEQDYRLPPPMDCPSALHQLMLDCWQKDRNHRPKFGQIVNTLDKMIRNPNSLKAMAPLSSGINLPLLDRTIPDYTSFNTVDEWLEAIKMGQYKESFANAGFTSFDVVSQMMMEDILRVGVTLAGHQKKILNSIQVMRAQMNQIQSVEV

SEQ ID NO: 845365 - protein, 301 aa, Homo sapiens
MALRRLGAALLLLPLLAAVEETLMDSTTATAELGWMVHPPSGWEEVSGYDENMNTIRTYQVCNVFESSQNNWLRTKFIRRRGAHRIHVEMKFSVRDCSSIPSVPGSCKETFNLYYYEADFDSATKTFPNWMENPWVKVDTIAADESFSQVDLGGRVMKINTEVRSFGPVSRSGFYLAFQDYGGCMSLIAVRVFYRKCPRIIQNGAIFQETLSGAESTSLVAARGSCIANAEEVDVPIKLYCNGDGEWLVPIGRCMCKAGFEAVENGTVCRERQDLTMLSRLVLNSWPQMILPPQPPKVLEL

SEQ ID NO: 845366 - protein, 240 aa, Homo sapiens
MALRRLGAALLLLPLLAAVEETLMDSTTATAELGWMVHPPSGWEEVSGYDENMNTIRTYQVCNVFESSQNNWLRTKFIRRRGAHRIHVEMKFSVRDCSSIPSVPGSCKETFNLYYYEADFDSATKTFPNWMENPWVKVDTIAADESFSQVDLGGRVMKINTEVRSFGPVSRSGFYLAFYCNGDGEWLVPIGRCMCKAGFEAVENGTVCRERQDLTMLSRLVLNSWPQMILPPQPPKVLEL

SEQ ID NO: 845367 - protein, 124 aa, Homo sapiens
MSWLFPLTKSASSSAAGSPGGLTSLQQQKQRLIESLRNSHSSIAEIQKDVEYRLPFTINNLTININILLPPQFPQEKPVISVYPPIRHHLMDKQGVYVTSPLVNNVCIWDNLFQGNIIGVLLFY

SEQ ID NO: 845368 - protein, 362 aa, Homo sapiens
MSWLFPLTKSASSSAAGSPGGLTSLQQQKQRLIESLRNSHSSIAEIQKDVEYRLPFTINNLTININILLPPQFPQEKPVISVYPPIRHHLMDKQGVYVTSPLVNNFTMHSDLGKIIQSLLDEFWKNPPVLAPTSTAFPYLYSNPSGMSPYASQGFPFLPPYPPQEANRSITSLSVADTVSSSTTSHTTAKPAAPSFGVLSNLPLPIPTVDASIPTSQNGFGYKMPDVPDAFPELSELSVSQLTDMNEQEEVLLEQFLTLPQLKQIITDKDDLVKSIEELARKNLLLEPSLEAKRQTVLDKYELLTQMKSTFEKKMQRQHELSESCSASALQARLKVAAHEAEEESDNIAEDFLEGKMENLPL

SEQ ID NO: 845369 - protein, 349 aa, Homo sapiens
MSWLFPLTKSASSSAAGSPGGLTSLQQQKQRLIESLRNSHSSIAEIQKDVEYRLPFTINNLTININILLPPQFPQEKPVISVYPPIRHHLMDKQGVYVTSPLVNNFTMHSDLGKIIQSLLDEFWKNPPVLAPTSTAFPYLYSNPSGMSPYASQGFPFLPPYPPQEANRSITSLSVADTVSSSTTSHTTAKPAAPSFGVLSNLPLPIPTVDASIPTSQNGFGYKMPDVPDAFPELSELSVSQLTDMNEQEEVLLEQFLTLPQLKQIITDKDDLVKSIEELARKNLLLEPSLEAKRQTVLDKYELLTQMKSTFEKKMQRQHELSEICHCRRAKEEKLQQAIAMHSQFHAPL

SEQ ID NO: 845370 - protein, 397 aa, Homo sapiens
MSWLFPLTKSASSSAAGSPGGLTSLQQQKQRLIESLRNSHSSIAEIQKDVEYRLPFTINNLTININILLPPQFPQEKPVISVYPPIRHHLMDKQGVYVTSPLVNNFTMHSDLGKIIQSLLDEFWKNPPVLAPTSTAFPYLYSNPSGMSPYASQGFPFLPPYPPQEANRSITSLSVADTVSSSTTSHTTAKPAAPSFGVLSNLPLPIPTVDASIPTSQNGFGYKMPDVPDAFPELSELSVSQLTDMNEQEEVLLEQFLTLPQLKQIITDKDDLVKSIEELARKNLLLEPSLEAKRQTVLDKYELLTQMKSTFEKKMQRQHELSESCSASALQARLKVAAHEAEEESDNIAEDFLEGKMEIDDFLSSFMEKRTICHCRRAKEEKLQQAIAMHSQFHAPL

SEQ ID NO: 845371 - protein, 168 aa, Homo sapiens
MPDVPDAFPELSELSVSQLTDMNEQEEVLLEQFLTLPQLKQIITDKDDLVKSIEELARKNLLLEPSLEAKRQTVLDKMKSTFEKKMQRQHELSESCSASALQARLKVAAHEAEEESDNIAEDFLEGKMEIDDFLSSFMEKRTICHCRRAKEEKLQQAIAMHSQFHAPL

SEQ ID NO: 845372 - protein, 297 aa, Homo sapiens
MSWLFPLTKSASSSAAGSPGGLTSLQQQKQRLIESLRNSHSSIAEIQKDVEYRLPFTINNLTININILLPPQFPQEKPVISVYPPIRHHLMDKQGVYVTSPLVNNFTMHSDLGKIIQSLLDEFWKNPPVLAPTSTAFPYLYSNPSGMSPYASQGFPFLPPYPPQEANRSITSLSVADTVSSSTTSHTTAKPAAPSFGVLSNLPLPIPTVDASIPTSQNGFGYKMPDVPDAFPELSELSVSQLTDMNEQEEVLLEQFLTLPQLKQIITDKDDLVKSIEELARKNLLLEPSKDPKRGTE

SEQ ID NO: 845373 - protein, 397 aa, Homo sapiens; identical to SEQ ID NO: 845370

SEQ ID NO: 845374 - protein, 397 aa, Homo sapiens; identical to SEQ ID NO: 845370

SEQ ID NO: 845375 - protein, 408 aa, Homo sapiens
MSWLFPLTKSASSSAAGSPGGLTSLQQQKQRLIESLRNSHSRLERSGAISVHCNLRLPDSSNHPPSAPHTPPSSWDYRLLPPQFPQEKPVISVYPPIRHHLMDKQGVYVTSPLVNNFTMHSDLGKIIQSLLDEFWKNPPVLAPTSTAFPYLYSNPSGMSPYASQGFPFLPPYPPQEANRSITSLSVADTVSSSTTSHTTAKPAAPSFGVLSNLPLPIPTVDASIPTSQNGFGYKMPDVPDAFPELSELSVSQLTDMNEQEEVLLEQFLTLPQLKQIITDKDDLVKSIEELARKNLLLEPSLEAKRQTVLDKYELLTQMKSTFEKKMQRQHELSESCSASALQARLKVAAHEAEEESDNIAEDFLEGKMEIDDFLSSFMEKRTICHCRRAKEEKLQQAIAMHSQFHAPL

SEQ ID NO: 845376 - protein, 455 aa, Homo sapiens
QKLTEEPACGGAVGSTESDAWSVCWASRDQSWVMTYLFRSSSHIYTYIDPAANATCTDTHNEDGGAGRSVTWITKKDTAVQHELDIEMSHPAPLSLENRRAEPLGEAGQSLPGPPARGPEEDELAFSPDQERLLLRGWVPRWPHQPPAAEAAPDRVPPELTLQFTMHSDLGKIIQSLLDEFWKNPPVLAPTSTAFPYLYSNPSGMSPYASQGFPFLPPYPPQEANRSITSLSVADTVSSSTTSHTTAKPAAPSFGVLSNLPLPIPTVDASIPTSQNGFGYKMPDVPDAFPELSELSVSQLTDMNEQEEVLLEQFLTLPQLKQIITDKDDLVKSIEELARKNLLLEPSLEAKRQTVLDKYELLTQMKSTFEKKMQRQHELSESCSASALQARLKVAAHEAEEESDNIAEDFLEGKMEIDDFLSSFMEKRTICHCRRAKEEKLQQAIAMHSQFHAPL

SEQ ID NO: 845377 - protein, 174 aa, Homo sapiens [sequence omitted]

SEQ ID NO: 845378 - protein, 225 aa, Homo sapiens
FWGLCSFGSLLFWGLCSFGVFPSFGVLSNLPLPIPTVDASIPTSQNGFGYKMPDVPDAFPELSELSVSQLTDMNEQEEVLLEQFLTLPQLKQIITDKDDLVKSIEELARKNLLLEPSLEAKRQTVLDKYELLTQMKSTFEKKMQRQHELSESCSASALQARLKVAAHEAEEESDNIAEDFLEGKMEIDDFLSSFMEKRTICHCRRAKEEKLQQAIAMHSQFHAPL

SEQ ID NO: 845379 - protein, 397 aa, Homo sapiens; identical to SEQ ID NO: 845370

SEQ ID NO: 845380 - protein, 177 aa, Homo sapiens
QKLTRSLRVGARWAVRNLMHGQYAGRLRDQSWVMTYLFRSSSHIYTYIDPAATRRVLIHTMKIGGAGRSVTWITKKDTAVQHELDIEMSHPAPLSLENRRAEPLGEAGQSLPGPPARGPEEDELAFSPDQERLLLRGWVPRWPHQPPAAEAAPDRVPPELTLQIVYFQYPLLPRLRH

SEQ ID NO: 845381 - protein, 557 aa, Homo sapiens
MDSDEGYNYEFDEDEECSEEDSGAEEEEDEDDDEPDDDTLDLGEVELVEPGLGVGGERDGLLCGETGGGGGSALGPGGGGGGGGGGGGGGPGHEQEEDYRYEVLTAEQILQHMVECIREVNEVIQNPATITRILLSHFNWDKEKLMERYFDGNLEKLFAECHVINPSKKSRTRQMNTRSSAQDMPCQICYLNYPNSYFTGLECGHKFCMQCWSEYLTTKIMEEGMGQTISCPAHGCDILVDDNTVMRLITDSKVKLKYQHLITNSFVECNRLLKWCPAPDCHHVVKVQYPDAKPVRCKCGRQFCFNCGENWHDPVKCKWLKKWIKKCDDDSETSNWIAANTKECPKCHVTIEKDGGCNHMVCRNQNCKAEFCWVCLGPWEPHGSAWYNCNRYNEDDAKAARDAQERSRAALQRYLFYCNRYMNHMQSLRFEHKLYAQVKQKMEEMQQHNMSWIEVQFLKKAVDVLCQCRATLMYTYVFAFYLKKNNQSIIFENNQADLENATEVLSGYLERDISQDSLQDIKQKVQDKYRYCESRRRVLLQHVHEGYEKDLWEYIED

SEQ ID NO: 845382 - protein, 557 aa, Homo sapiens; identical to SEQ ID NO: 845381

SEQ ID NO: 845383 - protein, 557 aa, Homo sapiens; identical to SEQ ID NO: 845381

SEQ ID NO: 845384 - protein, 509 aa, Homo sapiens
MDSDEGYNYEFDEDEECSEEDSGAEEEEDEDDDEPDDDTLDLGEVELVEPGLGVGGERDGLLCGETGGGGGSALGPGGGGGGGGGGGGGGPGHEQEEDYRYEVLTAEQILQHMVECIREVNEVIQNPATITRILLSHFNWDKEKLMESISLALNVDISFVCSAGDEYLTTKIMEEGMGQTISCPAHGCDILVDDNTVMRLITDSKVKLKYQHLITNSFVECNRLLKWCPAPDCHHVVKVQYPDAKPVRCKCGRQFCFNCGENWHDPVKCKWLKKWIKKCDDDSETSNWIAANTKECPKCHVTIEKDGGCNHMVCRNQNCKAEFCWVCLGPWEPHGSAWYNCNRYNEDDAKAARDAQERSRAALQRYLFYCNRYMNHMQSLRFEHKLYAQVKQKMEEMQQHNMSWIEVQFLKKAVDVLCQCRATLMYTYVFAFYLKKNNQSIIFENNQADLENATEVLSGYLERDISQDSLQDIKQKVQDKYRYCESRRRVLLQHVHEGYEKDLWEYIED

SEQ ID NO: 845385 - protein, 459 aa, Homo sapiens
MDSDEGYNYEFDEDEECSEEDSGAEEEEDEDDDEPDDDTLDLGEVELVEPGLGVGGERDGLLCGETGGGGGSALGPGGGGGGGGGGGGGGPGHEQEEDYRYEVLTAEQILQHMVECIREVNEVIQNPATITRILLSHFNWDKEKLMERRLITDSKVKLKYQHLITNSFVECNRLLKWCPAPDCHHVVKVQYPDAKPVRCKCGRQFCFNCGENWHDPVKCKWLKKWIKKCDDDSETSNWIAANTKECPKCHVTIEKDGGCNHMVCRNQNCKAEFCWVCLGPWEPHGSAWYNCNRYNEDDAKAARDAQERSRAALQRYLFYCNRYMNHMQSLRFEHKLYAQVKQKMEEMQQHNMSWIEVQFLKKAVDVLCQCRATLMYTYVFAFYLKKNNQSIIFENNQADLENATEVLSGYLERDISQDSLQDIKQKVQDKYRYCESRRRVLLQHVHEGYEKDLWEYIED

SEQ ID NO: 845386 - protein, 427 aa, Homo sapiens
PIEVAKEYSCDKEKLMERYFDGNLEKLFAECHVINPSKKSRTRQMNTRSSAQDMPCQICYLNYPNSYFTGLECGHKFCMQCWSEYLTTKIMEEGMGQTISCPAHGCDILVDDNTVMRLITDSKVKLKYQHLITNSFVECNRLLKWCPAPDCHHVVKVQYPDAKPVRCKCGRQFCFNCGENWHDPVKCKWLKKWIKKCDDDSETSNWIAANTKECPKCHVTIEKDGGCNHMVCRNQNCKAEFCWVCLGPWEPHGSAWYNCNRYNEDDAKAARDAQERSRAALQRYLFYCNRYMNHMQSLRFEHKLYAQVKQKMEEMQQHNMSWIEVQFLKKAVDVLCQCRATLMYTYVFAFYLKKNNQSIIFENNQADLENATEVLSGYLERDISQDSLQDIKQKVQDKYRYCESRRRVLLQHVHEGYEKDLWEYIED

SEQ ID NO: 845387 - protein, 198 aa, Homo sapiens
MVCRNQNCKAEFCWVCLGPWEPHGSAWYNCNRYNEDDAKAARDAQERSRAALQRYLFYCNRYMNHMQSLRFEHKLYAQVKQKMEEMQQHNMSWIEVQFLKKAVDVLCQCRATLMYTYVFAFYLKKNNQSIIFENNQADLENATEVLSGYLERDISQDSLQDIKQKVQDKYRYCESRRRVLLQHVHEGYEKDLWEYIED

SEQ ID NO: 845388 - protein, 557 aa, Homo sapiens; identical to SEQ ID NO: 845381

SEQ ID NO: 845389 - protein, 166 aa, Homo sapiens
MCYNYITQFFLMGQRSRAALQRYLFYCNRYMNHMQSLRFEHKLYAQVKQKMEEMQQHNMSWIEVQFLKKAVDVLCQCRATLMYTYVFAFYLKKNNQSIIFENNQADLENATEVLSGYLERDISQDSLQDIKQKVQDKYRYCESRRRVLLQHVHEGYEKDLWEYIED

SEQ ID NO: 845390 - protein, 524 aa, Homo sapiens
MDSDEGYNYEFDEDEECSEEDSGAEEEEDEDDDEPDDDTLDLGEVELVEPGLGVGGERDGLLCGETGGGGGSALGPGGGGGGGGGGGGGGPGHEQEEDYRYEVLTAEQILQHMVECIREVNEVIQNPATITRILLSHFNWDKEKLMERYFDGNLEKLFAECHVINPSKKSRTRQMNTRSSAQDMPCQICYLNYPNSYFTGLECGHKFCMQCWSEYLTTKIMEEGMGQTISCPAHGCDILVDDNTVMRLITDSKVKLKYQHLITNSFVECNRLLKWCPAPDCHHVVKVQYPDAKPVRCKCGRQFCFNCGENWHDPVKCKWLKKWIKKCDDDSETSNWIAANTKECPKCHVTIEKDGGCNHMVCRNQNCKAEFCWVCLGPWEPHGSAWYNCNRYNEDDAKAARDAQERSRAALQRYLFYCNRYMNHMQSLRFEHKLYAQVKQKMEEMQQHNMSWIEVQFLKKAVDVLCQCRATLMYTYVFAFYLKKNNQSIIFEIPQRLDNAKGCSCLPGRDIPKIFEDIGDLFSL

SEQ ID NO: 845391 - protein, 557 aa, Homo sapiens; identical to SEQ ID NO: 845381

SEQ ID NO: 845392 - protein, 580 aa, Homo sapiens
MDSDEGYNYEFDEDEECSEEDSGAEEEEDEDDDEPDDDTLDLGEVELVEPGLGVGGERDGLLCGETGGGGGSALGPGGGGGGGGGGGGGGPGHEQEEDYRYEVLTAEQILQHMVECIREVNEVIQCIIGYFQKYEFSDAKDRRAAAAKNPATITRILLSHFNWDKEKLMERYFDGNLEKLFAECHVINPSKKSRTRQMNTRSSAQDMPCQICYLNYPNSYFTGLECGHKFCMQCWSEYLTTKIMEEGMGQTISCPAHGCDILVDDNTVMRLITDSKVKLKYQHLITNSFVECNRLLKWCPAPDCHHVVKVQYPDAKPVRCKCGRQFCFNCGENWHDPVKCKWLKKWIKKCDDDSETSNWIAANTKECPKCHVTIEKDGGCNHMVCRNQNCKAEFCWVCLGPWEPHGSAWYNCNRYNEDDAKAARDAQERSRAALQRYLFYCNRYMNHMQSLRFEHKLYAQVKQKMEEMQQHNMSWIEVQFLKKAVDVLCQCRATLMYTYVFAFYLKKNNQSIIFENNQADLENATEVLSGYLERDISQDSLQDIKQKVQDKYRYCESRRRVLLQHVHEGYEKDLWEYIED

SEQ ID NO: 845393 - protein, 412 aa, Homo sapiens
MERYFDGNLEKLFAECHVINPSKKSRTRQMNTRSSAQDMPCQICYLNYPNSYFTGLECGHKFCMQCWSEYLTTKIMEEGMGQTISCPAHGCDILVDDNTVMRLITDSKVKLKYQHLITNSFVECNRLLKWCPAPDCHHVVKVQYPDAKPVRCKCGRQFCFNCGENWHDPVKCKWLKKWIKKCDDDSETSNWIAANTKECPKCHVTIEKDGGCNHMVCRNQNCKAEFCWVCLGPWEPHGSAWYNCNRYNEDDAKAARDAQERSRAALQRYLFYCNRYMNHMQSLRFEHKLYAQVKQKMEEMQQHNMSWIEVQFLKKAVDVLCQCRATLMYTYVFAFYLKKNNQSIIFENNQADLENATEVLSGYLERDISQDSLQDIKQKVQDKYRYCESRRRVLLQHVHEGYEKDLWEYIED

SEQ ID NO: 845394 - protein, 557 aa, Homo sapiens; identical to SEQ ID NO: 845381

SEQ ID NO: 845395 - protein, 557 aa, Homo sapiens; identical to SEQ ID NO: 845381

SEQ ID NO: 845396 - protein, 111 aa, Homo sapiens [sequence omitted]

SEQ ID NO: 845397 - protein, 309 aa, Homo sapiens
MSLEQRSLHCKPEEALEAQQEALGLVCVQAATSSSSPLVLGTLEEVPTAGSTDPPQSPQGASAFPTTINFTRQRQPSEGSSSREEEGPSTSCILESLFRAVITKKVADLVGFLLLKYRAREPVTKAEMLESVIKNYKHCFPEIFGKASESLQLVFGIDVKEADPTGHSYVLVTCLGLSYDGLLGDNQIMPKTGFLIIVLVMIAMEGGHAPEEEIWEELSVMEVYDGREHSAYGEPRKLLTQDLVQEKYLEYRQVPDSDPARYEFLWGPRALAETSYVKVLEYVIKVSARVRFFFPSLREAALREEEEGV

SEQ ID NO: 845398 - protein, 472 aa, Homo sapiens
WKSVHFTDYSQHTQMVMALTLRCPLKLEAALCQRHDWHTLCKDLPNATARESDGWYVLEKVDLHPQLCFKFSFGNSSHVECPHQTGSLTSWNVSMDTQAQQLILHFSSRMHATFSAAWSLPGLGQDTLVPPVYTVSQARGSSPVSLDLIIPFLRPGCCVLASSWSRHKPTWEEFPSQWGLPSPPAPCFTQLPGRRRCLAHRGGGLCVCALRCGGQMSSLPGSTSCVQMVSSWGGGGKREAGHWGTGLGLILLDSVSYRHLGLLILALLALLTLLGVVLALTCRRPQSGPGPARPVLLLHAADSEAQRRLVGALAELLRAALGGGRDVIVDLWEGRHVARVGPLPWLWAARTRVAREQGTVLLLWSGADLRPVSGPDPRAAPLLALLHAAPRPLLLLAYFSRLCAKGDIPPPLRALPRYRLLRDLPRLLRALDARPFAEATSWGRLGARQRRQSRLELCSRLEREAARLADLG

SEQ ID NO: 845399 - protein, 215 aa, Homo sapiens
WKSVHFTDYSQHTQMVMALTLRCPLKLEAALCQRHDWHTLCKDLPNATARESDGWYVLEKVDLHPQLCFKFSFGNSSHVECPHQTGSLTSWNVSMDTQAQQLILHFSSRMHATFSAAWSLPGLGQDTLVPPVYTVSQARGSSPVSLDLIIPFLRPGCCVLSVPSGVAVRCPVCLEAPLVSRCLLQTPGALDPGTAGPPHPTGCCSGPHLPAPTVR

SEQ ID NO: 845400 - protein, 380 aa, Homo sapiens
RWYGRKYGITAAMLNPPPAGSLTSWNVSMDTQAQQLILHFSSRMHATFSAAWSLPGLGQDTLVPPVYTVSQARGSSPVSLDLIIPFLRPGCCVLASSWSRHKPTWEEFPSQWGLPSPPAPCFTQLPGRRRCLAHRGGGLLCLCPQVWRSDVQFAWKHLLCPDVSYRHLGLLILALLALLTLLGVVLALTCRRPQSGPGPARPVLLLHAADSEAQRRLVGALAELLRAALGGGRDVIVDLWEGRHVARVGPLPWLWAARTRVAREQGTVLLLWSGADLRPVSGPDPRAAPLLALLHAAPRPLLLLAYFSRLCAKGDIPPPLRALPRYRLLRDLPRLLRALDARPFAEATSWGRLGARQRRQSRLELCSRLEREAARLADLG

SEQ ID NO: 845401 - protein, 143 aa, Homo sapiens
WKSVHFTDYSQHTQMVMALTLRCPLKLEAALCQRHDWHTLCKDLPNATARESDGWYVLEKVDLHPQLCFKFSFGNSSHVECPHQTGSLTSWNVSMDTQAQQLILHFSSRMHATFSAAWSLPGLGQDTLVPPVYTVSQVWPRPH

SEQ ID NO: 845402 - protein, 114 aa, Homo sapiens
SPSCREPPRAAACSCTSRGTDLDPSYHRLLWHSVFGVISCYQLRRQRIAQRSTWNLTAPSMFQQLAPASPQGIKFGILSLETQVLAELLILSQDSVIEDTRPEERDVAGASYTS

SEQ ID NO: 845403 - protein, 729 aa, Homo sapiens
IRERVRGRPRVLWRLSKSPGAQFPEAVSSERSSCTVVSQVCESPTMSASGVLSFTQQGWEQVLAKVKRAVVYLDAACAESLHWGCGSTRLLEAVGGPDCHLREFEPDAIGGGAKQPKAVFVLSCLLKGRTVEILRDIICRSHFQYCVVVTTVSHAVHLTANHVPAAAAAEMEGQQPVFEQLEEKLCEWMGNMNYTAEVFHVPLLLAPVAPHFALTPAFASLFPLLPQDVHLLNSARPDKRKLGSLGDVDSTTLTPELLLQIRCLVSGLSSLCEHLGVREECFAVGSLSQVIAADLANYAPAKNRKKTAAGRASVVFVDRTLDLTGAVGHHGDNLVEKIISALPQLPGHTNDVMVNMIALTALHTEEENYNVVAPGCLSQSSDTTAKALWEALLNTKHKEAVMEVRRHLVEAASRENLPIKMSMGRVTPGQLMSYIQLFKNNLKALMNHCGLLQLGLATAQTLKHPQTAKWDNFLAFERLLLQSIGESAMSVVLNQLLPMIKPVTQRTNEDYSPEELLILLIYIYSVTGELTVDKDLCEAEEKVKKALAQVFCEESGLSPLLQKITDWDSSINLTFHKSKIAVDELFTSLRDIAGARSLLKQFKSVYVPGNHTHQASYKPLLKQVVEEIFHPERPDSVDIEHMSSGLTDLLKTGFSMFMKVSRPHPSDYPLLILFVVGGVTVSEVKMVKDLVASLKPGTQVIVLSTRLLKPLNIPELLFATDRLHPDLGF

SEQ ID NO: 845404 - protein, 711 aa, Homo sapiens
IRERVRGRPRVLWRLSKSPGAQFPEAVSSERSSCTVVSQVCESPTMSASGVLSFTQQGWEQVLAKVKRAVVYLDAACAESLHWGCGSTRLLEAVGGPDCHLREFEPDAIGGGAKQPKAVFVLSCLLKGRTVEILRDIICRSHFQYCVVVTTVSHAVHLTANHVPAAAAAEMEGQQPVFEQLEEKLCEWMGNMNYTAEVFHVPLLLAPVAPHFALTPAFASLFPLLPQDVHLLNSARPDKRKLGSLGDVDSTTLTPELLLQIRCLVSGLSSLCEHLGVREECFAVGSLSQVIAADLANYAPAKNRKKTAAGRASVVFVDRTLDLTGAVGHHGDNLVEKIISALPQLPGHTNDVMVNMIALTALHTEEENYNVVAPGCLSQSSDTTAKALWEALLNTKHKEAVMEVRRHLVEAASRAYIQLFKNNLKALMNHCGLLQLGLATAQTLKHPQTAKWDNFLAFERLLLQSIGESAMSVVLNQLLPMIKPVTQRTNEDYSPEELLILLIYIYSVTGELTVDKDLCEAEEKVKKALAQVFCEESGLSPLLQKITDWDSSINLTFHKSKIAVDELFTSLRDIAGARSLLKQFKSVYVPGNHTHQASYKPLLKQVVEEIFHPERPDSVDIEHMSSGLTDLLKTGFSMFMKVSRPHPSDYPLLILFVVGGVTVSEVKMVKDLVASLKPGTQVIVLSTRLLKPLNIPELLFATDRLHPDLGF

SEQ ID NO: 845405 - protein, 567 aa, Homo sapiens
IRERVRGRPRVLWRLSKSPGAQFPEAVSSERSSCTVVSQVCESPTMSASGVLSFTQQGWEQVLAKVKRAVVYLDAACAESLHWGCGSTRLLEAVGGPDCHLREFEPDAIGGGAKQPKAVFVLSCLLKGRTVEILRDIICRSHFQYCVVVTTVSHAVHLTANHVPAAAAAEMEGQQPVFEQLEEKLCEWMGNMNYTAEVFHVPLLLAPVAPHFALTPAFASLFPLLPQDVHLLNSARPDKRKLGSLGDVDSTTLTPELLLQIRCLVSGLSSLCEHLGVREECFAVGSLSQVIAADLANYAPAKNRKKTAAGRASVVFVDRTLDLTGAVGHHGDNLVEKIISALPQLPGHTNDVMVNMIALTALHTEEENYNVVAPGCLSQSSDTTAKALWEALLNTKHKEAVMEVRRHLVEAASRENLPIKMSMGRVTPGQLMSYIQLFKNNLKALMNHCGLLQLGLATAQTLKHPQTAKWDNFLAFERLLLQSIGESAMSVVLNQLLPMIKPVTQRTNEDYSPEELLILLIYIYSVTGELTVDKDLCEAEEKVKKALAQVFCEESGLSPLLQKITGH

SEQ ID NO: 845406 - protein, 492 aa, Homo sapiens
IRERVRGRPRVLWRLSKSPGAQFPEAVSSERSSCTVVSQVCESPTMSASGVLSFTQQGWEQVLAKVKRAVVYLDAACAESLHWGCGSTRLLEAVGGPDCHLREFEPDAIGGGAKQPKAVFVLSCLLKGRTVEILRDIICRSHFQYCVVVTTVSHAVHLTANHVPAAAAAEMEGQQPVFEQLEEKLCEWMGNMNYTAEVFHVPLLLAPVAPHFALTPAFASLFPLLPQDVHLLNSARPDKRKLGSLGDVDSTTLTPELLLQIRCLVSGLSSLCEHLGVREECFAVGSLSQVIAADLANYAPAKNRKKTAAGRASVVFVDRTLDLTGAVGHHGDNLVEKIISALPQLPGHTNDVMVNMIALTALHTEEENYNVVAPGCLSQSSDTTAKALWEALLNTKHKEAVMEVRRHLVEAASRENLPIKMSMGRVTPGQLMSYIQLFKNNLKALMNHCGLLQLGLATAQTLKHPQTAKWDNFLAFERLLLQVCCYGNLVGS

SEQ ID NO: 845407 - protein, 729 aa, Homo sapiens; identical to SEQ ID NO: 845403

SEQ ID NO: 845408 - protein, 415 aa, Homo sapiens
IRERVRGRPRVLWRLSKSPGAQFPEAVSSERSSCTVVSQVCESPTMSASGVLSFTQQGWEQVLAKVKRAVVYLDAACAESLHWGCGSTRLLEAVGGPDCHLREFEPDAIGGGAKQPKAVFVLSCLLKGRTVEILRDIICRSHFQYCVVVTTVSHAVHLTANHVPAAAAAEMEGQQPVFEQLEEKLCEWMGNMNYTAEVFHVPLLLAPVAPHFALTPAFASLFPLLPQDVHLLNSARPDKRKLGSLGDVDSTTLTPELLLQIRCLVSGLSSLCEHLGVREECFAVGSLSQVIAADLANYAPAKNRKKTAAGRASVVFVDRTLDLTGAVGHHGDNLVEKIISALPQLVSRPHPSDYPLLILFVVGGVTVSEVKMVKDLVASLKPGTQVIVLSTRLLKPLNIPELLFATDRLHPDLGF

SEQ ID NO: 845409 - protein, 108 aa, Homo sapiens [sequence omitted]

SEQ ID NO: 845410 - protein, 1522 aa, Homo sapiens
MSVRLPQSIDRLSSLSSLGDSAPERKSPSHHRQPSDASETTGLVQRCVIIQKDQHGFGFTVSGDRIVLVQSVRPGGAAMKAGVKEGDRIIKVNGTMVTNSSHLEVVKLIKSGAYVALTLLGSSPSSMGISGLQQDPSPAGAPRITSVIPSPPPPPPLPPPQRITGPKPLQDPEVQKHATQILRNMLRQEEKELQDILPLYGDTSQRPSEGRLSLDSQEGDSGLDSGTERFPSLSESLMNRNSVLSDPGLDSPRTSPVIMARVAQHHRRQGSDAAVPSTGDQGVDQSPKPLIIGPEEDYDPGYFNNESDIIFQDLEKLKSRPAHLGVFLRYIFSQADPSPLLFYLCAEVYQQASPKDSRSLGKDIWNIFLEKNAPLRVKIPEMLQAEIDSRLRNSEDARGVLCEAQEAAMPEIQEQIHDYRTKRTLGLGSLYGENDLLDLDGDPLRERQVAEKQLAALGDILSKYEEDRSAPMDFALNTYMSHAGIRLREARPSNTAEKAQSAPDKDKWLPFFPKTKKSSNSKKEKDALEDKKRNPILKYIGKPKSSSQSTFHIPLSPVEVKPGNVRNIIQHFENNQQYDAPEPGTQRLSTGSFPEDLLESDSSRSEIRLGRSESLKGREEMKRSRKAENVPRSRSDVDMDAAAEATRLHQSASSSTSSLSTRSLENPTPPFTPKMGRRSIESPSLGFCTDTLLPHLLEDDLGQLSDLEPEPDAQNWQHTVGKDVVAGLTQREIDRQEVINELFVTEASHLRTLRVLDLIFYQRMKKENLMPREELARLFPNLPELIEIHNSWCEAMKKLREEGPIIKEISDLMLARFDGPAREELQQVAAQFCSYQSIALELIKTKQRKESRFQLFMQEAESHPQCRRLQLRDLIISEMQRLTKYPLLLESIIKHTEGGTSEHEKLCRARDQCREILKYVNEAVKQTENRHRLEGYQKRLDATALERASNPLAAEFKSLDLTTRKMIHEGPLTWRISKDKTLDLHVLLLEDLLVLLQKQDEKLLLKCHSKTAVGSSDSKQTFSPVLKLNAVLIRSVATDKRAFFIICTSKLGPPQIYELVALTSSDKNTWMELLEEAVRNATRHPGAAPMPVHPPPPGPREPAQQGPTPSRVELDDSDVFHGEPEPEELPGGTGSQQRVQGKHQVLLEDPEQEGSAEEEELGVLPCPSTSLDGENRGIRTRNPIHLAFPGPLFMEGLADSALEDVENLRHLILWSLLPGHTMETQAAQEPEDDLTPTPSVISVTSHPWDPGSPGQAPPGGEGDNTQLAGLEGERPEQEDMGLCSLEHLPPRTRNSGIWESPELDRNLAEDASSTEAAGGYKVVRKAEVAGSKVVPALPESGQSEPGPPEVEGGTKATGNCFYVSMPSGPPDSSTDHSEAPMSPPQPDSLPAGQTEPQPQLQGGNDDPRRPSRSPPSLALRDVGMIFHTIEQLTLKLNRLKDMELAHRELLKSLGGESSGGTTPVGSFHTEAARWTDGSLSPPAKEPLASDSRNSHELGPCPEDGSDAPLEDSTADAAASPGP

SEQ ID NO: 845411 - protein, 1869 aa, Homo sapiens
MSVRLPQSIDRLSSLSSLGDSAPERKSPSHHRQPSDASETTGLVQRCVIIQKDQHGFGFTVSGDRIVLVQSVRPGGAAMKAGVKEGDRIIKVNGTMVTNSSHLEVVKLIKSGAYVALTLLGSSPSSMGISGLQQDPSPAGAPRITSVIPSPPPPPPLPPPQRITGPKPLQDPEVQKHATQILRNMLRQEEKELQRICEVYSRNPASLLEEQIEGARRRVTQLQLKIQQETGGSVDILPLYGDTSQRPSEGRLSLDSQEGDSGLDSGTERFPSLSESLMNRNSVLSDPGLDSPRTSPVIMARVAQHHRRQGSDAAVPSTGDQGVDQSPKPLIIGPEEDYDPGYFNNESDIIFQDLEKLKSRPAHLGVFLRYIFSQADPSPLLFYLCAEVYQQASPKDSRSLGKDIWNIFLEKNAPLRVKIPEMLQAEIDSRLRNSEDARGVLCEAQEAAMPEIQEQIHDYRTKRTLGLGSLYGENDLLDLDGDPLRERQVAEKQLAALGDILSKYEEDRSAPMDFALNTYMSHAGIRLREARPSNTAEKAQSAPDKDKWLPFFPKTKKSSNSKKEKDALEDKKRNPILKYIGKPKSSSQSTFHIPLSPVEVKPGNVRNIIQHFENNQQYDAPEPGTQRLSTGSFPEDLLESDSSRSEIRLGRSESLKGREEMKRSRKAENVPRSRSDVDMDAAAEATRLHQSASSSTSSLSTRSLENPTPPFTPKMGRRSIESPSLGFCTDTLLPHLLEDDLGQLSDLEPEPDAQNWQHTVGKDVVAGLTQREIDRQEVINELFVTEASHLRTLRVLDLIFYQRMKKENLMPREELARLFPNLPELIEIHNSWCEAMKKLREEGPIIKEISDLMLARFDGPAREELQQVAAQFCSYQSIALELIKTKQRKESRFQLFMQEAESHPQCRRLQLRDLIISEMQRLTKYPLLLESIIKHTEGGTSEHEKLCRARDQCREILKYVNEAVKQTENRHRLEGYQKRLDATALERASNPLAAEFKSLDLTTRKMIHEGPLTWRISKDKTLDLHVLLLEDLLVLLQKQDEKLLLKCHSKTAVGSSDSKQTFSPVLKLNAVLIRSVATDKRAFFIICTSKLGPPQIYELVALTSSDKNTWMELLEEAVRNATRHPGAAPMPVHPPPPGPREPAQQGPTPSRVELDDSDVFHGEPEPEELPGGTGSQQRVQGKHQVLLEDPEQEGSAEEEELGVLPCPSTSLDGENRGIRTRNPIHLAFPGPLFMEGLADSALEDVENLRHLILWSLLPGHTMETQAAQEPEDDLTPTPSVISVTSHPWDPGSPGQAPPGGEGDNTQLAGLEGERPEQEDMGLCSLEHLPPRTRNSGIWESPELDRNLAEDASSTEAAGGYKVVRKAEVAGSKVVPALPESGQSEPGPPEVEGGTKATGNNFLLGAKDRPRLECGTCEGRVGPLPMVTHTPTSSLSCLEWGGGRSGSKDGEIWFYRLAVHPALRSHLSRLLFRMAGINACVQLWEGQGSLAWGWGPSVLHLICKQPLPHLSRRSSVTVEMAERASQIPRWFSVLPACQEPSTSFLQLSLTPLGWVKGPPEDRGMDGRGAGQGCSSSRAGVRQGKRAAACSFQKSLKPAHNLFTQGGGATPISPNETLQLCHFSLEFIAQHLPQLGARLSKCHLEGLGSRAFRGLADSEQGPRSLSLSGEDCLACSVRWLGNPTGTGGELRLLCLPPDLILFTVGTGNCFYVSMPSGPPDSSTDHSEAPMSPPQPDSLPAGQTEPQPQLQGGNDDPRRPSRSPPSLALRDVGMIFHTIEQLTLKLNRLKDMELAHRELLKSLGGESSGGTTPVGSFHTEAARWTDGSLSPPAKEPLASDSRNSHELGPCPEDGSDAPLEDSTADAAASPGP

SEQ ID NO: 845412 - protein, 994 aa, Homo sapiens
SVPREDKRREVLALTKEVILLLADPLCCLKRREDKKRNPILKYIGKPKSSSQSTFHIPLSPVEVKPGNVRNIIQHFENNQQYDAPEPGTQRLSTGSFPEDLLESDSSRSEIRLGRSESLKGREEMKRSRKAENVPRSRSDVDMDAAAEATRLHQSASSSTSSLSTRSLENPTPPFTPKMGRRSIESPSLGFCTDTLLPHLLEDDLGQLSDLEPEPDAQNWQHTVGKDVVAGLTQREIDRQEVINELFVTEASHLRTLRVLDLIFYQRMKKENLMPREELARLFPNLPELIEIHNSWCEAMKKLREEGPIIKEISDLMLARFDGPAREELQQVAAQFCSYQSIALELIKTKQRKESRFQLFMQEAESHPQCRRLQLRDLIISEMQRLTKYPLLLESIIKHTEGGTSEHEKLCRARDQCREILKYVNEAVKQTENRHRLEGYQKRLDATALERASNPLAAEFKSLDLTTRKMIHEGPLTWRISKDKTLDLHVLLLEDLLVLLQKQDEKLLLKCHSKTAVGSSDSKQTFSPVLKLNAVLIRSVATDKRAFFIICTSKLGPPQIYELVALTSSDKNTWMELLEEAVRNATRHPGAAPMPVHPPPPGPREPAQQGPTPSRVELDDSDVFHGEPEPEELPGGTGSQQRVQGKHQVLLEDPEQEGSAEEEELGVLPCPSTSLDGENRGIRTRNPIHLAFPGPLFMEGLADSALEDVENLRHLILWSLLPGHTMETQAAQEPEDDLTPTPSVISVTSHPWDPGSPGQAPPGGEGDNTQLAGLEGERPEQEDMGLCSLEHLPPRTRNSGIWESPELDRNLAEDASSTEAAGGYKVVRKGNCFYVSMPSGPPDSSTDHSEAPMSPPQPDSLPAGQTEPQPQLQGGNDDPRRPSRSPPSLALRDVGMIFHTIEQLTLKLNRLKDMELAHRELLKSLGGESSGGTTPVGSFHTEAARWTDGSLSPPAKEPLASDSRNSHELGPCPEDGSDAPLEDSTADAAASPGP

SEQ ID NO: 845413 - protein, 526 aa, Homo sapiens
MGVAVEDDIRGPGISSVPYVSGFQVVLKIHICLVLHSPSALRVRALSPTLSPWPRLQSHLPSLVQTLLPSFPHTDKRAFFIICTSKLGPPQIYELVALTSSDKNTWMELLEEAVRNATRHPGAAPMPVHPPPPGPREPAQQGPTPSRVELDDSDVFHGEPEPEELPGGTGSQQRVQGKHQVLLEDPEQEGSAEEEELGVLPCPSTSLDGENRGIRTRNPIHLAFPGPLFMEGLADSALEDVENLRHLILWSLLPGHTMETQAAQEPEDDLTPTPSVISVTSHPWDPGSPGQAPPGGEGDNTQLAGLEGERPEQEDMGLCSLEHLPPRTRNSGIWESPELDRNLAEDASSTEAAGGYKVVRKGNCFYVSMPSGPPDSSTDHSEAPMSPPQPDSLPAGQTEPQPQLQGGNDDPRRPSRSPPSLALRDVGMIFHTIEQLTLKLNRLKDMELAHRELLKSLGGESSGGTTPVGSFHTEAARWTDGSLSPPAKEPLASDSRNSHELGPCPEDGSDAPLEDSTADAAASPGP

SEQ ID NO: 845414 - protein, 158 aa, Homo sapiens
MPSGPPDSSTDHSEAPMSPPQPDSLPAGQTEPQPQLQGGNDDPRRPSRSPPSLALRDVGMIFHTIEQLTLKLNRLKDMELAHRELLKSLGGESSGGTTPVGSFHTEAARWTDGSLSPPAKEPLASDSRNSHELGPCPEDGSDAPLEDSTADAAASPGP

SEQ ID NO: 845415 - protein, 1561 aa, Homo sapiens
MSVRLPQSIDRLSSLSSLGDSAPERKSPSHHRQPSDASETTGLVQRCVIIQKDQHGFGFTVSGDRIVLVQSVRPGGAAMKAGVKEGDRIIKVNGTMVTNSSHLEVVKLIKSGAYVALTLLGSSPSSMGISGLQQDPSPAGAPRITSVIPSPPPPPPLPPPQRITGPKPLQDPEVQKHATQILRNMLRQEEKELQRICEVYSRNPASLLEEQIEGARRRVTQLQLKIQQETGGSVDILPLYGDTSQRPSEGRLSLDSQEGDSGLDSGTERFPSLSESLMNRNSVLSDPGLDSPRTSPVIMARVAQHHRRQGSDAAVPSTGDQGVDQSPKPLIIGPEEDYDPGYFNNESDIIFQDLEKLKSRPAHLGVFLRYIFSQADPSPLLFYLCAEVYQQASPKDSRSLGKDIWNIFLEKNAPLRVKIPEMLQAEIDSRLRNSEDARGVLCEAQEAAMPEIQEQIHDYRTKRTLGLGSLYGENDLLDLDGDPLRERQVAEKQLAALGDILSKYEEDRSAPMDFALNTYMSHAGIRLREARPSNTAEKAQSAPDKDKWLPFFPKTKKSSNSKKEKDALEDKKRNPILKYIGKPKSSSQSTFHIPLSPVEVKPGNVRNIIQHFENNQQYDAPEPGTQRLSTGSFPEDLLESDSSRSEIRLGRSESLKGREEMKRSRKAENVPRSRSDVDMDAAAEATRLHQSASSSTSSLSTRSLENPTPPFTPKMGRRSIESPSLGFCTDTLLPHLLEDDLGQLSDLEPEPDAQNWQHTVGKDVVAGLTQREIDRQEVINELFVTEASHLRTLRVLDLIFYQRMKKENLMPREELARLFPNLPELIEIHNSWCEAMKKLREEGPIIKEISDLMLARFDGPAREELQQVAAQFCSYQSIALELIKTKQRKESRFQLFMQEAESHPQCRRLQLRDLIISEMQRLTKYPLLLESIIKHTEGGTSEHEKLCRARDQCREILKYVNEAVKQTENRHRLEGYQKRLDATALERASNPLAAEFKSLDLTTRKMIHEGPLTWRISKDKTLDLHVLLLEDLLVLLQKQDEKLLLKCHSKTAVGSSDSKQTFSPVLKLNAVLIRSVATDKRAFFIICTSKLGPPQIYELVALTSSDKNTWMELLEEAVRNATRHPGAAPMPVHPPPPGPREPAQQGPTPSRVELDDSDVFHGEPEPEELPGGTGSQQRVQGKHQVLLEDPEQEGSAEEEELGVLPCPSTSLDGENRGIRTRNPIHLAFPGPLFMEGLADSALEDVENLRHLILWSLLPGHTMETQAAQEPEDDLTPTPSVISVTSHPWDPGSPGQAPPGGEGDNTQLAGLEGERPEQEDMGLCSLEHLPPRTRNSGIWESPELDRNLAEDASSTEAAGGYKVVRKGNCFYVSMPSGPPDSSTDHSEAPMSPPQPDSLPAGQTEPQPQLQGGNDDPRRPSRSPPSLALRDVGMIFHTIEQLTLKLNRLKDMELAHRELLKSLGGESSGGTTPVGSFHTEAARWTDGSLSPPAKEPLASDSRNSHELGPCPEDGSDAPLEDSTLAAKLLPPSLDFSSSQDGDHGGFLPHLCPPLPHPVPVENQ

SEQ ID NO: 845416 - protein, 1530 aa, Homo sapiens
MSVRLPQSIDRLSSLSSLGDSAPERKSPSHHRQPSDASETTGLVQRCVIIQKDQHGFGFTVSGDRIVLVQSVRPGGAAMKAGVKEGDRIIKVNGTMVTNSSHLEVVKLIKSGAYVALTLLGSSPSSMGISGLQQDPSPAGAPRITSVIPSPPPPPPLPPPQRITGPKPLQDPEVQKHATQILRNMLRQEEKELQRICEVYSRNPASLLEEQIEGARRRVTQLQLKIQQETGGSVDILPLYGDTSQRPSEGRLSLDSQEGDSGLDSGTERFPSLSESLMNRNSVLSDPGLDSPRTSPVIMARVAQHHRRQGSDAAVPSTGDQGVDQSPKPLIIGPEEDYDPGYFNNESDIIFQDLEKLKSRPAHLGVFLRYIFSQADPSPLLFYLCAEVYQQASPKDSRSLGKDIWNIFLEKNAPLRVKIPEMLQAEIDSRLRNSEDARGVLCEAQEAAMPEIQEQIHDYRTKRTLGLGSLYGENDLLDLDGDPLRERQVAEKQLAALGDILSKYEEDRSAPMDFALNTYMSHAGIRLREARPSNTAEKAQSAPDKDKWLPFFPKTKKSSNSKKEKDALEDKKRNPILKYIGKPKSSSQSTFHIPLSPVEVKPGNVRNIIQHFENNQQYDAPEPGTQRLSTGSFPEDLLESDSSRSEIRLGRSESLKGREEMKRSRKAENVPRSRSDVDMDAAAEATRLHQSASSSTSSLSTRSLENPTPPFTPKMGRRSIESPSLGFCTDTLLPHLLEDDLGQLSDLEPEPDAQNWQHTVGKDVVAGLTQREIDRQEVINELFVTEASHLRTLRVLDLIFYQRMKKENLMPREELARLFPNLPELIEIHNSWCEAMKKLREEGPIIKEISDLMLARFDGPAREELQQVAAQFCSYQSIALELIKTKQRKESRFQLFMQEAESHPQCRRLQLRDLIISEMQRLTKYPLLLESIIKHTEGGTSEHEKLCRARDQCREILKYVNEAVKQTENRHRLEGYQKRLDATALERASNPLAAEFKSLDLTTRKMIHEGPLTWRISKDKTLDLHVLLLEDLLVLLQKQDEKLLLKCHSKTAVGSSDSKQTFSPVLKLNAVLIRSVATDKRAFFIICTSKLGPPQIYELVALTSSDKNTWMELLEEAVRNATRHPGAAPMPVHPPPPGPREPAQQGPTPSRVELDDSDVFHGEPEPEELPGGTGSQQRVQGKHQVLLEDPEQEGSAEEEELGVLPCPSTSLDGENRGIRTRNPIHLAFPGPLFMEGLADSALEDVENLRHLILWSLLPGHTMETQAAQEPEDDLTPTPSVISVTSHPWDPGSPGQAPPGGEGDNTQLAGLEGERPEQEDMGLCSLEHLPPRTRNSGIWESPELDRNLAEDASSTEAAGGYKVVRKGNCFYVSMPSGPPDSSTDHSEAPMSPPQPDSLPAGQTEPQPQLQGGNDDPRRPSRSPPSLALRDVGMIFHTIEQLTLKLNRLKDMELAHRELLKSLGGESSGGTTPVGSFHTEAARWTDGSLSPPAKEPLASDSRNSHELGPCPEDGSDAPLEDSTADAAASPGP

SEQ ID NO: 845417 - protein, 1249 aa, Homo sapiens
MSVRLPQSIDRLSSLSSLGDSAPERKSPSHHRQPSDASETTGLVQRCVIIQKDQHGFGFTVSGDRIVLVQSVRPGGAAMKAGVKEGDRIIKVNGTMVTNSSHLEVVKLIKSGAYVALTLLGSSPSSMGISGLQQDPSPAGAPRITSVIPSPPPPPPLPPPQRITGPKPLQDPEVQKHATQILRNMLRQEEKELQRICEVYSRNPASLLEEQIEGARRRVTQLQLKIQQETGGSVDILPLYGDTSQRPSEGRLSLDSQEGDSGLDSGTERFPSLSESLMNRNSVLSDPGLDSPRTSPVIMARVAQHHRRQGSDAAVPSTGDQGVDQSPKPLIIGPEEDYDPGYFNNESDIIFQDLEKLKSRPAHLGVFLRYIFSQADPSPLLFYLCAEVYQQASPKDSRSLGKDIWNIFLEKNAPLRVKIPEMLQAEIDSRLRNSEDARGVLCEAQEAAMPEIQEQIHDYRTKRTLGLGSLYGENDLLDLDGDPLRERQVAEKQLAALGDILSKYEEDRSAPMDFALNTYMSHAGIRLREARPSNTAEKAQSAPDKDKWLPFFPKTKKSSNSKKEKDALEDKKRNPILKYIGKPKSSSQSTFHIPLSPVEVKPGNVRNIIQHFENNQQYDAPEPGTQRLSTGSFPEDLLESDSSRSEIRLGRSESLKGREEMKRSRKAENVPRSRSDVDMDAAAEATRLHQSASSSTSSLSTRSLENPTPPFTPKMGRRSIESPSLGFCTDTLLPHLLEDDLGQLSDLEPEPDAQNWQHTVGKDVVAGLTQREIDRQEVINELFVTEASHLRTLRVLDLIFYQRMKKENLMPREELARLFPNLPELIEIHNSWCEAMKKLREEGPIIKEISDLMLARFDGPAREELQQVAAQFCSYQSIALELIKTKQRKESRFQLFMQEAESHPQCRRLQLRDLIISEMQRLTKYPLLLESIIKHTEGGTSEHEKLCRARDQCREILKYVNEAVKQTENRHRLEGYQKRLDATALERASNPLAAEFKSLDLTTRKMIHEGPLTWRISKDKTLDLHVLLLEDLLVLLQKQDEKLLLKCHSKTAVGSSDSKQTFSPVLKLNAVLIRSVATDKRAFFIICTSKLGPPQIYELVALTSSDKNTWMELLEEAVRNATRHPGAAPMPVHPPPPGPREPAQQGPTPSRVELDDSDVFHGEPEPEELPGGGQQQEEEQQQEVLLLLLGVGEAGPVWLSETKRDGDGGLARGGGWEESCPARWRSKPMPVTGVSTGAREDGLCSGELI

SEQ ID NO: 845418 - protein, 704 aa, Homo sapiens
MSVRLPQSIDRLSSLSSLGDSAPERKSPSHHRQPSDASETTGLVQRCVIIQKDQHGFGFTVSGDRIVLVQSVRPGGAAMKAGVKEGDRIIKVNGTMVTNSSHLEVVKLIKSGAYVALTLLGSSPSSMGISGLQQDPSPAGAPRITSVIPSPPPPPPLPPPQRITGPKPLQDPEVQKHATQILRNMLRQEEKELQRICEVYSRNPASLLEEQIEGARRRVTQLQLKIQQETGGSVDILPLYGDTSQRPSEGRLSLDSQEGDSGLDSGTERFPSLSESLMNRNSVLSDPGLDSPRTSPVIMARVAQHHRRQGSDAAVPSTGDQGVDQSPKPLIIGPEEDYDPGYFNNESDIIFQDLEKLKSRPAHLGVFLRYIFSQADPSPLLFYLCAEVYQQASPKDSRSLGKDIWNIFLEKNAPLRVKIPEMLQAEIDSRLRNSEDARGVLCEAQEAAMPEIQEQIHDYRTKRTLGLGSLYGENDLLDLDGDPLRERQVAEKQLAALGDILSKYEEDRSAPMDFALNTYMSHAGIRLREARPSNTAEKAQSAPDKDKWLPFFPKTKKSSNSKKEKDALEDKKRNPILKYIGKPKSSSQSTFHIPLSPVEVKPGNVRNIIQHFENNQQYDAPEPGTQRLSTGSFPEDLLESDSSRSEIRLGRSESLKGREEMKRSRKAENVPRSRSDVDMDAAAEATRLHQSASSSTSSLSTRSL

SEQ ID NO: 845419 - protein, 642 aa, Homo sapiens
MSVRLPQSIDRLSSLSSLGDSAPERKSPSHHRQPSDASETTGLVQRCVIIQKDQHGFGFTVSGDRIVLVQSVRPGGAAMKAGVKEGDRIIKVNGTMVTNSSHLEVVKLIKSGAYVALTLLGSSPSSMGISGLQQDPSPAGAPRITSVIPSPPPPPPLPPPQRITGPKPLQDPEVQKHATQILRNMLRQEEKELQRICEVYSRNPASLLEEQIEGARRRVTQLQLKIQQETGGSVDILPLYGDTSQRPSEGRLSLDSQEGDSGLDSGTERFPSLSESLMNRNSVLSDPGLDSPRTSPVIMARVAQHHRRQGSDAAVPSTGDQGVDQSPKPLIIGPEEDYDPGYFNNESDIIFQDLEKLKSRPAHLGVFLRYIFSQADPSPLLFYLCAEVYQQASPKDSRSLGKDIWNIFLEKNAPLRVKIPEMLQAEIDSRLRNSEDARGVLCEAQEAAMPEIQEQIHDYRTKRTLGLGSLYGENDLLDLDGDPLRERQVAEKQLAALGDILSKYEEDRSAPMDFALNTYMSHAGIRLREARPSNTAEKAQSAPDKDKWLPFFPKTKKSSNSKKEKDALEDKKRNPILKYIGKPKSSSQSTFHIPLSPVEVKPGNVRNIIQHFENNQQYDAPEPGTQRLSTGSFPEDLLESDR

SEQ ID NO: 845420 - protein, 109 aa, Homo sapiens
MALLSEIHFSLSERFWQLSSTPGISICSLPAPDSWCEAMKKLREEGPIIKEISDLMLARVWLQTSPSWQGGDWGRQGLITQGQRIWQRQGSGPRQGFDAWPRVHSASSV

SEQ ID NO: 845421 - protein, 1530 aa, Homo sapiens; identical to SEQ ID NO: 845416

SEQ ID NO: 845422 - protein, 1545 aa, Homo sapiens
MSVRLPQSIDRLSSLSSLGDSAPERKSPSHHRQPSDASETTGLVQRCVIIQKDQHGFGFTVSGDRIVLVQSVRPGGAAMKAGVKEGDRIIKVNGTMVTNSSHLEVVKLIKSGAYVALTLLGSSPSSMGISGLQQDPSPAGAPRITSVIPSPPPPPPLPPPQRITGPKPLQDPEVQKHATQILRNMLRQEEKELQRICEVYSRNPASLLEEQIEGARRRVTQLQLKIQQETGGSVDILPLYGDTSQRPSEGRLSLDSQEGDSGLDSGTERFPSLSESLMNRNSVLSDPGLDSPRTSPVIMARVAQHHRRQGSDAAVPSTGDQGVDQSPKPLIIGPEEDYDPGYFNNESDIIFQDLEKLKSRPAHLGVFLRYIFSQADPSPLLFYLCAEVYQQASPKDSRSLGKDIWNIFLEKNAPLRVKIPEMLQAEIDSRLRNSEDARGVLCEAQEAAMPEIQEQIHDYRTKRTLGLGSLYGENDLLDLDGDPLRERQVAEKQLAALGDILSKYEEDRSAPMDFALNTYMSHAGIRLREARPSNTAEKAQSAPDKDKWLPFFPKTKKSSNSKKEKDALEDKKRNPILKYIGKPKSSSQSTFHIPLSPVEVKPGNVRNIIQHFENNQQYDAPEPGTQRLSTGSFPEDLLESDSSRSEIRLGRSESLKGREEMKRSRKAENVPRSRSDVDMDAAAEATRLHQSASSSTSSLSTRSLENPTPPFTPKMGRRSIESPSLGFCTDTLLPHLLEDDLGQLSDLEPEPDAQNWQHTVGKDVVAGLTQREIDRQEVINELFVTEASHLRTLRVLDLIFYQRMKKENLMPREELARLFPNLPELIEIHNSWCEAMKKLREEGPIIKEISDLMLARFDGPAREELQQVAAQFCSYQSIALELIKTKQRKESRFQLFMQEAESHPQCRRLQLRDLIISEMQRLTKYPLLLESIIKHTEGGTSEHEKLCRARDQCREILKYVNEAVKQTENRHRLEGYQKRLDATALERASNPLAAEFKSLDLTTRKMIHEGPLTWRISKDKTLDLHVLLLEDLLVLLQKQDEKLLLKCHSKTAVGSSDSKQTFSPVLKLNAVLIRSVATDKRAFFIICTSKLGPPQIYELVALTSSDKNTWMELLEEAVRNATRHPGAAPMPVHPPPPGPREPAQQGPTPSRVELDDSDVFHGEPEPEELPGGTGSQQRVQGKHQVLLEDPEQEGSAEEEELGVLPCPSTSLDGENRGIRTRNPIHLAFPGPLFMEGLADSALEDVENLRHLILWSLLPGHTMETQAAQEPEDDLTPTPSVISVTSHPWDPGSPGQAPPGGEGDNTQLAGLEGERPEQEDMGLCSLEHLPPRTRNSGIWESPELDRNLAEDASSTEAAGGYKVVRKSEPGPPEVEGGTKATGNCFYVSMPSGPPDSSTDHSEAPMSPPQPDSLPAGQTEPQPQLQGGNDDPRRPSRSPPSLALRDVGMIFHTIEQLTLKLNRLKDMELAHRELLKSLGGESSGGTTPVGSFHTEAARWTDGSLSPPAKEPLASDSRNSHELGPCPEDGSDAPLEDSTADAAASPGP

SEQ ID NO: 845423 - protein, 517 aa, Homo sapiens
YRIRSPGTLCHFSKELLIPVFCSSNKDEKLLLKCHSKTAVGSSDSKQTFSPVLKLNAVLIRSVATDKRAFFIICTSKLGPPQIYELVALTSSDKNTWMELLEEAVRNATRHPGAAPMPVHPPPPGPREPAQQGPTPSRVELDDSDVFHGEPEPEELPGGTGSQQRVQGKHQVLLEDPEQEGSAEEEELGVLPCPSTSLDGENRGIRTRNPIHLAFPGPLFMEGLADSALEDVENLRHLILWSLLPGHTMETQAAQEPEDDLTPTPSVISVTSHPWDPGSPGQAPPGGEGDNTQLAGLEGERPEQEDMGLCSLEHLPPRTRNSGIWESPELDRNLAEDASSTEAAGGYKVVRKGNCFYVSMPSGPPDSSTDHSEAPMSPPQPDSLPAGQTEPQPQLQGGNDDPRRPSRSPPSLALRDVGMIFHTIEQLTLKLNRLKDMELAHRELLKSLGGESSGGTTPVGSFHTEAARWTDGSLSPPAKEPLASDSRNSHELGPCPEDGSDAPLEDSTADAAASPGP

SEQ ID NO: 845424 - protein, 120 aa, Homo sapiens
TTKSSASLKEVGGIPTLLPVEEAVRETRIQPRPGGRPACCLVCSSRSQVSVSFPSLSPTLQGLMSPKHADCIRKAPTHHGLPSPHICVYTRTPVCALPSDMQVKGGGFCVNALSSSPLSP

SEQ ID NO: 845425 - protein, 1368 aa, Homo sapiens
MSVRLPQSIDRLSSLSSLGDSAPERKSPSHHRQPSDASETTGLVQRCVIIQKDQHGFGFTVSGDRIVLVQSVRPGGAAMKAGVKEGDRIIKVNGTMVTNSSHLEVVKLIKSGAYVALTLLGSSPSSMGISGLQQDPSPAGAPRITSVIPSPPPPPPLPPPQRITGPKPLQDPEVQKHATQILRNMLRQEEKELQRICEVYSRNPASLLEEQIEGARRRVTQLQLKIQQETGGSVDILPLYGDTSQRPSEGRLSLDSQEGDSGLDSGTERFPSLSESLMNRNSVLSDPGLDSPRTSPVIMARVAQHHRRQGSDAAVPSTGDQGVDQSPKPLIIGPEEDYDPGYFNNESDIIFQDLEKLKSRPAHLGVFLRYIFSQADPSPLLFYLCAEVYQQASPKDSRSLGKDIWNIFLEKNAPLRVKIPEMLQAEIDSRLRNSEDARGVLCEAQEAAMPEIQEQIHDYRTKRTLGLGSLYGENDLLDLDGDPLRERQVAEKQLAALGDILSKYEEDRSAPMDFALNTYMSHAGIRLREARPSNTAEKAQSAPDKDKWLPFFPKTKKSSNSKKEKDALEDKKRNPILKYIGKPKSSSQSTFHIPLSPVEVKPGNVRNIIQHFENNQQYDAPEPGTQRLSTGSFPEDLLESDSSRSEIRLGRSESLKGREEMKRSRKAENVPRSRSDVDMDAAAEATRLHQSASSSTSSLSTRSLENPTPPFTPKMGRRSIESPSLGFCTDTLLPHLLEDDLGQLSDLEPEPDAQNWQHTVGKDVVAGLTQREIDRQEVINELFVTEASHLRTLRVLDLIFYQRMKKENLMPREELARLFPNLPELIEIHNSWCEAMKKLREEGPIIKEISDLMLARFDGPAREELQQVAAQFCSYQSIALELIKTKQRKESRFQLFMQEAESHPQCRRLQLRDLIISEMQRLTKYPLLLESIIKHTEGGTSEHEKLCRARDQCREILKYVNEAVKQTENRHRLEGYQKRLDATALERASNPLAAEFKSLDLTTRKMIHEGPLTWRISKDKTLDLHVLLLEDLLVLLQKQDEKLLLKCHSKTAVGSSDSKQTFSPVLKLNAVLIRSVATDKRAFFIICTSKLGPPQIYELVALTSSDKNTWMELLEEAVRNATRHPGAAPMPVHPPPPGPREPAQQGPTPSRVELDDSDVFHGEPEPEELPGGTGSQQRVQGKHQVLLEDPEQEGSAEEEELGVLPCPSTSLDGENRGIRTRNPIHLAFPGPLFMEGLADSALEDVENLRHLILWSLLPGHTMETQAAQEPEDDLTPTPSVISVTSHPWDPGSPGQAPPGGEGDNTQLAGLEGERPEQEDMGLCSLEHLPPRTRNSGIWESPELDRNLAEDASSTEAAGGYKVVRKEVK

SEQ ID NO: 845426 - protein, 957 aa, Homo sapiens
MSVRLPQSIDRLSSLSSLGDSAPERKSPSHHRQPSDASETTGLVQRCVIIQKDQHGFGFTVSGDRIVLVQSVRPGGAAMKAGVKEGDRIIKVNGTMVTNSSHLEVVKLIKSGAYVALTLLGSSPSSMGISGLQQDPSPAGAPRITSVIPSPPPPPPLPPPQRITGPKPLQDPEVQKHATQILRNMLRQEEKELQRICEVYSRNPASLLEEQIEGARRRVTQLQLKIQQETGGSVDILPLYGDTSQRPSEGRLSLDSQEGDSGLDSGTERFPSLSESLMNRNSVLSDPGLDSPRTSPVIMARVAQHHRRQGSDAAVPSTGDQGVDQSPKPLIIGPEEDYDPGYFNNESDIIFQDLEKLKSRPAHLGVFLRYIFSQADPSPLLFYLCAEVYQQASPKDSRSLGKDIWNIFLEKNAPLRVKIPEMLQAEIDSRLRNSEDARGVLCEAQEAAMPEIQEQIHDYRTKRTLGLGSLYGENDLLDLDGDPLRERQVAEKQLAALGDILSKYEEDRSAPMDFALNTYMSHAGIRLREARPSNTAEKAQSAPDKDKWLPFFPKTKKSSNSKKEKDALEDKKRNPILKYIGKPKSSSQSTFHIPLSPVEVKPGNVRNIIQHFENNQQYDAPEPGTQRLSTGSFPEDLLESDSSRSEIRLGRSESLKGREEMKRSRKAENVPRSRSDVDMDAAAEATRLHQSASSSTSSLSTRSLENPTPPFTPKMGRRSIESPSLGFCTDTLLPHLLEDDLGQLSDLEPEPDAQNWQHTVGKDVVAGLTQREIDRQEVINELFVTEASHLRTLRVLDLIFYQRMKKENLMPREELARLFPNLPELIEIHNSWCEAMKKLREEGPIIKEISDLMLARFDGPAREELQQVAAQFCSYQSIALELIKTKQRKESRFQLFMQEAESHPQCRRLQLRDLIISEMQRLTKYPLLLESIIKHTEGSTWGGAGITGSGPRARPSF

SEQ ID NO: 845427 - protein, 350 aa, Homo sapiens
MSVRLPQSIDRLSSLSSLGDSAPERKSPSHHRQPSDASETTGLVQRCVIIQKDQHGFGFTVSGDRIVLVQSVRPGGAAMKAGVKEGDRIIKVNGTMVTNSSHLEVVKLIKSGAYVALTLLGSSPSSMGISGLQQDPSPAGAPRITSVIPSPPPPPPLPPPQRITGPKPLQDPEVQKHATQILRNMLRQEEKELQRICEVYSRNPASLLEEQIEGARRRVTQLQLKIQQETGGSVDILPLYGDTSQRPSEGRLSLDSQEGDSGLDSGTERFPSLSESLMNRNSVLSDPGLDSPRTSPVIMARVAQHHRRQGSDAAVPSTGDQVSDLEPPCSFPFLRSEIWRHGCYQYIVLD

SEQ ID NO: 845428 - protein, 139 aa, Homo sapiens
MSSCMILCSPCSSHFLLPLSPPPALSPSCSLSLPFPCVLVSPLPGGGGVGAAEVAGSKVVPALPESGQSEPGPPEVEGGTKATGNNFLLGAKDRPRLECGTCEGRVGPLPMVTHTPTSSLSCLEWGGGRSGSKDGEIWF

SEQ ID NO: 845429 - protein, 128 aa, Homo sapiens
PLLFPSFFARLSADSSSSVHDLLVAAMSARVRSRSRGRGDGQEAPDVVAFVAPGESQQEEPPTDNQDIEPGQEREGTPPIEERKVEGDCQEMDLEKTRSERGDGSDVKEKTPPNPKHAKTKEAGDGQP

SEQ ID NO: 845430 - protein, 123 aa, Homo sapiens
STFARLSADSSSSVHDLLVAAMSARVRSRSRGRGDGQEAPDVVAFVAPGESQQEEPPTDNQDIEPGQEREGTPPIEERKVEGDCQEMDLEKTRSERGDGSDVKEKTPPNPKHAKTKEAGDGQP

SEQ ID NO: 845431 - protein, 128 aa, Homo sapiens; identical to SEQ ID NO: 845429

SEQ ID NO: 845432 - protein, 128 aa, Homo sapiens
PLLFPSFFARLSADSSSSVHDLLVAAMSARVRSRSRGRGDGQEAPDVVAFVAPGESQQEEPPTDNQDIEPGQEREGTPPIEERKVEGDCQEMDLEKTRSERGDGSDVKAVTPSYPVHQQARMPTYVLL

SEQ ID NO: 845433 - protein, 128 aa, Homo sapiens; identical to SEQ ID NO: 845429

SEQ ID NO: 845434 - protein, 128 aa, Homo sapiens; identical to SEQ ID NO: 845429

SEQ ID NO: 845435 - protein, 103 aa, Homo sapiens
MTNYSDTWWQGRYLLLGGSCLLGTRTATSGRVGAAAQGVSWLSCGLLRCLWSPSYQEQRHGHAGRGRRGRWCAGRSCLGVGGLGLVCRLKRSLAGKVTSGLVP

SEQ ID NO: 845436 - protein, 121 aa, Homo sapiens
RARGLGCLPSQPACPRWPSPAAKQTVSSGPASPSRWDMSIGSARLPTKAGTDLELGFGTACPNPREPGQGERQARAALSQVPLALSHPGHWGQSGDGNQPGTVWHPPTRPSGSHWPRTRDF

SEQ ID NO: 845437 - protein, 118 aa, Homo sapiens
SLREFGPQAQNSAREILAPFCTLKCKNVAEENTRVLYSLYGVVEHSGTMRSGHYTAYAKARTANSHLSNLVLHGDIPQDFEMESKGQWFHISDTHVQAVPTTKVLNSQAYLLFYERIL

SEQ ID NO: 845438 - protein, 156 aa, Homo sapiens
MGKKRTKGKTVPIDDSSETLEPVCRHIRKGLEQGNLKKALVNVEWNICQDCKTDNKVKDKAEEETEEKPSVWLCLKCGHQGCGRNSQEQHALKHYLTPRSEPHCLVLSLDNWSVWCYVCDNEVQYCSSNQLGQVVDYVRKQASITTPKPAEKDMEI

SEQ ID NO: 845439 - protein, 823 aa, Homo sapiens
MGKKRTKGKTVPIDDSSETLEPVCRHIRKGLEQGNLKKALVNVEWNICQDCKTDNKVKDKAEEETEEKPSVWLCLKCGHQGCGRNSQEQHALKHYLTPRSEPHCLVLSLDNWSVWCYVCDNEVQYCSSNQLGQVVDYVRKQASITTPKPAEKDNGNIELENKKLEKESKNEQEREKKENMAKENPPMNSPCQITVKGLSNLGNTCFFNAVMQNLSQTPVLRELLKEVKMSGTIVKIEPPDLALTEPLEINLEPPGPLTLAMSQFLNEMQETKKGVVTPKELFSQVCKKAVRFKGYQQQDSQELLRYLLDGMRAEEHQRVSKGILKAFGNSTEKLDEELKNKVKDYEKKKSMPSFVDRIFGGELTSMIMCDQCRTVSLVHESFLDLSLPVLDDQSGKKSVNDKNLKKTVEDEDQDSEEEKDNDSYIKERSDIPSGTSKHLQKKAKKQAKKQAKNQRRQQKIQGKVLHLNDICTIDHPEDSEYEAEMSLQGEVNIKSNHISQEGVMHKEYCVNQKDLNGQAKMIESVTDNQKSTEEVDMKNINMDNDLEVLTSSPTRNLNGAYLTEGSNGEVDISNGFKNLNLNAALHPDEINIEILNDSHTPGTKVYEVVNEDPETAFCTLANREVFNTDECSIQHCLYQFTRNEKLRDANKLLCEVCTRRQCNGPKANIKGERKHVYTNAKKQMLISLAPPVLTLHLKRFQQAGFNLRKVNKHIKFPEILDLAPFCTLKCKNVAEENTRVLYSLYGVVEHSGTMRSGHYTAYAKARTANSHLSNLVLHGDIPQDFEMESKGQWFHISDTHVQAVPTTKVLNSQAYLLFYERIL

SEQ ID NO: 845440 - protein, 644 aa, Homo sapiens
MAKENPPMNSPCQITVKGLSNLGNTCFFNAVMQNLSQTPVLRELLKEVKMSGTIVKIEPPDLALTEPLEINLEPPGPLTLAMSQFLNEMQETKKGVVTPKELFSQVCKKAVRFKGYQQQDSQELLRYLLDGMRAEEHQRVSKGILKAFGNSTEKLDEELKNKVKDYEKKKSMPSFVDRIFGGELTSMIMCDQCRTVSLVHESFLDLSLPVLDDQSGKKSVNDKNLKKTVEDEDQDSEEEKDNDSYIKERSDIPSGTSKHLQKKAKKQAKKQAKNQRRQQKIQGKVLHLNDICTIDHPEDSEYEAEMSLQGEVNIKSNHISQEGVMHKEYCVNQKDLNGQAKMIESVTDNQKSTEEVDMKNINMDNDLEVLTSSPTRNLNGAYLTEGSNGEVDISNGFKNLNLNAALHPDEINIEILNDSHTPGTKVYEVVNEDPETAFCTLANREVFNTDECSIQHCLYQFTRNEKLRDANKLLCEVCTRRQCNGPKANIKGERKHVYTNAKKQMLISLAPPVLTLHLKRFQQAGFNLRKVNKHIKFPEILDLAPFCTLKCKNVAEENTRVLYSLYGVVEHSGTMRSGHYTAYAKARTANSHLSNLVLHGDIPQDFEMESKGQWFHISDTHVQAVPTTKVLNSQAYLLFYERIL

SEQ ID NO: 845441 - protein, 408 aa, Homo sapiens
MGKKRTKGKTVPIDDSSETLEPVCRHIRKGLEQGNLKKALVNVEWNICQDCKTDNKVKDKAEEETEEKPSVWLCLKCGHQGCGRNSQEQHALKHYLTPRSEPHCLVLSLDNWSVWCYVCDNEVQYCSSNQLGQVVDYVRKQASITTPKPAEKDNGNIELENKKLEKESKNEQEREKKENMAKENPPMNSPCQITVKGLSNLGNTCFFNAVMQNLSQTPVLRELLKEVKMSGTIVKIEPPDLALTEPLEINLEPPGPLTLAMSQFLNEMQETKKGVVTPKELFSQVCKKAVRFKGYQQQDSQELLRYLLDGMRAEEHQRVSKGILKAFGNSTEKLDEELKNKVKDYEKKKSMPSFVDRIFGGELTSMIMCDQCRTVSLVHESFLDLSLPVLDDQVRLLNLFYSSRFFFL

SEQ ID NO: 845442 - protein, 474 aa, Homo sapiens
MGKKRTKGKTVPIDDSSETLEPVCRHIRKGLEQGNLKKALVNVEWNICQDCKTDNKVKDKAEEETEEKPSVWLCLKCGHQGCGRNSQEQHALKHYLTPRSEPHCLVLSLDNWSVWCYVCDNEVQYCSSNQLGQVVDYVRKQASITTPKPAEKDNGNIELENKKLEKESKNEQEREKKENMAKENPPMNSPCQITVKGLSNLGNTCFFNAVMQNLSQTPVLRELLKEVKMSGTIVKIEPPDLALTEPLEINLEPPGPLTLAMSQFLNEMQETKKGVVTPKELFSQVCKKAVRFKGYQQQDSQELLRYLLDGMRAEEHQRVSKGILKAFGNSTEKLDEELKNKVKDYEKKKSMPSFVDRIFGGELTSMIMCDQCRTVSLVHESFLDLSLPVLDDQSGKKSVNDKNLKKTVEDEDQDSEEEKDNDSYIKERSDIPSGTSKHLQKKAKKQAKKQAKPAEKDNGNIELENKKLEKESKY

SEQ ID NO: 845443 - protein, 823 aa, Homo sapiens; identical to SEQ ID NO: 845439

SEQ ID NO: 845444 - protein, 46 aa, Homo sapiens
MGKKRTKGKTVPIDDSSETLGNLCADTLRTRDLDTKVHLDTAHGFS

SEQ ID NO: 845445 - protein, 823 aa, Homo sapiens; identical to SEQ ID NO: 845439

SEQ ID NO: 845446 - protein, 823 aa, Homo sapiens; identical to SEQ ID NO: 845439

SEQ ID NO: 845447 - protein, 143 aa, Homo sapiens [sequence omitted]

SEQ ID NO: 845448 - protein, 66 aa, Homo sapiens
HGSSIWWGSVLHYPMVEGQRAEGRRGKAEEKDSMGDSKKMEAKTYPFIRNPLPHMFVNNAIRNKSV

SEQ ID NO: 845449 - protein, 107 aa, Homo sapiens
MYLLQSTDLKRICKTIVEAASDDERRKAFAPIQEMMTFVQFANDECDYGMGLELGMDLFCYGSHYFHKVAGQLLPLAYNLLKRNLFAEIMKDHLANRRKENIDQFAA

SEQ ID NO: 845450 - protein, 149 aa, Homo sapiens
FGWRCSCRMVGGGWKRRPGAGAGPQILPERLWGLRRWLWMTARVPGGSAFHSCSDYEACCVSGVCGLLRGPCPGRCFALCRGLDQCEKTVDVKKSKFCEADVSSDLRKEVENHYTLSLPEDFYHFWKFCEELDSEKPAEIHFLQALDFN

SEQ ID NO: 845451 - protein, 376 aa, Homo sapiens
MADYWKSQPKKFCDYCKCWIADNRPSVEFHERGKNHKENVAKRISEIKQKSLDKAKEEEKASKEFAAMEAAALKAYQEDLKRLGLESEILEPSITPVTSTIPPTSTSNQQKEKKEKKKRKKDPSKGRWVEGITSEGYHYYYDLISGASQWEKPEGFQGDLKKTAVKTVWVEGLSEDGFTYYYNTETGESRWEKPDDFIPHTSDLPSSKVNENSLGTLDESKSSDSHSDSDGEQEAEEGGVSTETEKPKIKFKEKNKNSDGGSDPETQKEKSIQKQNSLGSNEEKSKTLKKSNPYGEWQEIKQEVESHEEVDLELPSTENEYVSTSEADGGGEPKVVFKEKTVTSLGVMADGVAPVFKKRRTENGKSRNLRQRGDDQ

SEQ ID NO: 845452 - protein, 386 aa, Homo sapiens
GRNVTPLNALGADYWKSQPKKFCDYCKCWIADNRPSVEFHERGKNHKENVAKRISEIKQKSLDKAKEEEKASKEFAAMEAAALKAYQEDLKRLGLESEILEPSITPVTSTIPPTSTSNQQKEKKEKKKRKKDPSKGRWVEGITSEGYHYYYDLISGASQWEKPEGFQGDLKKTAVKTVWVEGLSEDGFTYYYNTETGESRWEKPDDFIPHTSDLPSSKVNENSLGTLDESKSSDSHSDSDGEQEAEEGGVSTETEKPKIKFKEKNKNSDGGSDPETQKEKSIQKQNSLGSNEEKSKTLKKSNPYGEWQEIKQEVESHEEVDLELPSTENEYVSTSEADGGGEPKVVFKEKTVTSLGVMADGVAPVFKKRRTENGKSRNLRQRGDDQ

SEQ ID NO: 845453 - protein, 167 aa, Homo sapiens
MADYWKSQPKKFCDYCKCWIADNRPSVEFHERGKNHKENVAKRISEIKQKSLDKAKEEEKASKEFAAMEAAALKAYQEDLKRLGLESEILEPSITPVTSTIPPTSTSNQQKEKKEKKKRKKDPSKGRWVEGITSEGYHYYYDLISGASQWEKPEGFQGDLKKVIEAY

SEQ ID NO: 845454 - protein, 198 aa, Homo sapiens
MADYWKSQPKKFCDYCKCWIADNRPSVEFHERGKNHKENVAKRISEIKQKSLDKAKEEEKASKEFAAMEAAALKAYQEDLKRLGLESEILEPSITPVTSTIPPTSTSNQQKEKKEKKKRKKDPSKGRWVEGITSEGYHYYYDLISGASQWQKPEGFHGDFTTALKTGWLKVYAHDAFTYPIPLLRCNPLHARALIPTS

SEQ ID NO: 845455 - protein, 376 aa, Homo sapiens; identical to SEQ ID NO: 845451

SEQ ID NO: 845456 - protein, 159 aa, Homo sapiens
MADYWKSQPKKFCDYCKCWIADNRPSVEFHERGKNHKENVAKRISEIKQKSLDKAKEEEKASKEFAAMEAAALKAYQEDLKRLGLESEILEPSITPVTSTIPPTSTSNQQKEKKEKKKRKKDPSKGRWEQMRPSGKCLLFLVPPHCLFHPCTDLGGSDS

SEQ ID NO: 845457 - protein, 150 aa, Homo sapiens
GRQNVRPGPRRAEAAVVTCGGPVTQSRGAGTRLAEPAGERRPQARARRRDSTYLPGFGSGSAGRGAAGALPPSFLLPSPPPRGATHNTRRKRKPRRGSCQWKLGCRRAAAAGSSGACGRRRRRAGDEKQQGESRARRDPEGQVAEMLASR

SEQ ID NO: 845458 - protein, 150 aa, Homo sapiens; identical to SEQ ID NO: 845457

SEQ ID NO: 845459 - protein, 150 aa, Homo sapiens; identical to SEQ ID NO: 845457

SEQ ID NO: 845460 - protein, 150 aa, Homo sapiens; identical to SEQ ID NO: 845457

SEQ ID NO: 845461 - protein, 71 aa, Homo sapiens
ERIEREIPDRETTEYINDTWPCLAKFTEIIYLSRWSGSRGRAGTASLLLTFVSLAPSHGVRPQHVRWINAC

SEQ ID NO: 845462 - protein, 150 aa, Homo sapiens; identical to SEQ ID NO: 845457

SEQ ID NO: 845463 - protein, 150 aa, Homo sapiens; identical to SEQ ID NO: 845457

SEQ ID NO: 845464 - protein, 150 aa, Homo sapiens; identical to SEQ ID NO: 845457

SEQ ID NO: 845465 - protein, 150 aa, Homo sapiens; identical to SEQ ID NO: 845457

SEQ ID NO: 845466 - protein, 150 aa, Homo sapiens; identical to SEQ ID NO: 845457

SEQ ID NO: 845467 - protein, 136 aa, Homo sapiens
GRQNVRPGPRRAEAAVVTCGGPVTQSRGAGTRLAEPAGERRPQARARRRDSTYLPGFGSGSAGRGAAGALPPSFLLPSPPPRGATHNTRRKRKPRRGSCKSLAVKNPRTLTASVFCSQLLILDSTRDSPFLSAFMI

SEQ ID NO: 845468 - protein, 150 aa, Homo sapiens; identical to SEQ ID NO: 845457

SEQ ID NO: 845469 - protein, 150 aa, Homo sapiens; identical to SEQ ID NO: 845457

SEQ ID NO: 845470 - protein, 113 aa, Homo sapiens
MSGRALLPNLWTVSKHKITIPDNSVTKIWVSLGRRGSWEMIQSNLPQTKHHGLLSCFTNHLNVLVILKIDALFPRKEVLPHFPSGRHLYPYSFILSFPPPHPPPPTQHLQFLN

SEQ ID NO: 845471 - protein, 75 aa, Homo sapiens
SSRMSYQQQQCKQPCQPPPVCPTPKCPEPCPPPKCPEPCPPPKCPQPCPPQQCQQKYPPVTPSPPCQPKYPPKSK

SEQ ID NO: 845472 - protein, 192 aa, Homo sapiens
MAPLGGAPRLVLLFSGKRKSGKDFVTEALQSRLGADVCAVLRLSGPLKEQYAQEHGLNFQRLLDTSTYKEAFRKDMIRWGEEKRQADPGFFCRKIVEGISQPIWLVSDTRRVSDIQWFREAYGAVTQTVRVVALEQSRQQRGWVFTPGVDDAESECGLDNFGDFDWVIENHGVEQRLEEQLENLIEFIRSRL

SEQ ID NO: 845473 - protein, 192 aa, Homo sapiens; identical to SEQ ID NO: 845472

SEQ ID NO: 845474 - protein, 192 aa, Homo sapiens; identical to SEQ ID NO: 845472

SEQ ID NO: 845475 - protein, 117 aa, Homo sapiens
MIRWGEEKRQADPGFFCRKIVEGISQPIWLVSDTRRVSDIQWFREAYGAVTQTVRVVALEQSRQQRGWVFTPGVDDAESECGLDNFGDFDWVIENHGVEQRLEEQLENLIEFIRSRL

SEQ ID NO: 845476 - protein, 134 aa, Homo sapiens
MAPMCKVILRICRGVFRGIEVEAPVLQGNLNSSKSGNAYEVKRGLWDHNLEDRDRLHSSLPPAPVGSRLCQCPLGAPHHSQLLQLWPVLLPARVLLNSQFNVSSSFSSCGVLLLFFCFCLVSDYFLIIKRDVSK

SEQ ID NO: 845477 - protein, 117 aa, Homo sapiens
VENFPGKHLEKWIGRVVTWQFSARPTLPSNDFFYVNRTATLLISGFLFFRNGDGMKKVFLMSRAIVCSALSSPLKRISLIIMKTFYLKRYYMLMELSFNKCFISVPIKHIVEIKDMK

SEQ ID NO: 845478 - protein, 99 aa, Homo sapiens
QGRCGGVGSTSRALPGCEVWLGYGPRAAAAAAATVLFGGAGPTETMFVARSIAADHKDLIHDVSFDFHGRRMATCSSDQSVKVWDKSESGDWHCTASWK

SEQ ID NO: 845479 - protein, 215 aa, Homo sapiens
MRFCPYSHRTRLVLKAKDIRHEVVNINLRNKPEWYYTKHPFGHIPVLETSQCQLIYESVIACEYLDDAYPGRKLFPYDPYERARQKMLLELFCKVPHLTKECLVALRCGRECTNLKAALRQEFSNLEEILEYQNTTFFGGTCISMIDYLLWPWFERLDVYGILDCVSHTPALRLWISAMKWDPTVCALLMDKSIFQGFLNLYFQNNPNAFDFGLC

SEQ ID NO: 845480 - protein, 181 aa, Homo sapiens
MRFCPYSHRTRLVLKAKDIRHEVVNINLRNKPEWYYTKHPFGHIPVLETSQCQLIYESVIACEYLDDAYPGRKLFPYDPYERARQKMLLELFCKILEYQNTTFFGGTCISMIDYLLWPWFERLDVYGILDCVSHTPALRLWISAMKWDPTVCALLMDKSIFQGFLNLYFQNNPNAFDFGLC

SEQ ID NO: 845481 - protein, 243 aa, Homo sapiens
MSGDATRTLGKGSQPPGPVPEGLIRIYSMRFCPYSHRTRLVLKAKDIRHEVVNINLRNKPEWYYTKHPFGHIPVLETSQCQLIYESVIACEYLDDAYPGRKLFPYDPYERARQKMLLELFCKVPHLTKECLVALRCGRECTNLKAALRQEFSNLEEILEYQNTTFFGGTCISMIDYLLWPWFERLDVYGILDCVSHTPALRLWISAMKWDPTVCALLMDKSIFQGFLNLYFQNNPNAFDFGLC

SEQ ID NO: 845482 - protein, 243 aa, Homo sapiens; identical to SEQ ID NO: 845481

SEQ ID NO: 845483 - protein, 1266 aa, Homo sapiens
THAYNPKSPPTQNSSASSVNWNSANPDDMVVDYETDPAVVTGENISLSLQGVEVFGHEKSSSDFISKQVLDMHKDSICQCPALVGTEKPKYLQHSCHSLEAVEGQSVEPSLPFVWKPNDNLNCAGYCDALELNQTFDMTVDKVNCTFISHHAIGKSQSFHTAGSLPPTGRRSGSTSSLSYSTWTSSHSDKTHARETTYDRESFENPQVTPSEAQDMTYTAFSDVVMQSEVFVSDIGNQCACSSGKVTSEYTDGSQQRLVGEKETQALTPVSDGMEVPNDSALQEFFCLSHDESNSEPHSQSSYRHKEMGQNLRETVSYCLIDDECPLMVPAFDKSEAQVLNPEHKVTETEDTQMVSKGKDLGTQNHTSELILSSPPGQKVGSSFGLTWDANDMVISTDKTMCMSTPVLEPTKVTFSVSPIEATEKCKKVEKGNRGLKNIPDSKEAPVNLCKPSLGKSTIKTNTPIGCKVRKTEIISYPRPNFKNVKAKVMSRAVLQPKDAALSKVTPRPQQTSASSPSSVNSRQQTVLSRTPRSDLNADKKAEILINKTHKQQFNKLITSQAVHVTTHSKNASHRVPRTTSAVKSNQEDVDKASSSNSACETGSVSALFQKIKGILPVKMESAECLEMTYVPNIDRISPEKKGEKENGTSMEKQELKQEIMNETFEYGSLFLGSASKTTTTSGRNISKPDSCGLRQIAAPKAKVGPPVSCLRRNSDNRNPSADRAVSPQRIRRVSSSVLPKAAFFMIILIDHLLQRTCEKPTSLKTAQSSWVNLPRPLPKSKASLKSPALRRTGSTPSIASTHSELSTYSNNSGNAAVIKYEEKPPKPAFQNGSSGSFYLKPLVSRAHVHLMKTPPKGPSRKNLFTALNAVEKSRQKNPRSLCIQPQTAPDALPPEKTLELTQYKTKCENQSGFILQLKQLLACGNTKFEALTVVIQHLLSEREEALKQHKTLSQELVNLRGELVTASTTCEKLEKARNELQTVYEAFVQQHQAEKTERENRLKEFYTREYEKLRDTYIEEAEKYKMQLQEQFDNLNAAHETSKLEIEASHSEKLELLKKAYEASLSEIKKGHEIEKKSLEDLLSEKQESLEKQINDLKSENDALNEKLKSEEQKRRAREKANLKNPQIMYLEQELESLKAVLEIKNEKLHQQDIKLMKMEKLVDNNTALVDKLKRFQQENEELKARMDKHMAISRQLSTEQAVLQESLEKESKVNKRLSMENEELLWKLHNGDLCSPKRSPTSSAIPLQSPRNSGSFPSPSISPR

SEQ ID NO: 845484 - protein, 532 aa, Homo sapiens
SASLLPERLKELRGSASKTTTTSGRNISKPDSCGLRQIAAPKAKVGPPVSCLRRNSDNRNPSADRAVSPQRIRRVSSSAGNAAVIKYEEKPPKPAFQNGSSGSFYLKPLVSRAHVHLMKTPPKGPSRKNLFTALNAVEKSRQKNPRSLCIQPQTAPDALPPEKTLELTQYKTKCENQSGFILQLKQLLACGNTKFEALTVVIQHLLSEREEALKQHKTLSQELVNLRGELVTASTTCEKLEKARNELQTVYEAFVQQHQAEKTERENRLKEFYTREYEKLRDTYIEEAEKYKMQLQEQFDNLNAAHETSKLEIEASHSEKLELLKKAYEASLSEIKKGHEIEKKSLEDLLSEKQESLEKQINDLKSENDALNEKLKSEEQKRRAREKANLKNPQIMYLEQELESLKAVLEIKNEKLHQQDIKLMKMEKLVDNNTALVDKLKRFQQENEELKARMDKHMAISRQLSTEQAVLQESLEKESKVNKRLSMENEELLWKLHNGDLCSPKRSPTSSAIPLQSPRNSGSFPSPSISPR

SEQ ID NO: 845485 - protein, 342 aa, Homo sapiens
MGCPSSKLCLYSPCAATRREEALKQHKTLSQELVNLRGELVTASTTCEKLEKARNELQTVYEAFVQQHQAEKTERENRLKEFYTREYEKLRDTYIEEAEKYKMQLQEQFDNLNAAHETSKLEIEASHSEKLELLKKAYEASLSEIKKGHEIEKKSLEDLLSEKQESLEKQINDLKSENDALNEKLKSEEQKRRAREKANLKNPQIMYLEQELESLKAVLEIKNEKLHQQDIKLMKMEKLVDNNTALVDKLKRFQQENEELKARMDKHMAISRQLSTEQAVLQESLEKESKVNKRLSMENEELLWKLHNGDLCSPKRSPTSSAIPLQSPRNSGSFPSPSISPR

SEQ ID NO: 845486 - protein, 211 aa, Homo sapiens [sequence omitted]

SEQ ID NO: 845487 - protein, 159 aa, Homo sapiens
LEDPTSYPRRAREKANLKNPQIMYLEQELESLKAVLEIKNEKLHQQDIKLMKMEKLVDNNTALVDKLKRFQQENEELKARMDKHMAISRQLSTEQAVLQESLEKESKVNKRLSMENEELLWKLHNGDLCSPKRSPTSSAIPLQSPRNSGSFPSPSISPR

SEQ ID NO: 845488 - protein, 1245 aa, Homo sapiens
THAYNPKSPPTQNSSASSVNWNSANPDDMVVDYETDPAVVTGENISLSLQGVEVFGHEKSSSDFISKQVLDMHKDSICQCPALVGTEKPKYLQHSCHSLEAVEGQSVEPSLPFVWKPNDNLNCAGYCDALELNQTFDMTVDKVNCTFISHHAIGKSQSFHTAGSLPPTGRRSGSTSSLSYSTWTSSHSDKTHARETTYDRESFENPQVTPSEAQDMTYTAFSDVVMQSEVFVSDIGNQCACSSGKVTSEYTDGSQQRLVGEKETQALTPVSDGMEVPNDSALQEFFCLSHDESNSEPHSQSSYRHKEMGQNLRETVSYCLIDDECPLMVPAFDKSEAQVLNPEHKVTETEDTQMVSKGKDLGTQNHTSELILSSPPGQKVGSSFGLTWDANDMVISTDKTMCMSTPVLEPTKVTFSVSPIEATEKCKKVEKGNRGLKNIPDSKEAPVNLCKPSLGKSTIKTNTPIGCKVRKTEIISYPRPNFKNVKAKVMSRAVLQPKDAALSKVTPRPQQTSASSPSSVNSRQQTVLSRTPRSDLNADKKAEILINKTHKQQFNKLITSQAVHVTTHSKNASHRVPRTTSAVKSNQEDVDKASSSNSACETGSVSALFQKIKGILPVKMESAECLEMTYVPNIDRISPEKKGEKENGTSMEKQELKQEIMNETFEYGSLFLGSASKTTTTSGRNISKPDSCGLRQIAAPKAKVGPPVSCLRRNSDNRNPSADRAVSPQRIRRVSSSGKPTSLKTAQSSWVNLPRPLPKSKASLKSPALRRTGSTPSIASTHSELSTYSNNSGNAAVIKYEEKPPKPAFQNGSSGSFYLKPLVSRAHVHLMKTPPKGPSRKNLFTALNAVEKSRQKNPRSLCIQPQTAPDALPPEKTLELTQYKTKCENQSGFILQLKQLLACGNTKFEALTVVIQHLLSEREEALKQHKTLSQELVNLRGELVTASTTCEKLEKARNELQTVYEAFVQQHQAEKTERENRLKEFYTREYEKLRDTYIEEAEKYKMQLQEQFDNLNAAHETSKLEIEASHSEKLELLKKAYEASLSEIKKGHEIEKKSLEDLLSEKQESLEKQINDLKSENDALNEKLKSEEQKRRAREKANLKNPQIMYLEQELESLKAVLEIKNEKLHQQDIKLMKMEKLVDNNTALVDKLKRFQQENEELKARMDKHMAISRQLSTEQAVLQESLEKESKVNKRLSMENEELLWKLHNGDLCSPKRSPTSSAIPLQSPRNSGSFPSPSISPR

SEQ ID NO: 845489 - protein, 839 aa, Homo sapiens
THAYNPKSPPTQNSSASSVNWNSANPDDMVVDYETDPAVVTGENISLSLQGVEVFGHEKSSSDFISKQVLDMHKDSICQCPALVGTEKPKYLQHSCHSLEAVEGQSVEPSLPFVWKPNDNLNCAGYCDALELNQTFDMTVDKVNCTFISHHAIGKSQSFHTAGSLPPTGRRSGSTSSLSYSTWTSSHSDKTHARETTYDRESFENPQVTPSEAQDMTYTAFSDVVMQSEVFVSDIGNQCACSSGKVTSEYTDGSQQRLVGEKETQALTPVSDGMEVPNDSALQEFFCLSHDESNSEPHSQSSYRHKEMGQNLRETVSYCLIDDECPLMVPAFDKSEAQVLNPEHKVTETEDTQMVSKGKDLGTQNHTSELILSSPPGQKVGSSFGLTWDANDMVISTDKTMCMSTPVLEPTKVTFSVSPIEATEKCKKVEKGNRGLKNIPDSKEAPVNLCKPSLGKSTIKTNTPIGCKVRKTEIISYPRPNFKNVKAKVMSRAVLQPKDAALSKVTPRPQQTSASSPSSVNSRQQTVLSRTPRSDLNADKKAEILINKTHKQQFNKLITSQAVHVTTHSKNASHRVPRTTSAVKSNQEDVDKASSSNSACETGSVSALFQKIKGILPVKMESAECLEMTYVPNIDRISPEKKGEKENGTSMEKQELKQEIMNETFEYGSLFLGSASKTTTTSGRNISKPDSCGLRQIAAPKAKVGPPVSCLRRNSDNRNPSADRAVSPQRIRRVSSSGKPTSLKTAQSSWVNLPRPLPKSKASLKSPALRRTGSTPSIASTHSELSTYSNNSGNAAVIKYEEKPPKPAFQNGSSGSFYLKPLVSRAHVHLMKTPPKGPS

SEQ ID NO: 845490 - protein, 1090 aa, Homo sapiens
THAYNPKSPPTQNSSASSVNWNSANPDDMVVDYETDPAVVTGENISLSLQGVEVFGHEKSSSDFISKQVLDMHKDSICQCPALVGTEKPKYLQHSCHSLEAVEGQSVEPSLPFVWKPNDNLNCAGYCDALELNQTFDMTVDKVNCTFISHHAIGKSQSFHTAGSLPPTGRRSGSTSSLSYSTWTSSHSDKTHARETTYDRESFENPQVTPSEAQDMTYTAFSDVVMQSEVFVSDIGNQCACSSGKVTSEYTDGSQQRLVGEKETQALTPVSDGMEVPNDSALQEFFCLSHDESNSEPHSQSSYRHKEMGQNLRETVSYCLIDDECPLMVPAFDKSEAQVLNPEHKVTETEDTQMVSKGKDLGTQNHTSELILSSPPGQKVGSSFGLTWDANDMVISTDKTMCMSTPVLEPTKVTFSVSPIEATEKCKKVEKGNRGLKNIPDSKEAPVNLCKPSLGKSTIKTNTPIGCKVRKTEIISYPRPNFKNVKAKVMSRAVLQPKDAALSKVTPRPQQTSASSPSSVNSRQQTVLSRTPRSDLNADKKAEILINKTHKQQFNKLITSQAVHVTTHSKNASHRVPRTTSAVKSNQEDVDKASSSNSACETGSVSALFQKIKGILPVKMESAECLEMTYVPNIDRISPEKKGEKENGTSMEKQELKQEIMNETFEYGSLFLGSASKTTTTSGRNISKPDSCGLRQIAAPKAKVGPPVSCLRRNSDNRNPSADRAVSPQRIRRVSSSGKPTSLKTAQSSWVNLPRPLPKSKASLKSPALRRTGSTPSIASTHSELSTYSNNSGNAAVIKYEEKPPKPAFQNGSSGSFYLKPLVSRAHVHLMKTPPKGPSRKNLFTALNAVEKSRQKNPRSLCIQPQTAPDALPPEKTLELTQYKTKCENQSGFILQLKQLLACGNTKFEALTVVIQHLLSEREEALKQHKTLSQELVNLRGELVTASTTCEKLEKARNELQTVYEAFVQQHQAEKTERENRLKEFYTREYEKLRDTYIEEAEKYKMQLQEQFDNLNAAHETSKLEIEASHSEKLELLKKAYEASLSEIKKGHEIEKKSLEDLLSEKQESLEKQINAIGTETMFESLITCS

SEQ ID NO: 845491 - protein, 1245 aa, Homo sapiens; identical to SEQ ID NO: 845488

SEQ ID NO: 845492 - protein, 436 aa, Homo sapiens
MLLSPKFSLSTIHIRLTAKGLLRNLRLPSGFRRSTVVFHTVEKSRQKNPRSLCIQPQTAPDALPPEKTLELTQYKTKCENQSGFILQLKQLLACGNTKFEALTVVIQHLLSEREEALKQHKTLSQELVNLRGELVTASTTCEKLEKARNELQTVYEAFVQQHQAEKTERENRLKEFYTREYEKLRDTYIEEAEKYKMQLQEQFDNLNAAHETSKLEIEASHSEKLELLKKAYEASLSEIKKGHEIEKKSLEDLLSEKQESLEKQINDLKSENDALNEKLKSEEQKRRAREKANLKNPQIMYLEQELESLKAVLEIKNEKLHQQDIKLMKMEKLVDNNTALVDKLKRFQQENEELKARMDKHMAISRQLSTEQAVLQESLEKESKVNKRLSMENEELLWKLHNGDLCSPKRSPTSSAIPLQSPRNSGSFPSPSISPR

SEQ ID NO: 845493 - protein, 240 aa, Homo sapiens [sequence omitted]

SEQ ID NO: 845494 - protein, 1245 aa, Homo sapiens; identical to SEQ ID NO: 845488

SEQ ID NO: 845495 - protein, 72 aa, Homo sapiens
VGGEQEVIWNIAIRIEKGSLSEFDEMCEIKTHKAVLSNRVGSGYVLILQENTDYHLKVSLNVTEESKNFPIL

SEQ ID NO: 845496 - protein, 359 aa, Homo sapiens
LLCYDCVGESSIKTHLCASLRHIRFLLSVCLLCLVAGTAVAVKMASTSRLDALPRVTCPNHPDAILVEDYRAGDMICPECGLVVGDRVIDVGSEWRTFSNDKATKDPSRVGDSQNPLLSDGDLSTMIGKGTGAASFDEFGNSKYQNRRTMSSSDRAMMNAFKEITTMADRINLPRNIVDRTNNLFKQVYEQKSLKGRANDAIASACLYIACRQEGVPRTFKEICAVSRISKKEIGRCFKLILKALETSVDLITTGDFMSRFCSNLCLPKQVQMAATHIARKAVELDLVPGRSPISVAAAAIYMASQASAEKRTQKEIGDIAGVADVTIRQSYRLIYPRAPDLFPTDFKFDTPVDKLPQL

SEQ ID NO: 845497 - protein, 359 aa, Homo sapiens; identical to SEQ ID NO: 845496

SEQ ID NO: 845498 - protein, 317 aa, Homo sapiens
ALLRLRGLDALPRVTCPNHPDAILVEDYRAGDMICPECGLVVGDRVIDVGSEWRTFSNDKATKDPSRVGDSQNPLLSDGDLSTMIGKGTGAASFDEFGNSKYQNRRTMSSSDRAMMNAFKEITTMADRINLPRNIVDRTNNLFKQVYEQKSLKGRANDAIASACLYIACRQEGVPRTFKEICAVSRISKKEIGRCFKLILKALETSVDLITTGDFMSRFCSNLCLPKQVQMAATHIARKAVELDLVPGRSPISVAAAAIYMASQASAEKRTQKEIGDIAGVADVTIRQSYRLIYPRAPDLFPTDFKFDTPVDKLPQL

SEQ ID NO: 845499 - protein, 341 aa, Homo sapiens
LLCYDCVGESSIKTHLCASLRHIRFLLSVCLLCLVAGTAVAVKMASTSRLDALPRVTCPNHPDAILVEDYRAGDMICPECGLVVGDRVIDVGSEWRTFSNDKATLSTMIGKGTGAASFDEFGNSKYQNRRTMSSSDRAMMNAFKEITTMADRINLPRNIVDRTNNLFKQVYEQKSLKGRANDAIASACLYIACRQEGVPRTFKEICAVSRISKKEIGRCFKLILKALETSVDLITTGDFMSRFCSNLCLPKQVQMAATHIARKAVELDLVPGRSPISVAAAAIYMASQASAEKRTQKEIGDIAGVADVTIRQSYRLIYPRAPDLFPTDFKFDTPVDKLPQL

SEQ ID NO: 845500 - protein, 316 aa, Homo sapiens
LLCYDCVGESSIKTHLCASLRHIRFLLSVCLLCLVAGTAVAVKMASTSRLDALPRVTCPNHPDAILVEDYRAGDMICPECGLVVGDRVIDVGSEWRTFSNDKATKDPSRVGDSQNPLLSDGDLSTMIGKGTGAASFDEFGNSKYQNRRTMSSSDRAMMNAFKEITTMADRINLPRNIVDRTNNLFKQVYEQKSLKGRANDAIASACLYIACRQEGVPRTFKEICAVSRISKKEIGRCFKLILKALETSVDLITTGDFMSRFCSNLCLPKQVQMAATHIARKAVELDLVPGRSPISVAAAAIYMASQASAEKRTQKD

SEQ ID NO: 845501 - protein, 437 aa, Homo sapiens
GIPLFIVRVLSLGGLPPLTGFLPKWAIIEEFTKNNSLIIPTIIATITLLNLYFYLRLIYSTSITLLPISNNVKIKDSLTYKTHPIPPHTHRPYHATPTYLPFYTNKVCLLCLVAGTAVAVKMASTSRLDALPRVTCPNHPDAILVEDYRAGDMICPECGLVVGDRVIDVGSEWRTFSNDKATKDPSRVGDSQNPLLSDGDLSTMIGKGTGAASFDEFGNSKYQNRRTMSSSDRAMMNAFKEITTMADRINLPRNIVDRTNNLFKQVYEQKSLKGRANDAIASACLYIACRQEGVPRTFKEICAVSRISKKEIGRCFKLILKALETSVDLITTGDFMSRFCSNLCLPKQVQMAATHIARKAVELDLVPGRSPISVAAAAIYMASQASAEKRTQKEIGDIAGVADVTIRQSYRLIYPRAPDLFPTDFKFDTPVDKLPQL

SEQ ID NO: 845502 - protein, 285 aa, Homo sapiens
MICPECGLVVGDRVIDVGSEWRTFSNDKATKDPSRVGDSQNPLLSDGDLSTMIGKGTGAASFDEFGNSKYQNRRTMSSSDRAMMNAFKEITTMADRINLPRNIVDRTNNLFKQVYEQKSLKGRANDAIASACLYIACRQEGVPRTFKEICAVSRISKKEIGRCFKLILKALETSVDLITTGDFMSRFCSNLCLPKQVQMAATHIARKAVELDLVPGRSPISVAAAAIYMASQASAEKRTQKEIGDIAGVADVTIRQSYRLIYPRAPDLFPTDFKFDTPVDKLPQL

SEQ ID NO: 845503 - protein, 359 aa, Homo sapiens; identical to SEQ ID NO: 845496

SEQ ID NO: 845504 - protein, 226 aa, Homo sapiens
ALLRLRGLDALPRVTCPNHPDAILVEDYRAGDMICPECGLVVGDRVIDVGSEWRTFSNDKATKDPSRVGDSQNPLLSDGDLSTMIGKGTGAASFDEFGNSKYQNRRTMSSSDRAMMNAFKEITTMADRINLPRNIVDRTNNLFKQVYEQKSLKGRANDAIASACLYIACRQEGVPRTFKEICAVSRISKKEIGRCFKLILKALETSVDLITTGDFMSRNWRYCWCC

SEQ ID NO: 845505 - protein, 1360 aa, Homo sapiens
MASDSPARSLDEIDLSALRDPAGIFELVELVGNGTYGQVYKGRHVKTGQLAAIKVMDVTGDEEEEIKQEINMLKKYSHHRNIATYYGAFIKKNPPGMDDQLWLVMEFCGAGSVTDLIKNTKGNTLKEEWIAYICREILRGLSHLHQHKVIHRDIKGQNVLLTENAEVKLVDFGVSAQLDRTVGRRNTFIGTPYWMAPEVIACDENPDATYDFKSDLWSLGITAIEMAEGAPPLCDMHPMRALFLIPRNPAPRLKSKKWSKKFQSFIESCLVKNHSQRPATEQLMKHPFIRDQPNERQVRIQLKDHIDRTKKKRGEKDETEYEYSGSEEEEEENDSGEPSSILNLPGESTLRRDFLRLQLANKERSEALRRQQLEQQQRENEEHKRQLLAERQKRIEEQKEQRRRLEEQQRREKELRKQQEREQRRHYEEQMRREEERRRAEHEQEYIRRQLEEEQRQLEILQQQLLHEQALLLEYKRKQLEEQRQAERLQRQLKQERDYLVSLQHQRQEQRPVEKKPLYHYKEGMSPSEKPAWAKEVEERSRLNRQSSPAMPHKVANRISDPNLPPRSESFSISGVQPARTPPMLRPVDPQIPHLVAVKSQGPALTASQSVHEQPTKGLSGFQEALNVTSHRVEMPRQNSDPTSENPPLPTRIEKFDRSSWLRQEEDIPPKVPQRTTSISPALARKNSPGNGSALGPRLGSQPIRASNPDLRRTEPILESPLQRTSSGSSSSSSTPSSQPSSQGGSQPGSQAGSSERTRVRANSKSEGSPVLPHEPAKVKPEESRDITRPSRPASYKKAIDEDLTALAKELRELRIEETNRPMKKVTDYSSSSEESESSEEEEEDGESETHDGTVAVSDIPRLIPTGAPGSNEQYNVGMVGTHGLETSHADSFSGSISREGTLMIRETSGEKKRSGHSDSNGFAGHINLPDLVQQSHSPAGTPTEGLGRVSTHSQEMDSGTEYGMGSSTKASFTPFVDPRVYQTSPTDEDEEDEESSAAALFTSELLRQEQAKLNEARKISVVNVNPTNIRPHSDTPEIRKYKKRFNSEILCAALWGVNLLVGTENGLMLLDRSGQGKVYNLINRRRFQQMDVLEGLNVLVTISGKKNKLRVYYLSWLRNRILHNDPEVEKKQGWITVGDLEGCIHYKVVKYERIKFLVIALKNAVEIYAWAPKPYHKFMAFKSFADLQHKPLLVDLTVEEGQRLKVIFGSHTGFHVIDVDSGNSYDIYIPSHIQGNITPHAIVILPKTDGMEMLVCYEDEGVYVNTYGRITKDVVLQWGEMPTSVAYIHSNQIMGWGEKAIEIRSVETGHLDGVFMHKRAQRLKFLCERNDKVFFASVRSGGSSQVFFMTLNRNSMMNW

SEQ ID NO: 845506 - protein, 1352 aa, Homo sapiens
MASDSPARSLDEIDLSALRDPAGIFELVELVGNGTYGQVYKGRHVKTGQLAAIKVMDVTGDEEEEIKQEINMLKKYSHHRNIATYYGAFIKKNPPGMDDQLWLVMEFCGAGSVTDLIKNTKGNTLKEEWIAYICREILRGLSHLHQHKVIHRDIKGQNVLLTENAEVKLVDFGVSAQLDRTVGRRNTFIGTPYWMAPEVIACDENPDATYDFKSDLWSLGITAIEMAEGAPPLCDMHPMRALFLIPRNPAPRLKSKKWSKKFQSFIESCLVKNHSQRPATEQLMKHPFIRDQPNERQVRIQLKDHIDRTKKKRGEKDETEYEYSGSEEEEEENDSGEPSSILNLPGESTLRRDFLRLQLANKERSEALRRQQLEQQQRENEEHKRQLLAERQKRIEEQKEQRRRLEEQQRREKELRKQQEREQRRHYEEQMRREEERRRAEHEQEYIRRQLEEEQRQLEILQQQLLHEQALLLEYKRKQLEEQRQAERLQRQLKQERDYLVSLQHQRQEQRPVEKKPLYHYKEGMSPSEKPAWAKEVEERSRLNRQSSPAMPHKVANRISDPNLPPRSESFSISGVQPARTPPMLRPVDPQIPHLVAVKSQGPALTASQSVHEQPTKGLSGFQEALNVTSHRVEMPRQNSDPTSENPPLPTRIEKFDRSSWLRQEEDIPPKVPQRTTSISPALARKNSPGNGSALGPRLGSQPIRASNPDLRRTEPILESPLQRTSSGSSSSSSTPSSQPSSQGGSQPGSQAGSSERTRVRANSKSEGSPVLPHEPAKVKPEESRDITRPSRPADLTALAKELRELRIEETNRPMKKVTDYSSSSEESESSEEEEEDGESETHDGTVAVSDIPRLIPTGAPGSNEQYNVGMVGTHGLETSHADSFSGSISREGTLMIRETSGEKKRSGHSDSNGFAGHINLPDLVQQSHSPAGTPTEGLGRVSTHSQEMDSGTEYGMGSSTKASFTPFVDPRVYQTSPTDEDEEDEESSAAALFTSELLRQEQAKLNEARKISVVNVNPTNIRPHSDTPEIRKYKKRFNSEILCAALWGVNLLVGTENGLMLLDRSGQGKVYNLINRRRFQQMDVLEGLNVLVTISGKKNKLRVYYLSWLRNRILHNDPEVEKKQGWITVGDLEGCIHYKVVKYERIKFLVIALKNAVEIYAWAPKPYHKFMAFKSFADLQHKPLLVDLTVEEGQRLKVIFGSHTGFHVIDVDSGNSYDIYIPSHIQGNITPHAIVILPKTDGMEMLVCYEDEGVYVNTYGRITKDVVLQWGEMPTSVAYIHSNQIMGWGEKAIEIRSVETGHLDGVFMHKRAQRLKFLCERNDKVFFASVRSGGSSQVFFMTLNRNSMMNW

SEQ ID NO: 845507 - protein, 1297 aa, Homo sapiens
MASDSPARSLDEIDLSALRDPAGIFELVELVGNGTYGQVYKGRHVKTGQLAAIKVMDVTGDEEEEIKQEINMLKKYSHHRNIATYYGAFIKKNPPGMDDQLWLVMEFCGAGSVTDLIKNTKGNTLKEEWIAYICREILRGLSHLHQHKVIHRDIKGQNVLLTENAEVKLVDFGVSAQLDRTVGRRNTFIGTPYWMAPEVIACDENPDATYDFKSDLWSLGITAIEMAEGAPPLCDMHPMRALFLIPRNPAPRLKSKKWSKKFQSFIESCLVKNHSQRPATEQLMKHPFIRDQPNERQVRIQLKDHIDRTKKKRGEKDETEYEYSGSEEEEEENDSGEPSSILNLPGESTLRRDFLRLQLANKERSEALRRQQLEQQQRENEEHKRQLLAERQKRIEEQKEQRRRLEEQQRREKELRKQQEREQRRHYEEQMRREEERRRAEHEQEYIRRQLEEEQRQLEILQQQLLHEQALLLEYKRKQLEEQRQAERLQRQLKQERDYLVSLQHQRQEQRPVEKKPLYHYKEGMSPSEKPAWAKEIPHLVAVKSQGPALTASQSVHEQPTKGLSGFQEALNVTSHRVEMPRQNSDPTSENPPLPTRIEKFDRSSWLRQEEDIPPKVPQRTTSISPALARKNSPGNGSALGPRLGSQPIRASNPDLRRTEPILESPLQRTSSGSSSSSSTPSSQPSSQGGSQPGSQAGSSERTRVRANSKSEGSPVLPHEPAKVKPEESRDITRPSRPADLTALAKELRELRIEETNRPMKKVTDYSSSSEESESSEEEEEDGESETHDGTVAVSDIPRLIPTGAPGSNEQYNVGMVGTHGLETSHADSFSGSISREGTLMIRETSGEKKRSGHSDSNGFAGHINLPDLVQQSHSPAGTPTEGLGRVSTHSQEMDSGTEYGMGSSTKASFTPFVDPRVYQTSPTDEDEEDEESSAAALFTSELLRQEQAKLNEARKISVVNVNPTNIRPHSDTPEIRKYKKRFNSEILCAALWGVNLLVGTENGLMLLDRSGQGKVYNLINRRRFQQMDVLEGLNVLVTISGKKNKLRVYYLSWLRNRILHNDPEVEKKQGWITVGDLEGCIHYKVVKYERIKFLVIALKNAVEIYAWAPKPYHKFMAFKSFADLQHKPLLVDLTVEEGQRLKVIFGSHTGFHVIDVDSGNSYDIYIPSHIQGNITPHAIVILPKTDGMEMLVCYEDEGVYVNTYGRITKDVVLQWGEMPTSVAYIHSNQIMGWGEKAIEIRSVETGHLDGVFMHKRAQRLKFLCERNDKVFFASVRSGGSSQVFFMTLNRNSMMNW

SEQ ID NO: 845508 - protein, 1268 aa, Homo sapiens
MASDSPARSLDEIDLSALRDPAGIFELVELVGNGTYGQVYKGRHVKTGQLAAIKVMDVTGDEEEEIKQEINMLKKYSHHRNIATYYGAFIKKNPPGMDDQLWLVMEFCGAGSVTDLIKNTKGNTLKEEWIAYICREILRGLSHLHQHKVIHRDIKGQNVLLTENAEVKLVDFGVSAQLDRTVGRRNTFIGTPYWMAPEVIACDENPDATYDFKSDLWSLGITAIEMAEGAPPLCDMHPMRALFLIPRNPAPRLKSKKWSKKFQSFIESCLVKNHSQRPATEQLMKHPFIRDQPNERQVRIQLKDHIDRTKKKRGEKDETEYEYSGSEEEEEENDSGEPSSILNLPGESTLRRDFLRLQLANKERSEALRRQQLEQQQRENEEHKRQLLAERQKRIEEQKEQRRRLEEQQRREKELRKQQEREQRRHYEEQMRREEERRRAEHEQEYKRKQLEEQRQAERLQRQLKQERDYLVSLQHQRQEQRPVEKKPLYHYKEGMSPSEKPAWAKEIPHLVAVKSQGPALTASQSVHEQPTKGLSGFQEALNVTSHRVEMPRQNSDPTSENPPLPTRIEKFDRSSWLRQEEDIPPKVPQRTTSISPALARKNSPGNGSALGPRLGSQPIRASNPDLRRTEPILESPLQRTSSGSSSSSSTPSSQPSSQGGSQPGSQAGSSERTRVRANSKSEGSPVLPHEPAKVKPEESRDITRPSRPADLTALAKELRELRIEETNRPMKKVTDYSSSSEESESSEEEEEDGESETHDGTVAVSDIPRLIPTGAPGSNEQYNVGMVGTHGLETSHADSFSGSISREGTLMIRETSGEKKRSGHSDSNGFAGHINLPDLVQQSHSPAGTPTEGLGRVSTHSQEMDSGTEYGMGSSTKASFTPFVDPRVYQTSPTDEDEEDEESSAAALFTSELLRQEQAKLNEARKISVVNVNPTNIRPHSDTPEIRKYKKRFNSEILCAALWGVNLLVGTENGLMLLDRSGQGKVYNLINRRRFQQMDVLEGLNVLVTISGKKNKLRVYYLSWLRNRILHNDPEVEKKQGWITVGDLEGCIHYKVVKYERIKFLVIALKNAVEIYAWAPKPYHKFMAFKSFADLQHKPLLVDLTVEEGQRLKVIFGSHTGFHVIDVDSGNSYDIYIPSHIQGNITPHAIVILPKTDGMEMLVCYEDEGVYVNTYGRITKDVVLQWGEMPTSVAYIHSNQIMGWGEKAIEIRSVETGHLDGVFMHKRAQRLKFLCERNDKVFFASVRSGGSSQVFFMTLNRNSMMNW

SEQ ID NO: 845509 - protein, 1352 aa, Homo sapiens; identical to SEQ ID NO: 845506

SEQ ID NO: 845510 - protein, 1352 aa, Homo sapiens; identical to SEQ ID NO: 845506

SEQ ID NO: 845511 - protein, 1276 aa, Homo sapiens
MASDSPARSLDEIDLSALRDPAGIFELVELVGNGTYGQVYKGRHVKTGQLAAIKVMDVTGDEEEEIKQEINMLKKYSHHRNIATYYGAFIKKNPPGMDDQLWLVMEFCGAGSVTDLIKNTKGNTLKEEWIAYICREILRGLSHLHQHKVIHRDIKGQNVLLTENAEVKLVDFGVSAQLDRTVGRRNTFIGTPYWMAPEVIACDENPDATYDFKSDLWSLGITAIEMAEGAPPLCDMHPMRALFLIPRNPAPRLKSKKWSKKFQSFIESCLVKNHSQRPATEQLMKHPFIRDQPNERQVRIQLKDHIDRTKKKRGEKDETEYEYSGSEEEEEENDSGEPSSILNLPGESTLRRDFLRLQLANKERSEALRRQQLEQQQRENEEHKRQLLAERQKRIEEQKEQRRRLEEQQRREKELRKQQEREQRRHYEEQMRREEERRRAEHEQEYKRKQLEEQRQAERLQRQLKQERDYLVSLQHQRQEQRPVEKKPLYHYKEGMSPSEKPAWAKEIPHLVAVKSQGPALTASQSVHEQPTKGLSGFQEALNVTSHRVEMPRQNSDPTSENPPLPTRIEKFDRSSWLRQEEDIPPKVPQRTTSISPALARKNSPGNGSALGPRLGSQPIRASNPDLRRTEPILESPLQRTSSGSSSSSSTPSSQPSSQGGSQPGSQAGSSERTRVRANSKSEGSPVLPHEPAKVKPEESRDITRPSRPASYKKAIDEDLTALAKELRELRIEETNRPMKKVTDYSSSSEESESSEEEEEDGESETHDGTVAVSDIPRLIPTGAPGSNEQYNVGMVGTHGLETSHADSFSGSISREGTLMIRETSGEKKRSGHSDSNGFAGHINLPDLVQQSHSPAGTPTEGLGRVSTHSQEMDSGTEYGMGSSTKASFTPFVDPRVYQTSPTDEDEEDEESSAAALFTSELLRQEQAKLNEARKISVVNVNPTNIRPHSDTPEIRKYKKRFNSEILCAALWGVNLLVGTENGLMLLDRSGQGKVYNLINRRRFQQMDVLEGLNVLVTISGKKNKLRVYYLSWLRNRILHNDPEVEKKQGWITVGDLEGCIHYKVVKYERIKFLVIALKNAVEIYAWAPKPYHKFMAFKSFADLQHKPLLVDLTVEEGQRLKVIFGSHTGFHVIDVDSGNSYDIYIPSHIQGNITPHAIVILPKTDGMEMLVCYEDEGVYVNTYGRITKDVVLQWGEMPTSVAYIHSNQIMGWGEKAIEIRSVETGHLDGVFMHKRAQRLKFLCERNDKVFFASVRSGGSSQVFFMTLNRNSMMNW

SEQ ID NO: 845512 - protein, 538 aa, Homo sapiens
MKKVTDYSSSSEESESSEEEEEDGESETHDGTVAVSDIPRLIPTGAPGSNEQYNVGMVGTHGLETSHADSFSGSISREGTLMIRETSGEKKRSGHSDSNGFAGHINLPDLVQQSHSPAGTPTEGLGRVSTHSQEMDSGTEYGMGSSTKASFTPFVDPRVYQTSPTDEDEEDEESSAAALFTSELLRQEQAKLNEARKISVVNVNPTNIRPHSDTPEIRKYKKRFNSEILCAALWGVNLLVGTENGLMLLDRSGQGKVYNLINRRRFQQMDVLEGLNVLVTISGKKNKLRVYYLSWLRNRILHNDPEVEKKQGWITVGDLEGCIHYKVVKYERIKFLVIALKNAVEIYAWAPKPYHKFMAFKSFADLQHKPLLVDLTVEEGQRLKVIFGSHTGFHVIDVDSGNSYDIYIPSHIQGNITPHAIVILPKTDGMEMLVCYEDEGVYVNTYGRITKDVVLQWGEMPTSVAYIHSNQIMGWGEKAIEIRSVETGHLDGVFMHKRAQRLKFLCERNDKVFFASVRSGGSSQVFFMTLNRNSMMNW

SEQ ID NO: 845513 - protein, 292 aa, Homo sapiens
MLLDRSGQGKVYNLINRRRFQQMDVLEGLNVLVTISGKKNKLRVYYLSWLRNRILHNDPEVEKKQGWITVGDLEGCIHYKVVKYERIKFLVIALKNAVEIYAWAPKPYHKFMAFKSFADLQHKPLLVDLTVEEGQRLKVIFGSHTGFHVIDVDSGNSYDIYIPSHIQGNITPHAIVILPKTDGMEMLVCYEDEGVYVNTYGRITKDVVLQWGEMPTSVAYIHSNQIMGWGEKAIEIRSVETGHLDGVFMHKRAQRLKFLCERNDKVFFASVRSGGSSQVFFMTLNRNSMMNW

SEQ ID NO: 845514 - protein, 136 aa, Homo sapiens
VAVKSQGPALTASQSVHEQPTKGLSGFQEALNVTSHRVEMPRQNSDPTSENPPLPTRIEKFDRSSWLRQEEDIPPKVIFTGVFFLITSITDDFYYHYSRPFVVVENVIMPKHFPFSCLFWSLFIPWLRLGIAIYHV

SEQ ID NO: 845515 - protein, 90 aa, Homo sapiens
IITANAAAIHAQAKKHVPFKYTHAAPAPLADRGAQQQRTAARGLEIRAGWAPGPGGPTRGGSGSGAVGLGWAGEAGPGLWRDTRMRTRVK

SEQ ID NO: 845516 - protein, 1360 aa, Homo sapiens; identical to SEQ ID NO: 845505

SEQ ID NO: 845517 - protein, 1323 aa, Homo sapiens
MASDSPARSLDEIDLSALRDPAGIFELVELVGNGTYGQVYKGRHVKTGQLAAIKVMDVTGDEEEEIKQEINMLKKYSHHRNIATYYGAFIKKNPPGMDDQLWLVMEFCGAGSVTDLIKNTKGNTLKEEWIAYICREILRGLSHLHQHKVIHRDIKGQNVLLTENAEVKLVDFGVSAQLDRTVGRRNTFIGTPYWMAPEVIACDENPDATYDFKSDLWSLGITAIEMAEGAPPLCDMHPMRALFLIPRNPAPRLKSKKWSKKFQSFIESCLVKNHSQRPATEQLMKHPFIRDQPNERQVRIQLKDHIDRTKKKRGEKDETEYEYSGSEEEEEENDSGEPSSILNLPGESTLRRDFLRLQLANKERSEALRRQQLEQQQRENEEHKRQLLAERQKRIEEQKEQRRRLEEQQRREKELRKQQEREQRRHYEEQMRREEERRRAEHEQEYKRKQLEEQRQAERLQRQLKQERDYLVSLQHQRQEQRPVEKKPLYHYKEGMSPSEKPAWAKEVEERSRLNRQSSPAMPHKVANRISDPNLPPRSESFSISGVQPARTPPMLRPVDPQIPHLVAVKSQGPALTASQSVHEQPTKGLSGFQEALNVTSHRVEMPRQNSDPTSENPPLPTRIEKFDRSSWLRQEEDIPPKVPQRTTSISPALARKNSPGNGSALGPRLGSQPIRASNPDLRRTEPILESPLQRTSSGSSSSSSTPSSQPSSQGGSQPGSQAGSSERTRVRANSKSEGSPVLPHEPAKVKPEESRDITRPSRPADLTALAKELRELRIEETNRPMKKVTDYSSSSEESESSEEEEEDGESETHDGTVAVSDIPRLIPTGAPGSNEQYNVGMVGTHGLETSHADSFSGSISREGTLMIRETSGEKKRSGHSDSNGFAGHINLPDLVQQSHSPAGTPTEGLGRVSTHSQEMDSGTEYGMGSSTKASFTPFVDPRVYQTSPTDEDEEDEESSAAALFTSELLRQEQAKLNEARKISVVNVNPTNIRPHSDTPEIRKYKKRFNSEILCAALWGVNLLVGTENGLMLLDRSGQGKVYNLINRRRFQQMDVLEGLNVLVTISGKKNKLRVYYLSWLRNRILHNDPEVEKKQGWITVGDLEGCIHYKVVKYERIKFLVIALKNAVEIYAWAPKPYHKFMAFKSFADLQHKPLLVDLTVEEGQRLKVIFGSHTGFHVIDVDSGNSYDIYIPSHIQGNITPHAIVILPKTDGMEMLVCYEDEGVYVNTYGRITKDVVLQWGEMPTSVAYIHSNQIMGWGEKAIEIRSVETGHLDGVFMHKRAQRLKFLCERNDKVFFASVRSGGSSQVFFMTLNRNSMMNW

SEQ ID NO: 845518 - protein, 1352 aa, Homo sapiens; identical to SEQ ID NO: 845506

SEQ ID NO: 845519 - protein, 1331 aa, Homo sapiens
MASDSPARSLDEIDLSALRDPAGIFELVELVGNGTYGQVYKGRHVKTGQLAAIKVMDVTGDEEEEIKQEINMLKKYSHHRNIATYYGAFIKKNPPGMDDQLWLVMEFCGAGSVTDLIKNTKGNTLKEEWIAYICREILRGLSHLHQHKVIHRDIKGQNVLLTENAEVKLVDFGVSAQLDRTVGRRNTFIGTPYWMAPEVIACDENPDATYDFKSDLWSLGITAIEMAEGAPPLCDMHPMRALFLIPRNPAPRLKSKKWSKKFQSFIESCLVKNHSQRPATEQLMKHPFIRDQPNERQVRIQLKDHIDRTKKKRGEKDETEYEYSGSEEEEEENDSGEPSSILNLPGESTLRRDFLRLQLANKERSEALRRQQLEQQQRENEEHKRQLLAERQKRIEEQKEQRRRLEEQQRREKELRKQQEREQRRHYEEQMRREEERRRAEHEQEYKRKQLEEQRQAERLQRQLKQERDYLVSLQHQRQEQRPVEKKPLYHYKEGMSPSEKPAWAKEVEERSRLNRQSSPAMPHKVANRISDPNLPPRSESFSISGVQPARTPPMLRPVDPQIPHLVAVKSQGPALTASQSVHEQPTKGLSGFQEALNVTSHRVEMPRQNSDPTSENPPLPTRIEKFDRSSWLRQEEDIPPKVPQRTTSISPALARKNSPGNGSALGPRLGSQPIRASNPDLRRTEPILESPLQRTSSGSSSSSSTPSSQPSSQGGSQPGSQAGSSERTRVRANSKSEGSPVLPHEPAKVKPEESRDITRPSRPASYKKAIDEDLTALAKELRELRIEETNRPMKKVTDYSSSSEESESSEEEEEDGESETHDGTVAVSDIPRLIPTGAPGSNEQYNVGMVGTHGLETSHADSFSGSISREGTLMIRETSGEKKRSGHSDSNGFAGHINLPDLVQQSHSPAGTPTEGLGRVSTHSQEMDSGTEYGMGSSTKASFTPFVDPRVYQTSPTDEDEEDEESSAAALFTSELLRQEQAKLNEARKISVVNVNPTNIRPHSDTPEIRKYKKRFNSEILCAALWGVNLLVGTENGLMLLDRSGQGKVYNLINRRRFQQMDVLEGLNVLVTISGKKNKLRVYYLSWLRNRILHNDPEVEKKQGWITVGDLEGCIHYKVVKYERIKFLVIALKNAVEIYAWAPKPYHKFMAFKSFADLQHKPLLVDLTVEEGQRLKVIFGSHTGFHVIDVDSGNSYDIYIPSHIQGNITPHAIVILPKTDGMEMLVCYEDEGVYVNTYGRITKDVVLQWGEMPTSVAYIHSNQIMGWGEKAIEIRSVETGHLDGVFMHKRAQRLKFLCERNDKVFFASVRSGGSSQVFFMTLNRNSMMNW

SEQ ID NO: 845520 - protein, 1305 aa, Homo sapiens
MASDSPARSLDEIDLSALRDPAGIFELVELVGNGTYGQVYKGRHVKTGQLAAIKVMDVTGDEEEEIKQEINMLKKYSHHRNIATYYGAFIKKNPPGMDDQLWLVMEFCGAGSVTDLIKNTKGNTLKEEWIAYICREILRGLSHLHQHKVIHRDIKGQNVLLTENAEVKLVDFGVSAQLDRTVGRRNTFIGTPYWMAPEVIACDENPDATYDFKSDLWSLGITAIEMAEGAPPLCDMHPMRALFLIPRNPAPRLKSKKWSKKFQSFIESCLVKNHSQRPATEQLMKHPFIRDQPNERQVRIQLKDHIDRTKKKRGEKDETEYEYSGSEEEEEENDSGEPSSILNLPGESTLRRDFLRLQLANKERSEALRRQQLEQQQRENEEHKRQLLAERQKRIEEQKEQRRRLEEQQRREKELRKQQEREQRRHYEEQMRREEERRRAEHEQEYIRRQLEEEQRQLEILQQQLLHEQALLLEYKRKQLEEQRQAERLQRQLKQERDYLVSLQHQRQEQRPVEKKPLYHYKEGMSPSEKPAWAKEIPHLVAVKSQGPALTASQSVHEQPTKGLSGFQEALNVTSHRVEMPRQNSDPTSENPPLPTRIEKFDRSSWLRQEEDIPPKVPQRTTSISPALARKNSPGNGSALGPRLGSQPIRASNPDLRRTEPILESPLQRTSSGSSSSSSTPSSQPSSQGGSQPGSQAGSSERTRVRANSKSEGSPVLPHEPAKVKPEESRDITRPSRPASYKKAIDEDLTALAKELRELRIEETNRPMKKVTDYSSSSEESESSEEEEEDGESETHDGTVAVSDIPRLIPTGAPGSNEQYNVGMVGTHGLETSHADSFSGSISREGTLMIRETSGEKKRSGHSDSNGFAGHINLPDLVQQSHSPAGTPTEGLGRVSTHSQEMDSGTEYGMGSSTKASFTPFVDPRVYQTSPTDEDEEDEESSAAALFTSELLRQEQAKLNEARKISVVNVNPTNIRPHSDTPEIRKYKKRFNSEILCAALWGVNLLVGTENGLMLLDRSGQGKVYNLINRRRFQQMDVLEGLNVLVTISGKKNKLRVYYLSWLRNRILHNDPEVEKKQGWITVGDLEGCIHYKVVKYERIKFLVIALKNAVEIYAWAPKPYHKFMAFKSFADLQHKPLLVDLTVEEGQRLKVIFGSHTGFHVIDVDSGNSYDIYIPSHIQGNITPHAIVILPKTDGMEMLVCYEDEGVYVNTYGRITKDVVLQWGEMPTSVAYIHSNQIMGWGEKAIEIRSVETGHLDGVFMHKRAQRLKFLCERNDKVFFASVRSGGSSQVFFMTLNRNSMMNW

SEQ ID NO: 845521 - protein, 383 aa, Homo sapiens
MEMGLQKLSFKMSLTSLILFLKALFTSELLRQEQAKLNEARKISVVNVNPTNIRPHSDTPEIRKYKKRFNSEILCAALWGVNLLVGTENGLMLLDRSGQGKVYNLINRRRFQQMDVLEGLNVLVTISGKKNKLRVYYLSWLRNRILHNDPEVEKKQGWITVGDLEGCIHYKVVKYERIKFLVIALKNAVEIYAWAPKPYHKFMAFKSFADLQHKPLLVDLTVEEGQRLKVIFGSHTGFHVIDVDSGNSYDIYIPSHIQGNITPHAIVILPKTDGMEMLVCYEDEGVYVNTYGRITKDVVLQWGEMPTSVAYIHSNQIMGWGEKAIEIRSVETGHLDGVFMHKRAQRLKFLCERNDKVFFASVRSGGSSQVFFMTLNRNSMMNW

SEQ ID NO: 845522 - protein, 1296 aa, Homo sapiens
MASDSPARSLDEIDLSALRDPAGIFELVELVGNGTYGQVYKGRHVKTGQLAAIKVMDVTGDEEEEIKQEINMLKKYSHHRNIATYYGAFIKKNPPGMDDQLWLVMEFCGAGSVTDLIKNTKGNTLKEEWIAYICREILRGLSHLHQHKVIHRDIKGQNVLLTENAEVKLVDFGVSAQLDRTVGRRNTFIGTPYWMAPEVIACDENPDATYDFKSDLWSLGITAIEMAEGAPPLCDMHPMRALFLIPRNPAPRLKSKKWSKKFQSFIESCLVKNHSQRPATEQLMKHPFIRDQPNERQVRIQLKDHIDRTKKKRGEKDETEYEYSGSEEEEEENDSGEPSSILNLPGESTLRRDFLRLQLANKERSEALRRQQLEQQQRENEEHKRQLLAERQKRIEEQKEQRRRLEEQQRREKELRKQQEREQRRHYEEQMRREEERRRAEHEQEYIRRQLEEEQRQLEILQQQLLHEQALLLEYKRKQLEEQRQAERLQRQLKQERDYLVSLQHQRQEQRPVEKKPLYHYKEGMSPSEKPAWAKEVEERSRLNRQSSPAMPHKVANRISDPNLPPRSESFSISGVQPARTPPMLRPVDPQIPHLVAVKSQGPALTASQSVHEQPTKGLSGFQEALNVTSHRVEMPRQNSDPTSENPPLPTRIEKFDRSSWLRQEEDIPPKVPQRTTSISPALARKNSPGNGSALGPRLGSQPIRASNPDLRRTEPILESPLQRTSSGSSSSSSTPSSQPSSQGGSQPGSQAGSSERTRVRANSKSEGSPVLPHEPAKVKPEESRDITRPSRPADLTALAKELRELRIEETNRPMKKVTDYSSSSEESESSEEEEEDGESETHDGTVAVSDIPRLIPTGAPGSNEQYNVGMVGTHGLETSHADSFSGSISREGTLMIRETSGEKKRSGHSDSNGFAGHINLPDLVQQSHSPAGTPTEGLGRVSTHSQEMDSGTEYGMGSSTKASFTPFVDPRVYQTSPTDEDEEDEESSAAALFTSELLRQEQAKLNEARKISVVNVNPTNIRPHSDTPEIRKYKKRFNSEILCAALWGVNLLVGTENGLMLLDRSGQGKVYNLINRRRFQQMDVLEGLNVLVTISGKKNKLRVYYLSWLRNRILHNDPEVEKKQGWITVGDLEGCIHYKVVKYERIKFLVIALKNAVEIYAWAPKPYHKFMAFKSFADLQHKPLLVDLTVEEGQRLKVIFGSHTGFHVIDVDSGNSYDIYIPSHIQGNITPHAIVILPKTDGMEMLVCYEDEGVYVNTYGRITKDVVLQWGEMPTSVGRLTIPYLLQQLHPPNET

SEQ ID NO: 845523 - protein, 258 aa, Homo sapiens
DLIDTAFPLCLWLYVSFILLCLSPALDPFCRSWLVSGNGSHPMDSHSGEPALLPCGTCDMVFRSSALLATHTQRFCIGHPTQEMTFGAQASVATEPQRAAVVPQEHQGVPQEPQGLPDQQASRSALKRLTEEVELPTFPQGSKRLSVFPKPVDHTWDRFCPRRDRGSLLPPGAVAAAIPTGNAALDNRGPQGVRGALDTFRGAAQSPMSEAVGSPSERLRALFRTRARRVAEMEAQSRALQLRGEGEGDGGRGPRTSS

SEQ ID NO: 845524 - protein, 239 aa, Homo sapiens
DLIDTAFPLCLWLYVSFILLCLSPALDPFCRSWLVSGNGSHPMDSHSGEPALLPCGTCDMVFRSSALLATHTQRFCIGHPTQEMTFGAQASVATEPQRAAKLSRRLQVVACTRGGMSRLFGLEQEIRELQAEAGRTRGALEVLGARIQELQAEPGNPLSSRREAELYSPVQKANPGTLAAEIRALREAYIRDGGRDPGVLGQIWQLQVEASALELQRSQTRRGRAGATSGELPVVEAEN

SEQ ID NO: 845525 - protein, 117 aa, Homo sapiens
DLIDTAFPLCLWLYVSFILLCLSPALDPFCRSWLVSGNGSHPMDSHSGEPALLPCGTCDMVFRSSALLATHTQRFCIGHPTQEMTFGAQASVATEPQRAAVRASMAMGGDSKEPGPL

SEQ ID NO: 845526 - protein, 779 aa, Homo sapiens
MSQGRTISQAPARRERPRKDPLRHLRTREKRGPSGCSGGPNTVYLQVVAAGSRDSGAALYVFSEFNRYLFNCGEGVQRLMQEHKLKVARLDNIFLTRMHWSNVGGLSGMILTLKETGLPKCVLSGPPQLEKYLEAIKIFSGPLKGIELAVRPHSAPEYEDETMTVYQIPIHSEQRRGKHQPWQSPERPLSRLSPERSSDSELNENEPHLPHGVSQRRGVRDSSLVVAFICKLHLKRGNFLVLKAKEMGLPVGTAAIAPIIAAVKDGKSITHEGREILAEELCTPPDPGAAFVVVECPDESFIQPICENATFQRFGPDTQHLVLNENCASVHNLRSHKIQTQLNLIHPDIFPLLTSFRCKKEGPTLSVPMVQGECLLKYQLRPRREWQRDAIITCNPEEFIVEALQLPNFQQSVQEYRRSAQDGPAPAEKRSQYPEIIFLGTGSAIPMKIRNVSATLVNISPDTSLLLDCGEGTFGQLCRHYGDQVDRVLGTLAAVFVSHLHADHHTGLPSILLQRERALASLGKPLHPLLVVAPNQLKAWLQQYHNQCQEVLHHISMIPAKCLQEGAEISSPAVERLISSLLRTCDLEEFQTCLVRHCKHAFGCALVHTSGWKVVYSGDTMPCEALVRMGKDATLLIHEATLEDGLEEEAVEKTHSTTSQAISVGMRMNAEFIMLNHFSQRYAKVPLFSPNFSEKVGVAFDHMKVCFGDFPTMPKLIPPLKALFAGDIEEMEERREKRELRQVRAALLSRELAGGLEDGEPQQKRAHTEEPQAKKVRAQ

SEQ ID NO: 845527 - protein, 771 aa, Homo sapiens
MSQGRTISQAPARRERPRKDPLRHLRTREKRGPSGCSGGPNTVYLQVVAAGSRDSGAALYVFSEFNRYLFNCGEGVQRLMQEHKLKVARLDNIFLTRMHWSNVGGLSGMILTLKETGLPKCVLSGPPQLEKYLEAIKIFSGPLKGIELAVRPHSAPEYEDETMTVYQIPIHSVSQRRGVRDSSLVVAFICKLHLKRGNFLVLKAKEMGLPVGTAAIAPIIAAVKDGKSITHEGREILAEELCTPPDPGAAFVVVECPDESFIQPICENATFQRYQGKADAPVALVVHMAPASVLVDSRYQQWMERFGPDTQHLVLNENCASVHNLRSHKIQTQLNLIHPDIFPLLTSFRCKKEGPTLSVPMVQGECLLKYQLRPRREWQRDAIITCNPEEFIVEALQLPNFQQSVQEYRRSAQDGPAPAEKRSQYPEIIFLGTGSAIPMKIRNVSATLVNISPDTSLLLDCGEGTFGQLCRHYGDQVDRVLGTLAAVFVSHLHADHHTGLPSILLQRERALASLGKPLHPLLVVAPNQLKAWLQQYHNQCQEVLHHISMIPAKCLQEGAEISSPAVERLISSLLRTCDLEEFQTCLVRHCKHAFGCALVHTSGWKVVYSGDTMPCEALVRMGKDATLLIHEATLEDGLEEEAVEKTHSTTSQAISVGMRMNAEFIMLNHFSQRYAKVPLFSPNFSEKVGVAFDHMKVCFGDFPTMPKLIPPLKALFAGDIEEMEERREKRELRQVRAALLSRELAGGLEDGEPQQKRAHTEEPQAKKVRAQ

SEQ ID NO: 845528 - protein, 565 aa, Homo sapiens
MGLPVGTAAIAPIIAAVKDGKSITHEGREILAEELCTPPDPGAAFVVVECPDESFIQPICENATFQRYQGKADAPVALVVHMAPASVLVDSRYQQWMERFGPDTQHLVLNENCASVHNLRSHKIQTQLNLIHPDIFPLLTSFRCKKEGPTLSVPMVQGECLLKYQLRPRREWQRDAIITCNPEEFIVEALQLPNFQQSVQEYRRSAQDGPAPAEKRSQYPEIIFLGTGSAIPMKIRNVSATLVNISPDTSLLLDCGEGTFGQLCRHYGDQVDRVLGTLAAVFVSHLHADHHTGLPSILLQRERALASLGKPLHPLLVVAPNQLKAWLQQYHNQCQEVLHHISMIPAKCLQEGAEISSPAVERLISSLLRTCDLEEFQTCLVRHCKHAFGCALVHTSGWKVVYSGDTMPCEALVRMGKDATLLIHEATLEDGLEEEAVEKTHSTTSQAISVGMRMNAEFIMLNHFSQRYAKVPLFSPNFSEKVGVAFDHMKVCFGDFPTMPKLIPPLKALFAGDIEEMEERREKRELRQVRAALLSRELAGGLEDGEPQQKRAHTEEPQAKKVRAQ

SEQ ID NO: 845529 - protein, 578 aa, Homo sapiens
AGARESCGGSSKGDGLPDGTAAIAPIIAAVKDGKSITHEGREILAEELCTPPDPGAAFVVVECPDESFIQPICENATFQRYQGKADAPVALVVHMAPASVLVDSRYQQWMERFGPDTQHLVLNENCASVHNLRSHKIQTQLNLIHPDIFPLLTSFRCKKEGPTLSVPMVQGECLLKYQLRPRREWQRDAIITCNPEEFIVEALQLPNFQQSVQEYRRSAQDGPAPAEKRSQYPEIIFLGTGSAIPMKIRNVSATLVNISPDTSLLLDCGEGTFGQLCRHYGDQVDRVLGTLAAVFVSHLHADHHTGLPSILLQRERALASLGKPLHPLLVVAPNQLKAWLQQYHNQCQEVLHHISMIPAKCLQEGAEISSPAVERLISSLLRTCDLEEFQTCLVRHCKHAFGCALVHTSGWKVVYSGDTMPCEALVRMGKDATLLIHEATLEDGLEEEAVEKTHSTTSQAISVGMRMNAEFIMLNHFSQRYAKVPLFSPNFSEKVGVAFDHMKVCFGDFPTMPKLIPPLKALFAGDIEEMEERREKRELRQVRAALLSRELAGGLEDGEPQQKRAHTEEPQAKKVRAQ

SEQ ID NO: 845530 - protein, 456 aa, Homo sapiens
MSQGRTISQAPARRERPRKDPLRHLRTREKRGPSGCSGGPNTVYLQVVAAGSRDSGAALYVFSEFNRYLFNCGEGVQRLMQEHKLKVARLDNIFLTRMHWSNVGGLSGMILTLKETGLPKCVLSGPPQLEKYLEAIKIFSGPLKGIELAVRPHSAPEYEDETMTVYQIPIHSEQRRGKHQPWQSPERPLSRLSPERSSDSELNENEPHLPHGVSQRRGVRDSSLVVAFICKLHLKRGNFLVLKAKEMGLPVGTAAIAPIIAAVKDGKSITHEGREILAEELCTPPDPGAAFVVVECPDESFIQPICENATFQRYQGKADAPVALVVHMAPASVLVDSRYQQWMERFGPDTQHLVLNENCASVHNLRSHKIQTQLNLIHPDIFPLLTSFRCKKEGPTLSVPMVQGECLLKYQLRPRREWQRDAIITCNPEEFIVEALQLPNFHSTTTSARRSCTTSV

SEQ ID NO: 845531 - protein, 456 aa, Homo sapiens; identical to SEQ ID NO: 845530

SEQ ID NO: 845532 - protein, 289 aa, Homo sapiens
SGCGAARWCTGNAGVGDRRLSQFWWRRAHASLGKPLHPLLVVAPNQLKAWLQQYHNQCQEVLHHISMIPAKCLQEGAEISSPAVERLISSLLRTCDLEEFQTCLVRHCKHAFGCALVHTSGWKVVYSGDTMPCEALVRMGKDATLLIHEATLEDGLEEEAVEKTHSTTSQAISVGMRMNAEFIMLNHFSQRYAKVPLFSPNFSEKVGVAFDHMKVCFGDFPTMPKLIPPLKALFAGDIEEMEERREKRELRQVRAALLSRELAGGLEDGEPQQKRAHTEEPQAKKVRAQ

SEQ ID NO: 845533 - protein, 431 aa, Homo sapiens
MSQGRTISQAPARRERPRKDPLRHLRTREKRGPSGCSGGPNTVYLQVVAAGSRDSGAALYVFSEFNRYLFNCGEGVQRLMQEHKLKVARLDNIFLTRMHWSNVGGLSGMILTLKETGLPKCVLSGPPQLEKYLEAIKIFSGPLKGIELAVRPHSAPEYEDETMTVYQIPIHSEQRRGKHQPWQSPERPLSRLSPERSSDSELNENEPHLPHGVSQRRGVRDSSLVVAFICKLHLKRGNFLVLKAKEMGLPVGTAAIAPIIAAVKDGKSITHEGREILAEELCTPPDPGAAFVVVECPDESFIQPICENATFQRYQGKADAPVALVVHMAPASVLVDSRYQQWMERFGPDTQHLVLNENCASVHNLRSHKIQTQLNLIHPDIFPLLTSFRCKKEGPTLSVPMVQGECLLKLPAAFPHRRSSKVTRQGSPYSL

SEQ ID NO: 845534 - protein, 811 aa, Homo sapiens
MSQGRTISQAPARRERPRKDPLRHLRTREKRGPSGCSGGPNTVYLQVVAAGSRDSGAALYVFSEFNRYLFNCGEGVQRLMQEHKLKVARLDNIFLTRMHWSNVGGLSGMILTLKETGLPKCVLSGPPQLEKYLEAIKIFSGPLKGIELAVRPHSAPEYEDETMTVYQIPIHSEQRRGKHQPWQSPERPLSRLSPERSSDSELNENEPHLPHGVSQRRGVRDSSLVVAFICKLHLKRGNFLVLKAKEMGLPVGTAAIAPIIAAVKDGKSITHEGREILAEELCTPPDPGAAFVVVECPDESFIQPICENATFQRYQGKADAPVALVVHMAPASVLVDSRYQQWMERFGPDTQHLVLNENCASVHNLRSHKIQTQLNLIHPDIFPLLTSFRCKKEGPTLSVPMVQGECLLKYQLRPRREWQRDAIITCNPEEFIVEALQLPNFQQSVQEYRRSAQDGPAPAEKRSQYPEIIFLGTGSAIPMKIRNVSATLVNISPDTSLLLDCGEGTFGQLCRHYGDQVDRVLGTLAAVFVSHLHADHHTGLPSILLQRERALASLGKPLHPLLVVAPNQLKAWLQQYHNQCQEVLHHISMIPAKCLQEGAEISSPAVERLISSLLRTCDLEEFQTCLVRHCKHAFGCALVHTSGWKVVYSGDTMPCEALVRMGKDATLLIHEATLEDGLEEEAVEKTHSTTSQAISVGMRMNAEFIMLNHFSQRYAKVPLFSPNFSEKVGVAFDHMKVCFGDFPTMPKLIPPLKALFAGDIEEMEERREKRELRQVRAALLSRELAGGLEDGEPQQKRAHTEEPQAKKVRAQ

SEQ ID NO: 845535 - protein, 837 aa, Homo sapiens
MSQGRTISQAPARRERPRKDPLRHLRTREKRGPSGCSGGPNTVYLQVVAAGSRDSGAALYVFSEFNRYLFNCGEGVQRLMQEHKLKVARLDNIFLTRMHWSNVGGLSGMILTLKETGLPKCVLSGPPQLEKYLEAIKIFSGPLKGIELAVRPHSAPEYEDETMTVYQIPIHSEQRRGKHQPWQSPERPLSRLSPERSSDSELNENEPHLPHGVSQRRGVRDSSLVVAFICKLHLKRGNFLVLKAKEMGLPVGTAAIAPIIAAVKDGKSITHEGREILAEELCTPPDPGAAFVVVECPDESFIQPICENATFQRYQGKADAPVALVVHMAPASVLVDSRYQQWMERFGPDTQHLVLNENCASVHNLRSHKIQTQLNLIHPDIFPLLTSFRCKKEGPTLSVPMVQGECLLKYQLRPRREWQRDAIITCNPEEFIVEALQLPNFQQSVQEYRRSAQDGPAPAEKRSQYPEIIFLGTGSAIPMKIRNVSATLVNISPDTSLLLDCGEGTFGQLCRHYGDQVDRVLGTLAAVFVSHLHADHHTGLPSILLQRERALASLGKPLHPLLVVAPNQLKAWLQQYHNQCQEVLHHISMIPAKCLQEGAEISSPAVERLISSLLRTCDLEEVRGTAAGIMGARWGAELQSPPAPPFQFQTCLVRHCKHAFGCALVHTSGWKVVYSGDTMPCEALVRMGKDATLLIHEATLEDGLEEEAVEKTHSTTSQAISVGMRMNAEFIMLNHFSQRYAKVPLFSPNFSEKVGVAFDHMKVCFGDFPTMPKLIPPLKALFAGDIEEMEERREKRELRQVRAALLSRELAGGLEDGEPQQKRAHTEEPQAKKVRAQ

SEQ ID NO: 845536 - protein, 811 aa, Homo sapiens; identical to SEQ ID NO: 845534

SEQ ID NO: 845537 - protein, 856 aa, Homo sapiens
MSQGRTISQAPARRERPRKDPLRHLRTREKRGPSGCSGGPNTVYLQVVAAGSRDSGAALYVFSEFNRSVNEPRPVPLGPQCGAALSIGAPPRASASLLHTCGSLLRGFVELWYLFNCGEGVQRLMQEHKLKVARLDNIFLTRMHWSNVGGLSGMILTLKETGLPKCVLSGPPQLEKYLEAIKIFSGPLKGIELAVRPHSAPEYEDETMTVYQIPIHSEQRRGKHQPWQSPERPLSRLSPERSSDSELNENEPHLPHGVSQRRGVRDSSLVVAFICKLHLKRGNFLVLKAKEMGLPVGTAAIAPIIAAVKDGKSITHEGREILAEELCTPPDPGAAFVVVECPDESFIQPICENATFQRYQGKADAPVALVVHMAPASVLVDSRYQQWMERFGPDTQHLVLNENCASVHNLRSHKIQTQLNLIHPDIFPLLTSFRCKKEGPTLSVPMVQGECLLKYQLRPRREWQRDAIITCNPEEFIVEALQLPNFQQSVQEYRRSAQDGPAPAEKRSQYPEIIFLGTGSAIPMKIRNVSATLVNISPDTSLLLDCGEGTFGQLCRHYGDQVDRVLGTLAAVFVSHLHADHHTGLPSILLQRERALASLGKPLHPLLVVAPNQLKAWLQQYHNQCQEVLHHISMIPAKCLQEGAEISSPAVERLISSLLRTCDLEEFQTCLVRHCKHAFGCALVHTSGWKVVYSGDTMPCEALVRMGKDATLLIHEATLEDGLEEEAVEKTHSTTSQAISVGMRMNAEFIMLNHFSQRYAKVPLFSPNFSEKVGVAFDHMKVCFGDFPTMPKLIPPLKALFAGDIEEMEERREKRELRQVRAALLSRELAGGLEDGEPQQKRAHTEEPQAKKVRAQ

SEQ ID NO: 845538 - protein, 456 aa, Homo sapiens; identical to SEQ ID NO: 845530

SEQ ID NO: 845539 - protein, 565 aa, Homo sapiens
MLFPSLTAAMMGAMAAVPTGRSITHEGREILAEELCTPPDPGAAFVVVECPDESFIQPICENATFQRYQGKADAPVALVVHMAPASVLVDSRYQQWMERFGPDTQHLVLNENCASVHNLRSHKIQTQLNLIHPDIFPLLTSFRCKKEGPTLSVPMVQGECLLKYQLRPRREWQRDAIITCNPEEFIVEALQLPNFQQSVQEYRRSAQDGPAPAEKRSQYPEIIFLGTGSAIPMKIRNVSATLVNISPDTSLLLDCGEGTFGQLCRHYGDQVDRVLGTLAAVFVSHLHADHHTGLPSILLQRERALASLGKPLHPLLVVAPNQLKAWLQQYHNQCQEVLHHISMIPAKCLQEGAEISSPAVERLISSLLRTCDLEEFQTCLVRHCKHAFGCALVHTSGWKVVYSGDTMPCEALVRMGKDATLLIHEATLEDGLEEEAVEKTHSTTSQAISVGMRMNAEFIMLNHFSQRYAKVPLFSPNFSEKVGVAFDHMKVCFGDFPTMPKLIPPLKALFAGDIEEMEERREKRELRQVRAALLSRELAGGLEDGEPQQKRAHTEEPQAKKVRAQ

SEQ ID NO: 845540 - protein, 484 aa, Homo sapiens [sequence omitted]

SEQ ID NO: 845541 - protein, 129 aa, Homo sapiens
MSQGRTISQAPARRERPRKDPLRHLRTREKRGPSGCSGGPNTVYLQVVAAGSRDSGAALYVFSEFNRSVNEPRPVPLGPQCGAASEHRGTSQGFGFPASHMWFTVAGVRGVMVGGKSEILCIHVISADL

SEQ ID NO: 845542 - protein, 174 aa, Homo sapiens
MGIFVKTIFPNGSAAEDGRLKEGDEILDVNGIPIKGLTFQEAIHTFKQIRSGLFVLTVRTKLVSPSLTPCSTPTHMSRSASPNFNTSGGASAGGSDEGSSSSLGRKTPGPKDRIVMEVTLNKGDSSYSLPLSHFLNNILESVVSLILPCCSMNYSFGTIFYQQHVVSAWDSEVR

SEQ ID NO: 845543 - protein, 2125 aa, Homo sapiens
MSRSASPNFNTSGGASAGGSDEGSSSSLGRKTPGPKDRIVMEVTLNKEPRVGLGIGACCLALENSPPGIYIHSLAPGSVAKMESNLSRGDQILEVNSVNVRHAALSKVHAILSKCPPGPVRLVIGRHPESKGTPLKSPSLAKKDSLISESELSQYFAHDVPGPLSDFMVAGSEDEDHPGSGCSTSEEGSLPPSTSTHKEPGKPRANSLVTLGSHRASGLFHKQVTVARQASLPGSPQALRNPLLRQRKVGCYDANDASDEEEFDREGDCISLPGALPGPIRPLSEDDPRRVSISSSKGMDVHNQEERPRKTLVSKAISAPLLGSSVDLEESIPEGMVDAASYAANLTDSAEAPKGSPGSWWKKELSGSSSAPKLEYTVRTDTQSPTNTGSPSSPQQKSEGLGSRHRPVARVSPHCKRSEAEAKPSGSQTVNLTGRANDPCDLDSRVQATSVKVTVAGFQPGGAVEKLCQESLGKLTTGDACVSTSCELASALSHLDASHLTENLPKAASELGQQPMTSSDLISSPGKKGAAHPDPSKTSVDTGQVSRPENPSQPASPRVAKCKARSPVRLPHEGSPSPGEKAAAPPDYSKTRSASETSTPHNTRRVAALRGAGPGAEGMTPAGAVLPGDPLTSQEQRQGAPGNHSKALEMTGIHAPESSQEPSLLEGADSVSSRAPQASLSMLPSTDNTKEACGHVSGHCCPGGSRESPVTDIDSFIKELDASAARSPSSQTGDSGSQEGSAQGHPPAGAGGGSSCRAEPVPGGQTSSPRRAWAAGAPAYPQWASQPSVLDSINPDKHFTVNKNFLSNYSRNFSSFHEDSTSLSGLGDSTEPSLSSMYGDAEDSSSDPESLTEAPRASARDGWSPPRSRVSLHKEDPSESEEEQIEICSTRGCPNPPSSPAHLPTQAAICPASAKVLSLKYSTPRESVASPREKAACLPGSYTSGPDSSQPSSLLEMSSQEHETHADISTSQNHRPSCAEETTEVTSASSAMENSPLSKVARHFHSPPIILSSPNMVNGLEHDLLDDETLNQYETSINAAASLSSFSVDVPKNGESVLENLHISESQDLDDLLQKPKMIARRPIMAWFKEINKHNQGTHLRSKTEKEQPLMPARSPDSKIQMVSSSQKKGVTVPHSPPQPKTNLENKDLSKKSPAEMLLTNGQKAKCGPKLKRLSLKGKAKVNSEAPAANAVKAGGTDHRKPLISPQTSHKTLSKAVSQRLHVADHEDPDRNTTAAPRSPQCVLESKPPLATSGPLKPSVSDTSIRTFVSPLTSPKPVPEQGMWSRFHMAVLSEPDRGCPTTPKSPKCRAEGRAPRADSGPVSPAASRNGMSVAGNRQSEPRLASHVAADTAQPRPTGEKGGNIMASDRLERTNQLKIVEISAEAVSETVCGNKPAESDRRGGCLAQGNCQEKSEIRLYRQVAESSTSHPSSLPSHASQAEQEMSRSFSMAKLASSSSSLQTAIRKAEYSQGKSSLMSDSRGVPRNSIPGGPSGEDHLYFTPRPATRTYSMPAQFSSHFGREGHPPHSLGRSRDSQVPVTSSVVPEAKASRGGLPSLANGQGIYSVKPLLDTSRNLPATDEGDIISVQETSCLVTDKIKVTRRHYCYEQNWPHESTSFFSVKQRIKSFENLANADRPVAKSGASPFLSVSSKPPIGRRSSGSIVSGSLGHPGDAAARLLRRSLSSCSENQSEAGTLLPQMAKSPSIMTLTISRQNPPETSSKGSDSELKKSLGPLGIPTPTMTLASPVKRNKSSVRHTQPSPVSRSKLQELRALSMPDLDKLCSEDYSAGPSAVLFKTELEITPRRSPGPPAGGVSCPEKGGNRACPGGSGPKTSAAETPSSASDTGEAAQDLPFRRSWSVNLDQLLVSAGDQQRLQSVLSSVGSKSTILTLIQEAKAQSENEADVCFIVLNRKEGSGLGFSVAGGTDVEPKSITVHRVFSQGAASQEGTMNRGDFLLSVNGASLAGLAHGNVLKVLHQAQLHKDALVVIKKGMDQPRPSARQEPPTANGKGLLSRKTIPLEPGIGRSVAVHDALCVEVLKTSAGLGLSLDGGKSSVTGDGPLVIKRVYKGGAAEQAGIIEAGDEILAINGKPLVGLMHFDAWNIMKSVPEGPVQLLIRKHRNSS

SEQ ID NO: 845544 - protein, 2506 aa, Homo sapiens
MLRRFKHKAHSTYNGNSSNSSEPGETPTLELGDRTAKKGKRTRKFGVISRPPANKAPEESKGSAGCEVSSDPSTELENGPDPELGNGHVFQLENGPDSLKEVAGPHLERSEVDRGTEHRIPKTDAPLTTSNDKRRFSKGGKTDFQSSDCLARQEEVGRIWKMELLKESDGLGIQVSGGRGSKRSPHAIVVTQVKEGGASSQEYHIVKKSTRSLSTTQVESPWRLIRPSVISIIGLYKEKGKGLGFSIAGGRDCIRGQMGIFVKTIFPNGSAAEDGRLKEGDEILDVNGIPIKGLTFQEAIHTFKVTTFLLISFILFSFLISFWLGFGELFFFFNPLYKDIPNVSAHLSSLFSQQIRSGLFVLTVRTKLVSPSLTPCSTPTHMSRSASPNFNTSGGASAGGSDEGSSSSLGRKTPGPKDRIVMEVTLNKEPRVGLGIGACCLALENSPPGIYIHSLAPGSVAKMESNLSRGDQILEVNSVNVRHAALSKVHAILSKCPPGPVRLVIGRHPESKGTPLKSPSLAKKDSLISESELSQYFAHDVPGPLSDFMVAGSEDEDHPGSGCSTSEEGSLPPSTSTHKEPGKPRANSLVTLGSHRASGLFHKQVTVARQASLPGSPQALRNPLLRQRKVGCYDANDASDEEEFDREGDCISLPGALPGPIRPLSEDDPRRVSISSSKGMDVHNQEERPRKTLVSKAISAPLLGSSVDLEESIPEGMVDAASYAANLTDSAEAPKGSPGSWWKKELSGSSSAPKLEYTVRTDTQSPTNTGSPSSPQQKSEGLGSRHRPVARVSPHCKRSEAEAKPSGSQTVNLTGRANDPCDLDSRVQATSVKVTVAGFQPGGAVEKLCQESLGKLTTGDACVSTSCELASALSHLDASHLTENLPKAASELGQQPMTSSDLISSPGKKGAAHPDPSKTSVDTGQVSRPENPSQPASPRVAKCKARSPVRLPHEGSPSPGEKAAAPPDYSKTRSASETSTPHNTRRVAALRGAGPGAEGMTPAGAVLPGDPLTSQEQRQGAPGNHSKALEMTGIHAPESSQEPSLLEGADSVSSRAPQASLSMLPSTDNTKEACGHVSGHCCPGGSRESPVTDIDSFIKELDASAARSPSSQTGDSGSQEGSAQGHPPAGAGGGSSCRAEPVPGGQTSSPRRAWAAGAPAYPQWASQPSVLDSINPDKHFTVNKNFLSNYSRNFSSFHEDSTSLSGLGDSTEPSLSSMYGDAEDSSSDPESLTEAPRASARDGWSPPRSRVSLHKEDPSESEEEQIEICSTRGCPNPPSSPAHLPTQAAICPASAKVLSLKYSTPRESVASPREKAACLPGSYTSGPDSSQPSSLLEMSSQEHETHADISTSQNHRPSCAEETTEVTSASSAMENSPLSKVARHFHSPPIILSSPNMVNGLEHDLLDDETLNQYETSINAAASLSSFSVDVPKNGESVLENLHISESQDLDDLLQKPKMIARRPIMAWFKEINKHNQGTHLRSKTEKEQPLMPARSPDSKIQMVSSSQKKGVTVPHSPPQPKTNLENKDLSKKSPAEMLLTNGQKAKCGPKLKRLSLKGKAKVNSEAPAANAVKAGGTDHRKPLISPQTSHKTLSKAVSQRLHVADHEDPDRNTTAAPRSPQCVLESKPPLATSGPLKPSVSDTSIRTFVSPLTSPKPVPEQGMWSRFHMAVLSEPDRGCPTTPKSPKCRAEGRAPRADSGPVSPAASRNGMSVAGNRQSEPRLASHVAADTAQPRPTGEKGGNIMASDRLERTNQLKIVEISAEAVSETVCGNKPAESDRRGGCLAQGNCQEKSEIRLYRQVAESSTSHPSSLPSHASQAEQEMSRSFSMAKLASSSSSLQTAIRKAEYSQGKSSLMSDSRGVPRNSIPGGPSGEDHLYFTPRPATRTYSMPAQFSSHFGREGHPPHSLGRSRDSQVPVTSSVVPEAKASRGGLPSLANGQGIYSVKPLLDTSRNLPATDEGDIISVQETSCLVTDKIKVTRRHYCYEQNWPHESTSFFSVKQRIKSFENLANADRPVAKSGASPFLSVSSKPPIGRRSSGSIVSGSLGHPGDAAARLLRRSLSSCSENQSEAGTLLPQMAKSPSIMTLTISRQNPPETSSKGSDSELKKSLGPLGIPTPTMTLASPVKRNKSSVRHTQPSPVSRSKLQELRALSMPDLDKLCSEDYSAGPSAVLFKTELEITPRRSPGPPAGGVSCPEKGGNRACPGGSGPKTSAAETPSSASDTGEAAQDLPFRRSWSVNLDQLLVSAGDQQRLQSVLSSVGSKSTILTLIQEAKAQSENEADVCFIVLNRKEGSGLGFSVAGGTDVEPKSITVHRVFSQGAASQEGTMNRGDFLLSVNGASLAGLAHGNVLKVLHQAQLHKDALVVIKKGMDQPRPSARQEPPTANGKGLLSRKTIPLEPGIGRSVAVHDALCVEVLKTSAGLGLSLDGGKSSVTGDGPLVIKRVYKGGAAEQAGIIEAGDEILAINGKPLVGLMHFDAWNIMKSVPEGPVQLLIRKHRNSS

SEQ ID NO: 845545 - protein, 1507 aa, Homo sapiens
MTPAGAVLPGDPLTSQEQRQGAPGNHSKALEMTGIHAPESSQEPSLLEGADSVSSRAPQASLSMLPSTDNTKEACGHVSGHCCPGGSRESPVTDIDSFIKELDASAARSPSSQTGDSGSQEGSAQGHPPAGAGGGSSCRAEPVPGGQTSSPRRAWAAGAPAYPQWASQPSVLDSINPDKHFTVNKNFLSNYSRNFSSFHEDSTSLSGLGDSTEPSLSSMYGDAEDSSSDPESLTEAPRASARDGWSPPRSRVSLHKEDPSESEEEQIEICSTRGCPNPPSSPAHLPTQAAICPASAKVLSLKYSTPRESVASPREKAACLPGSYTSGPDSSQPSSLLEMSSQEHETHADISTSQNHRPSCAEETTEVTSASSAMENSPLSKVARHFHSPPIILSSPNMVNGLEHDLLDDETLNQYETSINAAASLSSFSVDVPKNGESVLENLHISESQDLDDLLQKPKMIARRPIMAWFKEINKHNQGTHLRSKTEKEQPLMPARSPDSKIQMVSSSQKKGVTVPHSPPQPKTNLENKDLSKKSPAEMLLTNGQKAKCGPKLKRLSLKGKAKVNSEAPAANAVKAGGTDHRKPLISPQTSHKTLSKAVSQRLHVADHEDPDRNTTAAPRSPQCVLESKPPLATSGPLKPSVSDTSIRTFVSPLTSPKPVPEQGMWSRFHMAVLSEPDRGCPTTPKSPKCRAEGRAPRADSGPVSPAASRNGMSVAGNRQSEPRLASHVAADTAQPRPTGEKGGNIMASDRLERTNQLKIVEISAEAVSETVCGNKPAESDRRGGCLAQGNCQEKSEIRLYRQVAESSTSHPSSLPSHASQAEQEMSRSFSMAKLASSSSSLQTAIRKAEYSQGKSSLMSDSRGVPRNSIPGGPSGEDHLYFTPRPATRTYSMPAQFSSHFGREGHPPHSLGRSRDSQVPVTSSVVPEAKASRGGLPSLANGQGIYSVKPLLDTSRNLPATDEGDIISVQETSCLVTDKIKVTRRHYCYEQNWPHESTSFFSVKQRIKSFENLANADRPVAKSGASPFLSVSSKPPIGRRSSGSIVSGSLGHPGDAAARLLRRSLSSCSENQSEAGTLLPQMAKSPSIMTLTISRQNPPETSSKGSDSELKKSLGPLGIPTPTMTLASPVKRNKSSVRHTQPSPVSRSKLQELRALSMPDLDKLCSEDYSAGPSAVLFKTELEITPRRSPGPPAGGVSCPEKGGNRACPGGSGPKTSAAETPSSASDTGEAAQDLPFRRSWSVNLDQLLVSAGDQQRLQSVLSSVGSKSTILTLIQEAKAQSENEADVCFIVLNRKEGSGLGFSVAGGTDVEPKSITVHRVFSQGAASQEGTMNRGDFLLSVNGASLAGLAHGNVLKVLHQAQLHKDALVVIKKGMDQPRPSARQEPPTANGKGLLSRKTIPLEPGIGRSVAVHDALCVEVLKTSAGLGLSLDGGKSSVTGDGPLVIKRVYKGGAAEQAGIIEAGDEILAINGKPLVGLMHFDAWNIMKSVPEGPVQLLIRKHRNSS

SEQ ID NO: 845546 - protein, 2159 aa, Homo sapiens
MSRSASPNFNTSGGASAGGSDEGSSSSLGRKTPGPKDRIVMEVTLNKEPRVGLGIGACCLALENSPPGIYIHSLAPGSVAKMESNLSRGDQILEVNSVNVRHAALSKVHAILSKCPPGPVRLVIGRHPESKGTPLKSPSLAKKDSLISESELSQYFAHDVPGPLSDFMVAGSEDEDHPGSGCSTSEEGSLPPSTSTHKEPGKPRANSLVTLGSHRASGLFHKQVTVARQASLPGSPQALRNPLLRQRKVGCYDANDASDEEEFDREGDCISLPGALPGPIRPLSEDDPRRVSISSSKGMDVHNQEERPRKTLVSKAISAPLLGSSVDLEESIPEGMVDAASYAANLTDSAEAPKGSPGSWWKKELSGSSSAPKLEYTVRTDTQSPTNTGSPSSPQQKSEGLGSRHRPVARVSPHCKRSEAEAKPSGSQTVNLTGRANDPCDLDSRVQATSVKVTVAGFQPGGAVEKLCQESLGKLTTGDACVSTSCELASALSHLDASHLTENLPKAASELGQQPMTSSDLISSPGKKGAAHPDPSKTSVDTGQVSRPENPSQPASPRVAKCKARSPVRLPHEGSPSPGEKAAAPPDYSKTRSASETSTPHNTRRVAALRGAGPGAEGMTPAGAVLPGDPLTSQEQRQGAPGNHSKALEMTGIHAPESSQEPSLLEGADSVSSRAPQASLSMLPSTDNTKEACGHVSGHCCPGGSRESPVTDIDSFIKELDASAARSPSSQTGDSGSQEGSAQGHPPAGAGGGSSCRAEPVPGGQTSSPRRAWAAGAPAYPQWASQPSVLDSINPDKHFTVNKNFLSNYSRNFSSFHEDSTSLSGLGDSTEPSLSSMYGDAEDSSSDPESLTEAPRASARDGWSPPRSRVSLHKEDPSESEEEQIEICSTRGCPNPPSSPAHLPTQAAICPASAKVLSLKYSTPRESVASPREKAACLPGSYTSGPDSSQPSSLLEMSSQEHETHADISTSQNHRPSCAEETTEVTSASSAMENSPLSKVARHFHSPPIILSSPNMVNGLEHDLLDDETLNQYETSINAAASLSSFSVDVPKNGESVLENLHISESQDLDDLLQKPKMIARRPIMAWFKEINKHNQGTHLRSKTEKEQPLMPARSPDSKIQMVSSSQKKGVTVPHSPPQPKTNLENKDLSKKSPAEMLLTNGQKAKCGPKLKRLSLKGKAKVNSEAPAANAVKAGGTDHRKPLISPQTSHKTLSKAVSQRLHVADHEDPDRNTTAAPRSPQCVLESKPPLATSGPLKPSVSDTSIRTFVSPLTSPKPVPEQGMWSRFHMAVLSEPDRGCPTTPKSPKCRAEGRAPRADSGPVSPAASRNGMSVAGNRQSEPRLASHVAADTAQPRPTGEKGGNIMASDRLERTNQLKIVEISAEAVSETVCGNKPAESDRRGGCLAQGNCQEKSEIRLYRQVAESSTSHPSSLPSHASQAEQEMSRSFSMAKLASSSSSLQTAIRKAEYSQGKSSLMSDSRGVPRNSIPGGPSGEDHLYFTPRPATRTYSMPAQFSSHFGREGHPPHSLGRSRDSQVPVTSSVVPEAKASRGGLPSLANGQGIYSVKPLLDTSRNLPATDEGDIISVQETSCLVTDKIKVTRRHYCYEQNWPHESTSFFSVKQRIKSFENLANADRPVAKSGASPFLSVSSKPPIGRRSSGSIVSGSLGHPGDAAARLLRRSLSSCSENQSEAGTLLPQMAKSPSIMTLTISRQNPPETSSKGSDSELKKSLGPLGIPTPTMTLASPVKRNKSSVRHTQPSPVSRSKLQELRALSMPDLDKLCSEDYSAGPSAVLFKTELEITPRRSPGPPAGGVSCPEKGGNRACPGGSGPKTSAAETPSSASDTGEAAQDLPFRRSWSVNLDQLLVSAGDQQRLQSVLSSVGSKSTILTLIQEAKAQSENEADVCFIVLNRKEGSGLGFSVAGGTDVEPKSITVHRVFSQGAASQEGTMNRGDFLLSVNGASLAGLAHGNVLKVLHQAQLHKDALVVIKKGMDQPRPSARQEPPTANGKGLLSRKTIPLEPGIENTEQRMQVQQQHSQEGSPRIGRPTVLLGSSAVIRRSVAVHDALCVEVLKTSAGLGLSLDGGKSSVTGDGPLVIKRVYKGGAAEQAGIIEAGDEILAINGKPLVGLMHFDAWNIMKSVPEGPVQLLIRKHRNSS

SEQ ID NO: 845547 - protein, 209 aa, Homo sapiens
MNRGDFLLSVNGASLAGLAHGNVLKVLHQAQLHKDALVVIKKGMDQPRPSARQEPPTANGKGLLSRKTIPLEPGIENTEQRMQVQQQHSQEGSPRIGRPTVLLGSSAVIRRSVAVHDALCVEVLKTSAGLGLSLDGGKSSVTGDGPLVIKRVYKGGAAEQAGIIEAGDEILAINGKPLVGLMHFDAWNIMKSVPEGPVQLLIRKHRNSS

SEQ ID NO: 845548 - protein, 2159 aa, Homo sapiens; identical to SEQ ID NO: 845546

SEQ ID NO: 845549 - protein, 1985 aa, Homo sapiens
MSRSASPNFNTSGGASAGGSDEGSSSSLGRKTPGPKDRIVMEVTLNKEPRVGLGIGACCLALENSPPGIYIHSLAPGSVAKMESNLSRGDQILEVNSVNVRHAALSKVHAILSKCPPGPVRLVIGRHPESKGTPLKSPSLAKKDSLISESELSQYFAHDVPGPLSDFMVAGSEDEDHPGSGCSTSEEGSLPPSTSTHKEPGKPRANSLVTLGSHRASGLFHKQVTVARQASLPGSPQALRNPLLRQRKVGCYDANDASDEEEFDREGDCISLPGALPGPIRPLSEDDPRRVSISSSKGMDVHNQEERPRKTLVSKAISAPLLGSSVDLEESIPEGMVDAASYAANLTDSAEAPKGSPGSWWKKELSGSSSAPKLEYTVRTDTQSPTNTGSPSSPQQKSEGLGSRHRPVARVSPHCKRSEAEAKPSGSQTVNLTGRANDPCDLDSRVQATSVKVTVAGFQPGGAVEKLCQESLGKLTTGDACVSTSCELASALSHLDASHLTENLPKAASELGQQPMTSSDLISSPGKKGAAHPDPSKTSVDTGQVSRPENPSQPASPRVAKCKARSPVRLPHEGSPSPGEKAAAPPDYSKTRSASETSTPHNTRRVAALRGAGPGAEGMTPAGAVLPGDPLTSQEQRQGAPGNHSKALEMTGIHAPESSQEPSLLEGADSVSSRAPQASLSMLPSTDNTKEACGHVSGHCCPGGSRESPVTDIDSFIKELDASAARSPSSQTGDSGSQEGSAQGHPPAGAGGGSSCRAEPVPGGQTSSPRRAWAAGAPAYPQWASQPSVLDSINPDKHFTVNKNFLSNYSRNFSSFHEDSTSLSGLGDSTEPSLSSMYGDAEDSSSDPESLTEAPRASARDGWSPPRSRVSLHKEDPSESEEEQIEICSTRGCPNPPSSPAHLPTQAAICPASAKVLSLKYSTPRESVASPREKAACLPGSYTSGPDSSQPSSLLEMSSQEHETHADISTSQNHRPSCAEETTEVTSASSAMENSPLSKVARHFHSPPIILSSPNMVNGLEHDLLDDETLNQYETSINAAASLSSFSVDVPKNGESVLENLHISESQDLDDLLQKPKMIARRPIMAWFKEINKHNQGTHLRSKTEKEQPLMPARSPDSKIQMVSSSQKKGVTVPHSPPQPKTNLENKDLSKKSPAEMLLTNGQKAKCGPKLKRLSLKGKAKVNSEAPAANAVKAGGTDHRKPLISPQTSHKTLSKAVSQRLHVADHEDPDRNTTAAPRSPQCVLESKPPLATSGPLKPSVSDTSIRTFVSPLTSPKPVPEQGMWSRFHMAVLSEPDRGCPTTPKSPKCRAEGRAPRADSGPVSPAASRNGMSVAGNRQSEPRLASHVAADTAQPRPTGEKGGNIMASDRLERTNQLKIVEISAEAVSETVCGNKPAESDRRGGCLAQGNCQEKSEIRLYRQVAESSTSHPSSLPSHASQAEQEMSRSFSMAKLASSSSSLQTAIRKAEYSQGKSSLMSDSRGVPRNSIPGGPSGEDHLYFTPRPATRTYSMPAQFSSHFGREGHPPHSLGRSRDSQVPVTSSVVPEAKASRGGLPSLANGQGIYSVKPLLDTSRNLPATDEGDIISVQETSCLVTDKIKVTRRHYCYEQNWPHESTSFFSVKQRIKSFENLANADRPVAKSGASPFLSVSSKPPIGRRSSGSIVSGSLGHPGDAAARLLRRSLSSCSENQSEAGTLLPQMAKSPSIMTLTISRQNPPETSSKGSDSELKKSLGPLGIPTPTMTLASPVKRNKSSVRHTQPSPVSRSKLQELRALSMPDLDKLCSEDYSAGPSAVLFKTELEITPRRSPGPPAGGVSCPEKGGNRACPGGSGPKTSAAETPSSASDTGEAAQDLPFRRSWSVNLDQLLVSAGDQQRLQSVLSSVGSKSTILTLIQEAKAQSENEADVCFIVLNRKEGSGLGFSVAGGTDVEPKSITVHRVFSQGAASQEGTMNRGDFLLSVNGASLAGLAHGNVLKVLHQAQLQGL

SEQ ID NO: 845550 - protein, 159 aa, Homo sapiens [sequence omitted]

SEQ ID NO: 845551 - protein, 2643 aa, Homo sapiens
MPITQDNAVLHLPLLYQWLQNSLQEGGDGPEQRLCQAAIQKLQEYIQLNFAVDESTVPPDHSPPEMEICTVYLTKELGDTETVGLSFGNIPVFGDYGEKRRGGKKRKTHQGPVLDVGCIWVTELRKNSPAGKSGKVRLRDEILSLNGQLMVGVDVSGASYLAEQCWNGGFIYLIMLRRFKHKAHSTYNGNSSNSSEPGETPTLELGDRTAKKGKRTRKFGVISRPPANKAPEESKGSAGCEVSSDPSTELENGPDPELGNGHVFQLENGPDSLKEVAGPHLERSEVDRGTEHRIPKTDAPLTTSNDKRRFSKGGKTDFQSSDCLARQEEVGRIWKMELLKESDGLGIQVSGGRGSKRSPHAIVVTQVKEGGASSQEYHIVKKSTRSLSTTQVESPWRLIRPSVISIIGLYKEKGKGLGFSIAGGRDCIRGQMGIFVKTIFPNGSAAEDGRLKEGDEILDVNGIPIKGLTFQEAIHTFKQIRSGLFVLTVRTKLVSPSLTPCSTPTHMSRSASPNFNTSGGASAGGSDEGSSSSLGRKTPGPKDRIVMEVTLNKEPRVGLGIGACCLALENSPPGIYIHSLAPGSVAKMESNLSRGDQILEVNSVNVRHAALSKVHAILSKCPVSEQEMDEVIARSTYQESKEANSSPGLGTPLKSPSLAKKDSLISESELSQYFAHDVPGPLSDFMVAGSEDEDHPGSGCSTSEEGSLPPSTSTHKEPGKPRANSLVTLGSHRASGLFHKQVTVARQASLPGSPQALRNPLLRQRKVGCYDANDASDEEEFDREGDCISLPGALPGPIRPLSEDDPRRVSISSSKGMDVHNQEERPRKTLVSKAISAPLLGSSVDLEESIPEGMVDAASYAANLTDSAEAPKGSPGSWWKKELSGSSSAPKLEYTVRTDTQSPTNTGSPSSPQQKSEGLGSRHRPVARGKPPLQEIQAEAKPSGSQTVNLTGRANDPCDLDSRVQATSVKVTVAGFQPGGAVEKLCQESLGKLTTGDACVSTSCELASALSHLDASHLTENLPKAASELGQQPMTSSDLISSPGKKGAAHPDPSKTSVDTGQVSRPENPSQPASPRVAKCKARSPVRLPHEGSPSPGEKAAAPPDYSKTRSASETSTPHNTRRVAALRGAGPGAEGMTPAGAVLPGDPLTSQEQRQGAPGNHSKALEMTGIHAPESSQEPSLLEGADSVSSRAPQASLSMLPSTDNTKEACGHVSGHCCPGGSRESPVTDIDSFIKELDASAARSPSSQTGDSGSQEGSAQGHPPAGAGGGSSCRAEPVPGGQTSSPRRAWAAGAPAYPQWASQPSVLDSINPDKHFTVNKNFLSNYSRNFSSFHEDSTSLSGLGDSTEPSLSSMYGDAEDSSSDPESLTEAPRASARDGWSPPRSRVSLHKEDPSESEEEQIEICSTRGCPNPPSSPAHLPTQAAICPASAKVLSLKYSTPRESVASPREKAACLPGSYTSGPDSSQPSSLLEMSSQEHETHADISTSQNHRPSCAEETTEVTSASSAMENSPLSKVARHFHSPPIILSSPNMVNGLEHDLLDDETLNQYETSINAAASLSSFSVDVPKNGESVLENLHISESQDLDDLLQKPKMIARRPIMAWFKEINKHNQGTHLRSKTEKEQPLMPARSPDSKIQMVSSSQKKGVTVPHSPPQPKTNLENKDLSKKSPAEMLLTNGQKAKCGPKLKRLSLKGKAKVNSEAPAANAVKAGGTDHRKPLISPQTSHKTLSKAVSQRLHVADHEDPDRNTTAAPRSPQCVLESKPPLATSGPLKPSVSDTSIRTFVSPLTSPKPVPEQGMWSRFHMAVLSEPDRGCPTTPKSPKCRAEGRAPRADSGPVSPAASRNGMSVAGNRQSEPRLASHVAADTAQPRPTGEKGGNIMASDRLERTNQLKIVEISAEAVSETVCGNKPAESDRRGGCLAQGNCQEKSEIRLYRQVAESSTSHPSSLPSHASQAEQEMSRSFSMAKLASSSSSLQTAIRKAEYSQGKSSLMSDSRGVPRNSIPGGPSGEDHLYFTPRPATRTYSMPAQFSSHFGREGHPPHSLGRSRDSQVPVTSSVVPEAKASRGGLPSLANGQGIYSVKPLLDTSRNLPATDEGDIISVQETSCLVTDKIKVTRRHYCYEQNWPHESTSFFSVKQRIKSFENLANADRPVAKSGASPFLSVSSKPPIGRRSSGSIVSGSLGHPGDAAARLLRRSLSSCSENQSEAGTLLPQMAKSPSIMTLTISRQNPPETSSKGSDSELKKSLGPLGIPTPTMTLASPVKRNKSSVRHTQPSPVSRSKLQELRALSMPDLDKLCSEDYSAGPSAVLFKTELEITPRRSPGPPAGGVSCPEKGGNRACPGGSGPKTSAAETPSSASDTGEAAQDLPFRRSWSVNLDQLLVSAGDQQRLQSVLSSVGSKSTILTLIQEAKAQSENEADVCFIVLNRKEGSGLGFSVAGGTDVEPKSITVHRVFSQGAASQEGTMNRGDFLLSVNGASLAGLAHGNVLKVLHQAQLHKDALVVIKKGMDQPRPSARQEPPTANGKGLLSRKTIPLEPGIGRSVAVHDALCVEVLKTSAGLGLSLDGGKSSVTGDGPLVIKRVYKGGAAEQAGIIEAGDEILAINGKPLVGLMHFDAWNIMKSVPEGPVQLLIRKHRNSS

SEQ ID NO: 845552 - protein, 2200 aa, Homo sapiens
MGIFVKTIFPNGSAAEDGRLKEGDEILDVNGIPIKGLTFQEAIHTFKQIRSGLFVLTVRTKLVSPSLTPCSTPTHMSRSASPNFNTSGGASAGGSDEGSSSSLGRKTPGPKDRIVMEVTLNKEPRVGLGIGACCLALENSPPGIYIHSLAPGSVAKMESNLSRGDQILEVNSVNVRHAALSKVHAILSKCPPGPVRLVIGRHPESKGTPLKSPSLAKKDSLISESELSQYFAHDVPGPLSDFMVAGSEDEDHPGSGCSTSEEGSLPPSTSTHKEPGKPRANSLVTLGSHRASGLFHKQVTVARQASLPGSPQALRNPLLRQRKVGCYDANDASDEEEFDREGDCISLPGALPGPIRPLSEDDPRRVSISSSKGMDVHNQEERPRKTLVSKAISAPLLGSSVDLEESIPEGMVDAASYAANLTDSAEAPKGSPGSWWKKELSGSSSAPKLEYTVRTDTQSPTNTGSPSSPQQKSEGLGSRHRPVARGKPPLQEIQAEAKPSGSQTVNLTGRANDPCDLDSRVQATSVKVTVAGFQPGGAVEKLCQESLGKLTTGDACVSTSCELASALSHLDASHLTENLPKAASELGQQPMTSSDLISSPGKKGAAHPDPSKTSVDTGQVSRPENPSQPASPRVAKCKARSPVRLPHEGSPSPGEKAAAPPDYSKTRSASETSTPHNTRRVAALRGAGPGAEGMTPAGAVLPGDPLTSQEQRQGAPGNHSKALEMTGIHAPESSQEPSLLEGADSVSSRAPQASLSMLPSTDNTKEACGHVSGHCCPGGSRESPVTDIDSFIKELDASAARSPSSQTGDSGSQEGSAQGHPPAGAGGGSSCRAEPVPGGQTSSPRRAWAAGAPAYPQWASQPSVLDSINPDKHFTVNKNFLSNYSRNFSSFHEDSTSLSGLGDSTEPSLSSMYGDAEDSSSDPESLTEAPRASARDGWSPPRSRVSLHKEDPSESEEEQIEICSTRGCPNPPSSPAHLPTQAAICPASAKVLSLKYSTPRESVASPREKAACLPGSYTSGPDSSQPSSLLEMSSQEHETHADISTSQNHRPSCAEETTEVTSASSAMENSPLSKVARHFHSPPIILSSPNMVNGLEHDLLDDETLNQYETSINAAASLSSFSVDVPKNGESVLENLHISESQDLDDLLQKPKMIARRPIMAWFKEINKHNQGTHLRSKTEKEQPLMPARSPDSKIQMVSSSQKKGVTVPHSPPQPKTNLENKDLSKKSPAEMLLTNGQKAKCGPKLKRLSLKGKAKVNSEAPAANAVKAGGTDHRKPLISPQTSHKTLSKAVSQRLHVADHEDPDRNTTAAPRSPQCVLESKPPLATSGPLKPSVSDTSIRTFVSPLTSPKPVPEQGMWSRFHMAVLSEPDRGCPTTPKSPKCRAEGRAPRADSGPVSPAASRNGMSVAGNRQSEPRLASHVAADTAQPRPTGEKGGNIMASDRLERTNQLKIVEISAEAVSETVCGNKPAESDRRGGCLAQGNCQEKSEIRLYRQVAESSTSHPSSLPSHASQAEQEMSRSFSMAKLASSSSSLQTAIRKAEYSQGKSSLMSDSRGVPRNSIPGGPSGEDHLYFTPRPATRTYSMPAQFSSHFGREGHPPHSLGRSRDSQVPVTSSVVPEAKASRGGLPSLANGQGIYSVKPLLDTSRNLPATDEGDIISVQETSCLVTDKIKVTRRHYCYEQNWPHESTSFFSVKQRIKSFENLANADRPVAKSGASPFLSVSSKPPIGRRSSGSIVSGSLGHPGDAAARLLRRSLSSCSENQSEAGTLLPQMAKSPSIMTLTISRQNPPETSSKGSDSELKKSLGPLGIPTPTMTLASPVKRNKSSVRHTQPSPVSRSKLQELRALSMPDLDKLCSEDYSAGPSAVLFKTELEITPRRSPGPPAGGVSCPEKGGNRACPGGSGPKTSAAETPSSASDTGEAAQDLPFRRSWSVNLDQLLVSAGDQQRLQSVLSSVGSKSTILTLIQEAKAQSENEADVCFIVLNRKEGSGLGFSVAGGTDVEPKSITVHRVFSQGAASQEGTMNRGDFLLSVNGASLAGLAHGNVLKVLHQAQLHKDALVVIKKGMDQPRPSARQEPPTANGKGLLSRKTIPLEPGIGRSVAVHDALCVEVLKTSAGLGLSLDGGKSSVTGDGPLVIKRVYKGGAAEQAGIIEAGDEILAINGKPLVGLMHFDAWNIMKSVPEGPVQLLIRKHRNSS

SEQ ID NO: 845553 - protein, 2159 aa, Homo sapiens; identical to SEQ ID NO: 845546

SEQ ID NO: 845554 - protein, 1984 aa, Homo sapiens
MSRSASPNFNTSGGASAGGSDEGSSSSLGRKTPGPKDRIVMEVTLNKEPRVGLGIGACCLALENSPPGIYIHSLAPGSVAKMESNLSRGDQILEVNSVNVRHAALSKVHAILSKCPPGPVRLVIGRHPESKGTPLKSPSLAKKDSLISESELSQYFAHDVPGPLSDFMVAGSEDEDHPGSGCSTSEEGSLPPSTSTHKEPGKPRANSLVTLGSHRASGLFHKQVTVARQASLPGSPQALRNPLLRQRKVGCYDANDASDEEEFDREGDCISLPGALPGPIRPLSEDDPRRVSISSSKGMDVHNQEERPRKTLVSKAISAPLLGSSVDLEESIPEGMVDAASYAANLTDSAEAPKGSPGSWWKKELSGSSSAPKLEYTVRTDTQSPTNTGSPSSPQQKSEGLGSRHRPVARVSPHCKRSEAEAKPSGSQTVNLTGRANDPCDLDSRVQATSVKVTVAGFQPGGAVEKLCQESLGKLTTGDACVSTSCELASALSHLDASHLTENLPKAASELGQQPMTSSDLISSPGKKGAAHPDPSKTSVDTGQVSRPENPSQPASPRVAKCKARSPVRLPHEGSPSPGEKAAAPPDYSKTRSASETSTPHNTRRVAALRGAGPGAEGMTPAGAVLPGDPLTSQEQRQGAPGNHSKALEMTGIHAPESSQEPSLLEGADSVSSRAPQASLSMLPSTDNTKEACGHVSGHCCPGGSRESPVTDIDSFIKELDASAARSPSSQTGDSGSQEGSAQGHPPAGAGGGSSCRAEPVPGGQTSSPRRAWAAGAPAYPQWASQPSVLDSINPDKHFTVNKNFLSNYSRNFSSFHEDSTSLSGLGDSTEPSLSSMYGDAEDSSSDPESLTEAPRASARDGWSPPRSRVSLHKEDPSESEEEQIEICSTRGCPNPPSSPAHLPTQAAICPASAKVLSLKYSTPRESVASPREKAACLPGSYTSGPDSSQPSSLLEMSSQEHETHADISTSQNHRPSCAEETTEVTSASSAMENSPLSKVARHFHSPPIILSSPNMVNGLEHDLLDDETLNQYETSINAAASLSSFSVDVPKNGESVLENLHISESQDLDDLLQKPKMIARRPIMAWFKEINKHNQGTHLRSKTEKEQPLMPARSPDSKIQMVSSSQKKGVTVPHSPPQPKTNLENKDLSKKSPAEMLLTNGQKAKCGPKLKRLSLKGKAKVNSEAPAANAVKAGGTDHRKPLISPQTSHKTLSKAVSQRLHVADHEDPDRNTTAAPRSPQCVLESKPPLATSGPLKPSVSDTSIRTFVSPLTSPKPVPEQGMWSRFHMAVLSEPDRGCPTTPKSPKCRAEGRAPRADSGPVSPAASRNGMSVAGNRQSEPRLASHVAADTAQPRPTGEKGGNIMASDRLERTNQLKIVEISAEAVSETVCGNKPAESDRRGGCLAQGNCQEKSEIRLYRQVAESSTSHPSSLPSHASQAEQEMSRSFSMAKLASSSSSLQTAIRKAEYSQGKSSLMSDSRGVPRNSIPGGPSGEDHLYFTPRPATRTYSMPAQFSSHFGREGHPPHSLGRSRDSQVPVTSSVVPEAKASRGGLPSLANGQGIYSVKPLLDTSRNLPATDEGDIISVQETSCLVTDKIKVTRRHYCYEQNWPHESTSFFSVKQRIKSFENLANADRPVAKSGASPFLSVSSKPPIGRRSSGSIVSGSLGHPGDAAARLLRRSLSSCSENQSEAGTLLPQMAKSPSIMTLTISRQNPPETSSKGSDSELKKSLGPLGIPTPTMTLASPVKRNKSSVRHTQPSPVSRSKLQELRALSMPDLDKLCSEDYSAGPSAVLFKTELEITPRRSPGPPAGGVSCPEKGGNRACPGGSGPKTSAAETPSSASDTGEAAQDLPFRRSWSVNLDQLLVSAGDQQRLQSVLSSVGSKSTILTLIQEAKAQSENEADVCFIVLNRKEGSGLGFSVAGGTDVEPKSITVSDRVIRLSGKSPLKQPQNVIRAQIPISGFRDCWISFPATNIKREKWEK

SEQ ID NO: 845555 - protein, 538 aa, Homo sapiens
MSRSASPNFNTSGGASAGGSDEGSSSSLGRKTPGPKDRIVMEVTLNKEPRVGLGIGACCLALENSPPGIYIHSLAPGSVAKMESNLSRGDQILEVNSVNVRHAALSKVHAILSKCPPGPVRLVIGRHPESKGTPLKSPSLAKKDSLISESELSQYFAHDVPGPLSDFMVAGSEDEDHPGSGCSTSEEGSLPPSTSTHKEPGKPRANSLVTLGSHRASGLFHKQVTVARQASLPGSPQALRNPLLRQRKVGCYDANDASDEEEFDREGDCISLPGALPGPIRPLSEDDPRRVSISSSKGMDVHNQEERPRKTLVSKAISAPLLGSSVDLEESIPEGMVDAASYAANLTDSAEAPKGSPGSWWKKELSGSSSAPKLEYTVRTDTQSPTNTGSPSSPQQKSEGLGSRHRPVARVSPHCKRSEAEAKPSGSQTVNLTGRANDPCDLDSRVQATSVKVTVAGFQPGGAVEKLCQESLGKLTTGDACVSTSCELASALSHLDASHLTENLPKAASELGQQPMTGSSTPDITWRGCWAFHPTDVL

SEQ ID NO: 845556 - protein, 495 aa, Homo sapiens
MPITQDNAVLHLPLLYQWLQNSLQEGGDGPEQRLCQAAIQKLQEYIQLNFAVDESTVPPDHSPPEMEICTVYLTKELGDTETVGLSFGNIPVFGDYGEKRRGGKKRKTHQGPVLDVGCIWVTELRKNSPAGKSGKVRLRDEILSLNGQLMVGVDVSGASYLAEQCWNGGFIYLIMLRRFKHKAHSTYNGNSSNSSEPGETPTLELGDRTAKKGKRTRKFGVISRPPANKAPEESKGSAGCEVSSDPSTELENGPDPELGNGHVFQLENGPDSLKEVAGPHLERSEVDRGTEHRIPKTDAPLTTSNDKRRFSKGGKTDFQSSDCLARQEEVGRIWKMELLKESDGLGIQVSGGRGSKRSPHAIVVTQVKEGGAAHRDGRLSLGDELLVINGHLLVGLSHEEAVAILRSATGMVQLVVASKENSAEDLLRLTSKSLPDLTSSVEDVSSWTDNEDQEADGEEDEGTSSSVQRAMPGTDEPQDVCGAEESKGNLESPKQ

SEQ ID NO: 845557 - protein, 86 aa, Homo sapiens
QISLTGGCTKAQLFSVNGCQLPTTSHTDGSHLNVCEISCPSFSIPSRHPLPMTDGYRDTKAQTPIFQEEKTLWWCHLCSRATAGSS

SEQ ID NO: 845558 - protein, 1297 aa, Homo sapiens
MGRSGKLPSGVSAKLKRWKKGHSSDSNPAICRHRQAARSRFFSRPSGRSDLTVDAVKLHNELQSGSLRLGKSEAPETPMEEEAELVLTEKSSGTFLSGLSDCTNVTFSKVQRFWESNSAAHKEICAVLAAVTEVIRSQGGKETETEYFAALMTTMEAVESPESLAAVAYLLNLVLKRVPSPVLIKKFSDTSKAFMDIMSAQASSGSTSVLRWVLSCLATLLRKQDLEAWGYPVTLQVYHGLLSFTVHPKPKIRKAAQHGVCSVLKGSEFMFEKAPAHHPAAISTAKFCIQEIEKSGGSKEATTTLHMLTLLKDLLPCFPEGLVKSCSETLLRVMTLSHVLVTACAMQAFHSLFHARPGLSTLSAELNAQIITALYDYVPSENDLQPLLAWLKVMEKAHINLVRLQWDLGLGHLPRFFGTAVTCLLSPHSQVLTAATQSLKEILKECVAPHMADIGSVTSSASGPAQSVAKMFRAVEEGLTYKFHAAWSSVLQLLCVFFEACGRQAHPVMRKCLQSLCDLRLSPHFPHTAALDQAVGAAVTSMGPEVVLQAVPLEIDGSEETLDFPRSWLLPVIRDHVQETRLGFFTTYFLPLANTLKSKAMDLAQAGSTVESKIYDTLQWQMWTLLPGFCTRPTDVAISFKGLARTLGMAISERPDLRVTVCQALRTLITKGCQAEADRAEVSRFAKNFLPILFNLYGQPVAAGDTPAPRRAVLETIRTYLTITDTQLVNSLLEKASEKVLDPASSDFTRLSVLDLVVALAPCADEAAISKLYSTIRPYLESKAHGVQKKAYRVLEEVCASPQGPGALFVQSHLEDLKKTLLDSLRSTSSPAKRPRLKCLLHIVRKLSAEHKEFITALIPEVILCTKEVSVGARKNAFALLVEMGHAFLRFGSNQEEALQCYLVLIYPGLVGAVTMVSCSILALTHLLFEFKGLMGTSTVEQLLENVCLLLASRTRDVVKSALGFIKVAVTVMDVAHLAKHVQLVMEAIGKLSDDMRRHFRMKLRNLFTKFIRKFGFELVKRLLPEEYHRVLVNIRKAEARAKRHRALSQAAVEEEEEEEEEEEPAQGKGDSIEEILADSEDEEDNEEEERSRGKEQRKLARQRSRAWLKEGGGDEPLNFLDPKVAQRVLATQPGPGRGRKKDHGFKVSADGRLIIREEADGNKMEEEEGAKGEDEEMADPMEDVIIRNKKHQKLKHQKEAEEEELEIPPQYQAGGSGIHRPVAKKAMPGAEYKAKKAKGDVKKKGRPDPYAYIPLNRSKLNRRKKMKLQGQFKGLVKAARRGSQVGHKNRRKDRRP

SEQ ID NO: 845559 - protein, 1223 aa, Homo sapiens
MGRSGKLPSGVSAKLKRWKKGHSSDSNPAICRHRQAARSRFFSRPSGRSDLTVDAVKLHNELQSGSLRLGKSEAPETPMEEEAELVLTEKSSGTFLSGLSDCTNVTFSKVQRFWESNSAAHKEICAVLAAVTEVIRSQGGKETETEYFAALMTTMEAVESPESLAAVAYLLNLVLKRIRKAAQHGVCSVLKGSEFMFEKAPAHHPAAISTAKFCIQEIEKSGGSKEATTTLHMLTLLKDLLPCFPEGLVKSCSETLLRVMTLSHVLVTACAMQAFHSLFHARPGLSTLSAELNAQIITALYDYVPSENDLQPLLAWLKVMEKAHINLVRLQWDLGLGHLPRFFGTAVTCLLSPHSQVLTAATQSLKEILKECVAPHMADIGSVTSSASGPAQSVAKMFRAVEEGLTYKFHAAWSSVLQLLCVFFEACGRQAHPVMRKCLQSLCDLRLSPHFPHTAALDQAVGAAVTSMGPEVVLQAVPLEIDGSEETLDFPRSWLLPVIRDHVQETRLGFFTTYFLPLANTLKSKAMDLAQAGSTVESKIYDTLQWQMWTLLPGFCTRPTDVAISFKGLARTLGMAISERPDLRVTVCQALRTLITKGCQAEADRAEVSRFAKNFLPILFNLYGQPVAAGDTPAPRRAVLETIRTYLTITDTQLVNSLLEKASEKVLDPASSDFTRLSVLDLVVALAPCADEAAISKLYSTIRPYLESKAHGVQKKAYRVLEEVCASPQGPGALFVQSHLEDLKKTLLDSLRSTSSPAKRPRLKCLLHIVRKLSAEHKEFITALIPEVILCTKEVSVGARKNAFALLVEMGHAFLRFGSNQEEALQCYLVLIYPGLVGAVTMVSCSILALTHLLFEFKGLMGTSTVEQLLENVCLLLASRTRDVVKSALGFIKVAVTVMDVAHLAKHVQLVMEAIGKLSDDMRRHFRMKLRNLFTKFIRKFGFELVKRLLPEEYHRVLVNIRKAEARAKRHRALSQAAVEEEEEEEEEEEPAQGKGDSIEEILADSEDEEDNEEEERSRGKEQRKLARQRSRAWLKEGGGDEPLNFLDPKVAQRVLATQPGPGRGRKKDHGFKVSADGRLIIREEADGNKMEEEEGAKGEDEEMADPMEDVIIRNKKHQKLKHQKEAEEEELEIPPQYQAGGSGIHRPVAKKAMPGAEYKAKKAKGDVKKKGRPDPYAYIPLNRSKLNRRKKMKLQGQFKGLVKAARRGSQVGHKNRRKDRRP

SEQ ID NO: 845560 - protein, 1102 aa, Homo sapiens
FDSCGSAAAVSPLSSDVVLSCLATLLRKQDLEAWGYPVTLQVYHGLLSFTVHPKPKIRKAAQHGVCSVLKGSEFMFEKAPAHHPAAISTAKFCIQEIEKSGGSKEATTTLHMLTLLKDLLPCFPEGLVKSCSETLLRVMTLSHVLVTACAMQAFHSLFHARPGLSTLSAELNAQIITALYDYVPSENDLQPLLAWLKVMEKAHINLVRLQWDLGLGHLPRFFGTAVTCLLSPHSQVLTAATQSLKEILKECVAPHMADIGSVTSSASGPAQSVAKMFRAVEEGLTYKFHAAWSSVLQLLCVFFEACGRQAHPVMRKCLQSLCDLRLSPHFPHTAALDQAVGAAVTSMGPEVVLQAVPLEIDGSEETLDFPRSWLLPVIRDHVQETRLGFFTTYFLPLANTLKSKAMDLAQAGSTVESKIYDTLQWQMWTLLPGFCTRPTDVAISFKGLARTLGMAISERPDLRVTVCQALRTLITKGCQAEADRAEVSRFAKNFLPILFNLYGQPVAAGDTPAPRRAVLETIRTYLTITDTQLVNSLLEKASEKVLDPASSDFTRLSVLDLVVALAPCADEAAISKLYSTIRPYLESKAHGVQKKAYRVLEEVCASPQGPGALFVQSHLEDLKKTLLDSLRSTSSPAKRPRLKCLLHIVRKLSAEHKEFITALIPEVILCTKEVSVGARKNAFALLVEMGHAFLRFGSNQEEALQCYLVLIYPGLVGAVTMVSCSILALTHLLFEFKGLMGTSTVEQLLENVCLLLASRTRDVVKSALGFIKVAVTVMDVAHLAKHVQLVMEAIGKLSDDMRRHFRMKLRNLFTKFIRKFGFELVKRLLPEEYHRVLVNIRKAEARAKRHRALSQAAVEEEEEEEEEEEPAQGKGDSIEEILADSEDEEDNEEEERSRGKEQRKLARQRSRAWLKEGGGDEPLNFLDPKVAQRVLATQPGPGRGRKKDHGFKVSADGRLIIREEADGNKMEEEEGAKGEDEEMADPMEDVIIRNKKHQKLKHQKEAEEEELEIPPQYQAGGSGIHRPVAKKAMPGAEYKAKKAKGDVKKKGRPDPYAYIPLNRSKLNRRKKMKLQGQFKGLVKAARRGSQVGHKNRRKDRRP

SEQ ID NO: 845561 - protein, 1405 aa, Homo sapiens
MGRSGKLPSGVSAKLKRWKKGHSSDSNPAICRHRQAARSRFFSRPSGRSDLTVDAVKLHNELQSGSLRLGKSEAPETPMEEEAELVLTEKSSGTFLSGLSDCTNVTFSKVQRFWESNSAAHKEICAVLAAVTEVIRSQGGKETETEYFAALMTTMEAVESPESLAAVAYLLNLVLKRVPSPVLIKKFSDTSKAFMDIMSAQASSGSTSVLRWVLSCLATLLRKQDLEAWGYPVTLQVYHGLLSFTVHPKPKIRKAAQHGVCSVLKGSEFMFEKAPAHHPAAISTAKFCIQEIEKSGGSKEATTTLHMLTLLKDLLPCFPEGLVKSCSETLLRVMTLSHVLVTACAMQAFHSLFHARPGLSTLSAELNAQIITALYDYVPSENDLQPLLAWLKVMEKAHINLVRLQWDLGLGHLPRFFGTAVTCLLSPHSQVLTAATQSLKEILKECVAPHMADIGSVTSSASGPAQSVAKMFRAVEEGLTYKFHAAWSSVLQLLCVFFEACGRQAHPVMRKCLQSLCDLRLSPHFPHTAALDQAVGAAVTSMGPEVVLQAVPLEIDGSEETLDFPRSWLLPVIRDHVQETRLGFFTTYFLPLANTLKSKAMDLAQAGSTVESKIYDTLQWQMWTLLPGFCTRPTDVAISFKGLARTLGMAISERPDLRVTVCQALRTLITKGCQAEADRAEVSRFAKNFLPILFNLYGQPVAAGDTPAPRRAVLETIRTYLTITDTQLVNSLLEKASEKVLDPASSDFTRLSVLDLVVALAPCADEAAISKLYSTIRPYLESKAHGVQKKAYRVLEEVCASPQGPGALFVQSHLEDLKKTLLDSLRSTSSPAKRPRLKCLLHIVRKLSAEHKEFITALIPEVILCTKEVSVGARKNAFALLVEMGHAFLRFGSNQEEALQCYLVLIYPGLVGAVTMVSCSILALTHLLFEFKGLMGTSTVEQLLENVCLLLASRTRDVVKSALGFIKVAVTVMDVAHLAKHVQLVMEAIGKLSDDMRRHFRMKLRNLFTKFIRKFGFELVKRLLPEEYHRVLVNIRKAEARAKRHRALSQAAVEEEEEEEEEEEPAQGKGDSIEEILADSEDEEDNEEEERSRGKEQRKLARQRSRAWLKEGGGDEPLNFLDPKVAQRVLATQPGPGRGRKKDHGFKVSADGRLIIREEADGNKMEEEEGAKGEDEEMADPMEDVIIRNKKHQKLKHQKEAEEEELEIPPQYQAGGSGIHRPVAKKAMPGAEYKAKVSAACRAWGLLALDRCQGGARRSCAHHCPERHLPGTQLRPGKKKGFRCKDLVASEMGDLIEVAFQGYRSSLAPPKAEDEGRLWGLSSLGQGQKGNPTLLADSVSLGKQKAKGDVKKKGRPDPYAYIPLNRSKLNRRKKMKLQGQFKGLVKAARRGSQVGHKNRRKDRRP

SEQ ID NO: 845562 - protein, 1221 aa, Homo sapiens
MGRSGKLPSGVSAKLKRWKKGHSSDSNPAICRHRQAARSRFFSRPSGRSDLTVDAVKLHNELQSGSLRLGKSEAPETPMEEEAELVLTEKSSGTFLSGLSDCTNVTFSKVQRFWESNSAAHKEICAVLAAVTEVIRSQGGKETETEYFAALMTTMEAVESPESLAAVAYLLNLVLKRVPSPVLIKKFSDTSKAFMDIMSAQASSGSTSVLRWVLSCLATLLRKQDLEAWGYPVTLQVYHGLLSFTVHPKPKIRKAAQHGVCSVLKGSEFMFEKAPAHHPAAISTAKFCIQEIEKSGGSKEATTTLHMLTLLKDLLPCFPEGLVKSCSETLLRVMTLSHVLVTACAMQAFHSLFHARPGLSTLSAELNAQIITALYDYVPSENDLQPLLAWLKVMEKAHINLVRLQWDLGLGHLPRFFGTAVTCLLSPHSQVLTAATQSLKEILKECVAPHMADIGSVTSSASGPAQSVAKMFRAVEEGLTYKFHAAWSSVLQLLCVFFEACGRQAHPVMRKCLQSLCDLRLSPHFPHTAALDQAVGAAVTSMGPEVVLQAVPLEIDGSEETLDFPRSWLLPVIRDHVQETRLGFFTTYFLPLANTLKSKAMDLAQAGSTVESKIYDTLQWQMWTLLPGFCTRPTDVAISFKGLARTLGMAISERPDLRVTVCQALRTLITKGCQAEADRAEVSRFAKNFLPILFNLYGQPVAAGDTPAPRRAVLETIRTYLTITDTQLVNSLLEKASEKVLDPASSDFTRLSVLDLVVALAPCADEAAISKLYSTIRPYLESKAHGVQKKAYRVLEEVCASPQGPGALFVQSHLEDLKKTLLDSLRSTSSPAKRPRLKCLLHIVRKLSAEHKEFITALIPEVILCTKEVSVGARKNAFALLVEMGHAFLRFGSNQEEALQCYLVLIYPGLVGAVTMVSCSILALTHLLFEFKGLMGTSTVEQLLENVCLLLASRTRDVVKSALGFIKVAVTVMDVAHLAKHVQLVMEAIGKLSDDMRRHFRMKLRNLFTKFIRKFGFELVKRLLPEEYHRVLVNIRKAEARAKRHRALSQAAVEEEEEEEEEEEPAQGKGDSIEEILADSEDEEDNEEEERSRGKEQRKLARQRSRAWLKEGGGDEPLNFLDPKVAQRVLATQPGPGRGRKKDHGFKVSADGRLIIREEADGNKMEEEEGAKGEDEEMADPMEDVIIRNKKHQKLKHQKEAEEEELEIPPQYQAGLRMTWN

SEQ ID NO: 845563 - protein, 1269 aa, Homo sapiens
  misc_feature (1253)..(1253): Xaa can be any naturally occurring amino acid
MGRSGKLPSGVSAKLKRWKKGHSSDSNPAICRHRQAARSRFFSRPSGRSDLTVDAVKLHNELQSGSLRLGKSEAPETPMEEEAELVLTEKSSGTFLSGLSDCTNVTFSKVQRFWESNSAAHKEICAVLAAVTEVIRSQGGKETETEYFAALMTTMEAVESPESLAAVAYLLNLVLKRVPSPVLIKKFSDTSKAFMDIMSAQASSGSTSVLRWVLSCLATLLRKQDLEAWGYPVTLQVYHGLLSFTVHPKPKIRKAAQHGVCSVLKGSEFMFEKAPAHHPAAISTAKFCIQEIEKSGGSKEATTTLHMLTLLKDLLPCFPEGLVKSCSETLLRVMTLSHVLVTACAMQAFHSLFHARPGLSTLSAELNAQIITALYDYVPSENDLQPLLAWLKVMEKAHINLVRLQWDLGLGHLPRFFGTAVTCLLSPHSQVLTAATQSLKEILKECVAPHMADIGSVTSSASGPAQSVAKMFRAVEEGLTYKFHAAWSSVLQLLCVFFEACGRQAHPVMRKCLQSLCDLRLSPHFPHTAALDQAVGAAVTSMGPEVVLQAVPLEIDGSEETLDFPRSWLLPVIRDHVQETRLGFFTTYFLPLANTLKSKAMDLAQAGSTVESKIYDTLQWQMWTLLPGFCTRPTDVAISFKGLARTLGMAISERPDLRVTVCQALRTLITKGCQAEADRAEVSRFAKNFLPILFNLYGQPVAAGDTPAPRRAVLETIRTYLTITDTQLVNSLLEKASEKVLDPASSDFTRLSVLDLVVALAPCADEAAISKLYSTIRPYLESKAHGVQKKAYRVLEEVCASPQGPGALFVQSHLEDLKKTLLDSLRSTSSPAKRPRLKCLLHIVRKLSAEHKEFITALIPEVILCTKEVSVGARKNAFALLVEMGHAFLRFGSNQEEALQCYLVLIYPGLVGAVTMVSCSILALTHLLFEFKGLMGTSTVEQLLENVCLLLASRTRDVVKSALGFIKVAVTVMDVAHLAKHVQLVMEAIGKLSDDMRRHFRMKLRNLFTKFIRKFGFELVKRLLPEEYHRVLVNIRKAEARAKRHRALSQAAVEEEEEEEEEEEPAQGKGDSIEEILADSEDEEDNEEEERSRGKEQRKLARQRSRAWLKEGGGDEPLNFLDPKVAQRVLATQPGPGRGRKKDHGFKVSADGRLIIREEADGNKMEEEEGAKGEDEEMADPMEDVIIRNKKHQKLKHQKEAEEEELEIPPQYQAGGSGIHRPVAKKAMPGAEYKAKKAPKQAKPQKKISCKDXSCRSWTHDDLALRPWS

SEQ ID NO: 845564 - protein, 782 aa, Homo sapiens
MGRSGKLPSGVSAKLKRWKKGHSSDSNPAICRHRQAARSRFFSRPSGRSDLTVDAVKLHNELQSGSLRLGKSEAPETPMEEEAELVLTEKSSGTFLSGLSDCTNVTFSKVQRFWESNSAAHKEICAVLAAVTEVIRSQGGKETETEYFAALMTTMEAVESPESLAAVAYLLNLVLKRVPSPVLIKKFSDTSKAFMDIMSAQASSGSTSVLRWVLSCLATLLRKQDLEAWGYPVTLQVYHGLLSFTVHPKPKIRKAAQHGVCSVLKGSEFMFEKAPAHHPAAISTAKFCIQEIEKSGGSKEATTTLHMLTLLKDLLPCFPEGLVKSCSETLLRVMTLSHVLVTACAMQAFHSLFHARPGLSTLSAELNAQIITALYDYVPSENDLQPLLAWLKVMEKAHINLVRLQWDLGLGHLPRFFGTAVTCLLSPHSQVLTAATQSLKEILKECVAPHMADIGSVTSSASGPAQSVAKMFRAVEEGLTYKFHAAWSSVLQLLCVFFEACGRQAHPVMRKCLQSLCDLRLSPHFPHTAALDQAVGAAVTSMGPEVVLQAVPLEIDGSEETLDFPRSWLLPVIRDHVQETRLGFFTTYFLPLANTLKSKAMDLAQAGSTVESKIYDTLQWQMWTLLPGFCTRPTDVAISFKGLARTLGMAISERPDLRVTVCQALRTLITKGCQAEADRAEVSRFAKNFLPILFNLYGQPVAAGDTPAPRRAVLETIRTYLTITDTQLVNSLLEKASEKVLDPASSDFTRLSVLDLVVALAPCADEAAISKLYSTIRPYLEC

SEQ ID NO: 845565 - protein, 1048 aa, Homo sapiens
  misc_feature (1033)..(1033): Xaa can be any naturally occurring amino acid
  misc_feature (1036)..(1036): Xaa can be any naturally occurring amino acid
  misc_feature (1043)..(1043): Xaa can be any naturally occurring amino acid
  misc_feature (1045)..(1045): Xaa can be any naturally occurring amino acid
MGRSGKLPSGVSAKLKRWKKGHSSDSNPAICRHRQAARSRFFSRPSGRSDLTVDAVKLHNELQSGSLRLGKSEAPETPMEEEAELVLTEKSSGTFLSGLSDCTNVTFSKVQRFWESNSAAHKEICAVLAAVTEVIRSQGGKETETEYFAALMTTMEAVESPESLAAVAYLLNLVLKRVPSPVLIKKFSDTSKAFMDIMSAQASSGSTSVLRWVLSCLATLLRKQDLEAWGYPVTLQVYHGLLSFTVHPKPKIRKAAQHGVCSVLKGSEFMFEKAPAHHPAAISTAKFCIQEIEKSGGSKEATTTLHMLTLLKDLLPCFPEGLVKSCSETLLRVMTLSHVLVTACAMQAFHSLFHARPGLSTLSAELNAQIITALYDYVPSENDLQPLLAWLKVMEKAHINLVRLQWDLGLGHLPRFFGTAVTCLLSPHSQVLTAATQSLKEILKECVAPHMADIGSVTSSASGPAQSVAKMFRAVEEGLTYKFHAAWSSVLQLLCVFFEACGRQAHPVMRKCLQSLCDLRLSPHFPHTAALDQAVGAAVTSMGPEVVLQAVPLEIDGSEETLDFPRSWLLPVIRDHVQETRLGFFTTYFLPLANTLKSKAMDLAQAGSTVESKIYDTLQWQMWTLLPGFCTRPTDVAISFKGLARTLGMAISERPDLRVTVCQALRTLITKGCQAEADRAEVSRFAKNFLPILFNLYGQPVAAGDTPAPRRAVLETIRTYLTITDTQLVNSLLEKASEKVLDPASSDFTRLSVLDLVVALAPCADEAAISKLYSTIRPYLESKAHGVQKKAYRVLEEVCASPQGPGALFVQSHLEDLKKTLLDSLRSTSSPAKRPRLKCLLHIVRKLSAEHKEFITALIPEVILCTKEVSVGARKNAFALLVEMGHAFLRFGSNQEEALQCYLVLIYPGLVGAVTMVSCSILALTHLLFEFKGLMGTSTVEQLLENVCLLLASRTRDVVKSALGFIKVAVTVMDVAHLAKHVQLVMEAIGKLSDDMRRHFRMKLRNLFTKFIRKFGILTWGKKAVGPKEYPKXSLXQNFRKNXRXPGP

SEQ ID NO: 845566 - protein, 139 aa, Homo sapiens
FLWWGAQGGVTVALTVPPPWQGSGGGPDVQIPCGLELRVAAAVCLLRGVWETGPPCDEEGEWGAAGARAGSGAGSWTMGSWRARVSVISAPCSAPHPDRAIAGAPCSIPWKVTGPTREGQEKGWQSPHLLTSLCWSYWF

SEQ ID NO: 845567 - protein, 1197 aa, Homo sapiens
MGRSGKLPSGVSAKLKRWKKGHSSDSNPAICRHRQAARSRFFSRPSGRSDLTVDAVKLHNELQSGSLRLGKSEAPETPMEEEAELVLTEKSSGTFLSGLSDCTNVTFSKVQRFWESNSAAHKEICAVLAAVTEVIRSQGGKETETEYFAALIRKAAQHGVCSVLKGSEFMFEKAPAHHPAAISTAKFCIQEIEKSGGSKEATTTLHMLTLLKDLLPCFPEGLVKSCSETLLRVMTLSHVLVTACAMQAFHSLFHARPGLSTLSAELNAQIITALYDYVPSENDLQPLLAWLKVMEKAHINLVRLQWDLGLGHLPRFFGTAVTCLLSPHSQVLTAATQSLKEILKECVAPHMADIGSVTSSASGPAQSVAKMFRAVEEGLTYKFHAAWSSVLQLLCVFFEACGRQAHPVMRKCLQSLCDLRLSPHFPHTAALDQAVGAAVTSMGPEVVLQAVPLEIDGSEETLDFPRSWLLPVIRDHVQETRLGFFTTYFLPLANTLKSKAMDLAQAGSTVESKIYDTLQWQMWTLLPGFCTRPTDVAISFKGLARTLGMAISERPDLRVTVCQALRTLITKGCQAEADRAEVSRFAKNFLPILFNLYGQPVAAGDTPAPRRAVLETIRTYLTITDTQLVNSLLEKASEKVLDPASSDFTRLSVLDLVVALAPCADEAAISKLYSTIRPYLESKAHGVQKKAYRVLEEVCASPQGPGALFVQSHLEDLKKTLLDSLRSTSSPAKRPRLKCLLHIVRKLSAEHKEFITALIPEVILCTKEVSVGARKNAFALLVEMGHAFLRFGSNQEEALQCYLVLIYPGLVGAVTMVSCSILALTHLLFEFKGLMGTSTVEQLLENVCLLLASRTRDVVKSALGFIKVAVTVMDVAHLAKHVQLVMEAIGKLSDDMRRHFRMKLRNLFTKFIRKFGFELVKRLLPEEYHRVLVNIRKAEARAKRHRALSQAAVEEEEEEEEEEEPAQGKGDSIEEILADSEDEEDNEEEERSRGKEQRKLARQRSRAWLKEGGGDEPLNFLDPKVAQRVLATQPGPGRGRKKDHGFKVSADGRLIIREEADGNKMEEEEGAKGEDEEMADPMEDVIIRNKKHQKLKHQKEAEEEELEIPPQYQAGGSGIHRPVAKKAMPGAEYKAKKAKGDVKKKGRPDPYAYIPLNRSKLNRRKKMKLQGQFKGLVKAARRGSQVGHKNRRKDRRP

SEQ ID NO: 845568 - protein, 1130 aa, Homo sapiens
PPYQLRRPNTVRWPNTVRLPNVGQRTFMDIMSAQASSGSTSVLRWVLSCLATLLRKQDLEAWGYPVTLQVYHGLLSFTVHPKPKIRKAAQHGVCSVLKGSEFMFEKAPAHHPAAISTAKFCIQEIEKSGGSKEATTTLHMLTLLKDLLPCFPEGLVKSCSETLLRVMTLSHVLVTACAMQAFHSLFHARPGLSTLSAELNAQIITALYDYVPSENDLQPLLAWLKVMEKAHINLVRLQWDLGLGHLPRFFGTAVTCLLSPHSQVLTAATQSLKEILKECVAPHMADIGSVTSSASGPAQSVAKMFRAVEEGLTYKFHAAWSSVLQLLCVFFEACGRQAHPVMRKCLQSLCDLRLSPHFPHTAALDQAVGAAVTSMGPEVVLQAVPLEIDGSEETLDFPRSWLLPVIRDHVQETRLGFFTTYFLPLANTLKSKAMDLAQAGSTVESKIYDTLQWQMWTLLPGFCTRPTDVAISFKGLARTLGMAISERPDLRVTVCQALRTLITKGCQAEADRAEVSRFAKNFLPILFNLYGQPVAAGDTPAPRRAVLETIRTYLTITDTQLVNSLLEKASEKVLDPASSDFTRLSVLDLVVALAPCADEAAISKLYSTIRPYLESKAHGVQKKAYRVLEEVCASPQGPGALFVQSHLEDLKKTLLDSLRSTSSPAKRPRLKCLLHIVRKLSAEHKEFITALIPEVILCTKEVSVGARKNAFALLVEMGHAFLRFGSNQEEALQCYLVLIYPGLVGAVTMVSCSILALTHLLFEFKGLMGTSTVEQLLENVCLLLASRTRDVVKSALGFIKVAVTVMDVAHLAKHVQLVMEAIGKLSDDMRRHFRMKLRNLFTKFIRKFGFELVKRLLPEEYHRVLVNIRKAEARAKRHRALSQAAVEEEEEEEEEEEPAQGKGDSIEEILADSEDEEDNEEEERSRGKEQRKLARQRSRAWLKEGGGDEPLNFLDPKVAQRVLATQPGPGRGRKKDHGFKVSADGRLIIREEADGNKMEEEEGAKGEDEEMADPMEDVIIRNKKHQKLKHQKEAEEEELEIPPQYQAGGSGIHRPVAKKAMPGAEYKAKKAKGDVKKKGRPDPYAYIPLNRSKLNRRKKMKLQGQFKGLVKAARRGSQVGHKNRRKDRRP

SEQ ID NO: 845569 - protein, 415 aa, Homo sapiens
MDSLRALRLGANQEKALQCYLVLIYPGLVGAVTMVSCSILALTHLLFEFKGLMGTSTVEQLLENVCLLLASRTRDVVKSALGFIKVAVTVMDVAHLAKHVQLVMEAIGKLSDDMRRHFRMKLRNLFTKFIRKFGFELVKRLLPEEYHRVLVNIRKAEARAKRHRALSQAAVEEEEEEEEEEEPAQGKGDSIEEILADSEDEEDNEEEERSRGKEQRKLARQRSRAWLKEGGGDEPLNFLDPKVAQRVLATQPGPGRGRKKDHGFKVSADGRLIIREEADGNKMEEEEGAKGEDEEMADPMEDVIIRNKKHQKLKHQKEAEEEELEIPPQYQAGGSGIHRPVAKKAMPGAEYKAKKAKGDVKKKGRPDPYAYIPLNRSKLNRRKKMKLQGQFKGLVKAARRGSQVGHKNRRKDRRP

SEQ ID NO: 845570 - protein, 1253 aa, Homo sapiens
MGRSGKLPSGVSAKLKRWKKGHSSDSNPAICRHRQAARSRFFSRPSGRSDLTVDAVKLHNELQSGSLRLGKSEAPETPMEEEAELVLTEKSSGTFLSGLSDCTNVTFSKVQRFWESNSAAHKEICAVLAAVTEVIRSQGGKETETEYFAALMTTMEAVESPESLAAVAYLLNLVLKRVPSPVLIKKFSDTSKAFMDIMSAQASSGSTSVLRWVLSCLATLLRKQDLEAWGYPVTLQVYHGLLSFTVHPKPKIRKAAQHGVCSVLKGSEFMFEKAPAHHPAAISTAKFCIQEIEKSGGSKEATTTLHMLTLLKDLLPCFPEGLVKSCSETLLRVMTLSHVLVTACAMQAFHSLFHARPGLSTLSAELNAQIITALYDYVPSENDLQPLLAWLKVMEKAHINLVRLQWDLGLGHLPRFFGTAVTCLLSPHSQVLTAATQSLKEILKECVAPHMADIGSVTSSASGPAQSVAKMFRAVEEGLTYKFHAAWSSVLQLLCVFFEACGRQAHPVMRKCLQSLCDLRLSPHFPHTAALDQAVGAAVTSMGPEVVLQAVPLEIDGSEETLDFPRSWLLPVIRDHVQETRLGFFTTYFLPLANTLKSKAMDLAQAGSTVESKIYDTLQWQMWTLLPGFCTRPTDVAISFKGLARTLGMAISERPDLRVTVCQALRTLITKGCQAEADRAEVSRFAKNFLPILFNLYGQPVAAGDTPAPRRAVLETIRTYLTITDTQLVNSLLEKASEKVLDPASSDFTRLSVLDLVVALAPCADEAAISKLYSTIRPYLESKAHGVQKKAYRVLEEVCASPQGPGALFVQSHLEDLKKTLLDSLRSTSSPAKRPRLKCLLHIVRKLSAEHKEFITALIPEVILCTKEVSVGARKNAFALLVEMGHAFLRFGSNQEEALQCYLVLIYPGLVGAVTMVSCSILALTHLLFEFKGLMGTSTVEQLLENVCLLLASRTRDVVKSALGFIKVAVTVMDVAHLAKHVQLVMEAIGKLSDDMRRHFRMKLRNLFTKFIRKFGFELVKRLLPEEYHRVLVNIRKAEARAKRHRALSQAAVEEEEEEEEEEEPAQGKGDSIEEILADSEDEEDNEEEERSRGKEQRKLARQRSRAWLKEGGGDEPLNFLDPKVAQRVLATQPGPGRGRKKDHGFKVSADGRLIIREEADGNKMEEEEGAKGEDEEMADPMEDVIIRNKKHQKLKHQKEAEEEELEIPPQYQAGGSGIHRPVAKKAMPGAEYKAKKAKGDVKKKPALPVQPT

SEQ ID NO: 845571 - protein, 1198 aa, Homo sapiens
MGRSGKLPSGVSAKLKRWKKGHSSDSNPAICRHRQAARSRFFSRPSGRSDLTVDAVKLHNELQSGSLRLGKSEAPETPMEEEAELVLTEKSSGTFLSGLSDCTNVTFSKVQRFWESNSAAHKEICAVLAAVTEVIRSQGGKETETEYFAALMTTMEAVESPESLAAVAYLLNLVLKRVPSPVLIKKFSDTSKAFMDIMSAQASSGSTSVLRWVLSCLATLLRKQDLEAWGYPVTLQVYHGLLSFTVHPKPKIRKAAQHGVCSVLKGSEFMFEKAPAHHPAAISTAKFCIQEIEKSGGSKEATTTLHMLTLLKDLLPCFPEGLVKSCSETLLRVMTLSHVLVTACAMQAFHSLFHARPGLSTLSAELNAQIITALYDYVPSENDLQPLLAWLKVMEKAHINLVRLQWDLGLGHLPRFFGTAVTCLLSPHSQVLTAATQSLKEILKECVAPHMADIGSVTSSASGPAQSVAKMFRAVEEGLTYKFHAAWSSVLQLLCVFFEACGRQAHPVMRKCLQSLCDLRLSPHFPHTAALDQAVGAAVTSMGPEVVLQAVPLEIDGSEETLDFPRSWLLPVIRDHVQETRLGFFTTYFLPLANTLKSKAMDLAQAGSTVESKIYDTLQWQMWTLLPGFCTRPTDVAISFKGLARTLGMAISERPDLRVTVCQALRTLITKGCQAEADRAEVSRFAKNFLPILFNLYGQPVAAGDTPAPRRAVLETIRTYLTITDTQLVNSLLEKASEKVLDPASSDFTRLSVLDLVVALAPCADEAAISKLYSTIRPYLESKAHGVQKKAYRVLEEVCASPQGPGALFVQSHLEDLKKTLLDSLRSTSSPAKRPRLKCLLHIVRKLSAEHKEFITALIPEVILCTKEVSVGARKNAFALLVEMGHAFLRFGSNQEEALQCYLVLIYPGLVGAVTMVSCSILALTHLLFEFKGLMGTSTVEQLLENVCLLLASRTRDVVKSALGFIKVAVTVMDVAHLAKHVQLVMEAIGKLSDDMRRHFRMKLRNLFTKFIRKFGFELVKRLLPEEYHRVLVNIRKAEARAKRHRALSQAAVEEEEEEEEEEEPAQGKGDSIEEILADSEDEEDNEEEERSRGKEQRKLARQRSRAWLKEGGGDEPLNFLDPKVAQRVLATQPGPGRGRKKDHGFKVSADGRLIIREEADGNKMEEEEGAKGGPNALVHSFTVFTYSFGDHLLRKRG

SEQ ID NO: 845572 - protein, 31 aa, Homo sapiens
MEEEAELVLTEKSSGTFLSGLSDCTNVTFSK

SEQ ID NO: 845573 - protein, 71 aa, Homo sapiens
AALQGPSGVTISVLSHSVPSPVLIKKFSDTSKAFMDIMSAQASSGSTSVLRWVSVWGLVSHLATPRACLIW

SEQ ID NO: 845574 - protein, 227 aa, Homo sapiens
MEQVPSAGRLVQITVTEGYDLKGFKGDTPVTFIRAEFNQVVLGDSAKITVSPEGSAKYNFTSSFEFNPEGGITSDDLAHKPVFLTVTEVLPKEKKQKEEKTLILGQAVVDLLPLLEGQSSFQTTVPLHPVQGSPLETPRSSAKQCSLEVKVLVAEPLLTTAQISGGNLLKVTLEAAYSVPESFIPTGPGQNYMVGLQVPSLGEKDYPILFKNGTLKLGGEREPVPRP

SEQ ID NO: 845575 - protein, 133 aa, Homo sapiens [sequence omitted]

SEQ ID NO: 845576 - protein, 82 aa, Homo sapiens
RRHIHDPRHRSNLCLTPPLPARDGKQTESGSSECSLEGLLENLLEGCEDMFGNLFAENIFSPVHHSQLAEELKRQEISKRER

SEQ ID NO: 845577 - protein, 169 aa, Homo sapiens
MILLEVNNRIIEETLALKFENAAAGNKPEAVEVTFADFDGVLYHISNPNGDKTKVMVSISLKFYKELQAHGADELLKRVYGSFLVNPESGYNVSLLYDLENLPASKDSIVHQAGMLKRNCFASVFEKYFQFQEEGKEGENRAVIHYRDDETMYVESKQGQSHSSLQHSV

SEQ ID NO: 845578 - protein, 152 aa, Homo sapiens
GGSGLGGRNKPEAVEVTFADFDGVLYHISNPNGDKTKVMVSISLKFYKELQAHGADELLKRVYGSFLVNPESGYNVSLLYDLENLPASKDSIVHQAGMLKRNCFASVFEKYFQFQEEGKEGENRAVIHYRDDETMYVESKQGQSHSSLQHSV

SEQ ID NO: 845579 - protein, 65 aa, Homo sapiens
MIEDPIEICKCYFYCFRFVSGGRVLELERERLLDDAVVHLQQDHGGGWPPKPDPPHDLPPAATAA

SEQ ID NO: 845580 - protein, 169 aa, Homo sapiens; identical to SEQ ID NO: 845577

SEQ ID NO: 845581 - protein, 169 aa, Homo sapiens; identical to SEQ ID NO: 845577

SEQ ID NO: 845582 - protein, 169 aa, Homo sapiens; identical to SEQ ID NO: 845577

SEQ ID NO: 845583 - protein, 169 aa, Homo sapiens; identical to SEQ ID NO: 845577

SEQ ID NO: 845584 - protein, 150 aa, Homo sapiens
RSLRRRAQPEAVEVTFADFDGVLYHISNPNGDKTKVMVSISLKFYKELQAHGADELLKRVYGSFLVNPESGYNVSLLYDLENLPASKDSIVHQAGMLKRNCFASVFEKYFQFQEEGKEGENRAVIHYRDDETMYVESKQGQSHSSLQHSV

SEQ ID NO: 845585 - protein, 152 aa, Homo sapiens; identical to SEQ ID NO: 845578

SEQ ID NO: 845586 - protein, 169 aa, Homo sapiens; identical to SEQ ID NO: 845577

SEQ ID NO: 845587 - protein, 169 aa, Homo sapiens; identical to SEQ ID NO: 845577

SEQ ID NO: 845588 - protein, 104 aa, Homo sapiens
MILLEVNNRIIEETLALKFENAAAGNKPEAVEVTFADFDGVLYHISNPNGDKTKVMVSISLKFYKELQAHGADELLKRVYGSFLVNPESGSLLIGCLNIHGQRN

SEQ ID NO: 845589 - protein, 104 aa, Homo sapiens
MFDLIEAGNFVSTLFEWLLTTEVLKFFFFFLIVSLLLPKRECSGAILAHRNLRLSWVQVILLPKPPGSQQSSNRLSQHSWPEELKGTVSSLNRTAMLYCFKKEV

SEQ ID NO: 845590 - protein, 195 aa, Homo sapiens
DDKARYSWCESPRLSVKRQWRRPAAAMILLEVNNRIIEETLALKFENAAAGNKPEAVEVTFADFDGVLYHISNPNGDKTKVMVSISLKFYKELQAHGADELLKRVYGSFLVNPESGYNVSLLYDLENLPASKDSIVHQAGMLKRNCFASVFEKYFQFQEEGKEGENRAVIHYRDDETMYVESKQGQSHSSLQHSV

SEQ ID NO: 845591 - protein, 177 aa, Homo sapiens
SGRSSLRLGTRPGCYNRIIEETLALKFENAAAGNKPEAVEVTFADFDGVLYHISNPNGDKTKVMVSISLKFYKELQAHGADELLKRVYGSFLVNPESGYNVSLLYDLENLPASKDSIVHQAGMLKRNCFASVFEKYFQFQEEGKEGENRAVIHYRDDETMYVESKQGQSHSSLQHSV

SEQ ID NO: 845592 - protein, 147 aa, Homo sapiens
MYEAGVNLAEGTFADFDGVLYHISNPNGDKTKVMVSISLKFYKELQAHGADELLKRVYGSFLVNPESGYNVSLLYDLENLPASKDSIVHQAGMLKRNCFASVFEKYFQFQEEGKEGENRAVIHYRDDETMYVESKQGQSHSSLQHSV

SEQ ID NO: 845593 - protein, 104 aa, Homo sapiens; identical to SEQ ID NO: 845588

SEQ ID NO: 845594 - protein, 104 aa, Homo sapiens; identical to SEQ ID NO: 845588

SEQ ID NO: 845595 - protein, 137 aa, Homo sapiens
MIEDPIEICKCYFYCFRFVSGGRVLELERERLLDDAVVHLQQDHGGGWPQGKEKQGPVRVGKGGKDGGRGLCMLSLNKDRVTVVFSTVFKDDDDVVIGKVFMQEFKEGRRASHTAPQVLFSHREPPLELKDTDAAVG

SEQ ID NO: 845596 - protein, 137 aa, Homo sapiens; identical to SEQ ID NO: 845595

SEQ ID NO: 845597 - protein, 179 aa, Homo sapiens
MILLEVNNRIIEETLALKFENAAAGNKPEAVEVTFADFDGVLYHISNPNGDKTKVMVSISLKFYKELQAHGADELLKRVYGSFLVNPESGYNVSLLYDLENLPASKDSIVHQAGMLSLNKDRVTVVFSTVFKDDDDVVIGKVFMQEFKEGRRASHTAPQVLFSHREPPLELKDTDAAVG

SEQ ID NO: 845598 - protein, 137 aa, Homo sapiens; identical to SEQ ID NO: 845595

SEQ ID NO: 845599 - protein, 75 aa, Homo sapiens
LSSWILFLSGMLSLNKDRVTVVFSTVFKDDDDVVIGKVFMQEFKEGRRASHTAPQVLFSHREPPLELKDTDAAVG

SEQ ID NO: 845600 - protein, 169 aa, Homo sapiens; identical to SEQ ID NO: 845577

SEQ ID NO: 845601 - protein, 169 aa, Homo sapiens; identical to SEQ ID NO: 845577

SEQ ID NO: 845602 - protein, 169 aa, Homo sapiens; identical to SEQ ID NO: 845577

SEQ ID NO: 845603 - protein, 111 aa, Homo sapiens
  misc_feature (1)..(1): Xaa can be any naturally occurring amino acid
XGKAEPLREAGAGRWTVEGFFEHWHWCDEGQHKGNVPMLSPTAASVSFSSRGGSLWLKRTCGAVWLALRPSLNSCMNTFPMTTSSSSLNTVLKTTVTLSFLDSTYMVSSSL

SEQ ID NO: 845604 - protein, 112 aa, Homo sapiens
MILLEVNNRIIEETLALKFENAAAGNKPEAVEVTFADFDGVLYHISNPNGDKTKVMVSISLKFYKELQAHGADEVRSTSFSLGLLFPHLSLAVCHSWKIHGTKSPPHDYLLT

SEQ ID NO: 845605 - protein, 104 aa, Homo sapiens; identical to SEQ ID NO: 845588

SEQ ID NO: 845606 - protein, 104 aa, Homo sapiens
GAAGPRVQAASGSGCESGSGRLEPGAGRGPGLSVKRQWRRRRRLGRRVQASGASRRHDPAGGEQPHHRGDARAQVRERGRRKQTGSSRSNICRFRWGPLSYFKS

SEQ ID NO: 845607 - protein, 104 aa, Homo sapiens; identical to SEQ ID NO: 845588

SEQ ID NO: 845608 - protein, 108 aa, Homo sapiens
MILLEVNNRIIEETLALKFENAAAGNKPEAVEVTFADFDGVLYHISNPNGDKTKVMVSISLKFYKELQAHGADEPPPLFFFFFFFFFFFGHLKAFILCKKLKYDYGVT

SEQ ID NO: 845609 - protein, 106 aa, Homo sapiens
VCVVLLRSSWYDCVFSLAPIYACVLSRAPFSPPSCFFERCRAVVQVSTVRCSSGFLCLMAPLSLLLPSECPALCQRFSFVSRDSGVKRFPRDGSISFSGFGFPFSP

SEQ ID NO: 845610 - protein, 167 aa, Homo sapiens
  misc_feature (161)..(161): Xaa can be any naturally occurring amino acid
MILLEVNNRIIEETLALKFENAAAGNKPEAVEVTFADFDGVLYHISNPNGDKTKVMVSISLKFYKELQAHGADELLKRVYGSFLVNPESGYNVSLLYDLENLPASKDSIVHQAGMLKRNCFASVFEKYFQFQEEGKEGENRAVIHYRDDETMVVIGKVFMXEFKEGS

SEQ ID NO: 845611 - protein, 169 aa, Homo sapiens; identical to SEQ ID NO: 845577

SEQ ID NO: 845612 - protein, 169 aa, Homo sapiens; identical to SEQ ID NO: 845577

SEQ ID NO: 845613 - protein, 169 aa, Homo sapiens; identical to SEQ ID NO: 845577

SEQ ID NO: 845614 - protein, 169 aa, Homo sapiens; identical to SEQ ID NO: 845577

SEQ ID NO: 845615 - protein, 169 aa, Homo sapiens; identical to SEQ ID NO: 845577

SEQ ID NO: 845616 - protein, 159 aa, Homo sapiens
HRGSPSRFIPHLINLIPFLYLPSHHFPFLPPSFPSCFACNILLVMSCSISLKFYKELQAHGADELLKRVYGSFLVNPESGYNVSLLYDLENLPASKDSIVHQAGMLKRNCFASVFEKYFQFQEEGKEGENRAVIHYRDDETMYVESKQGQSHSSLQHSV

SEQ ID NO: 845617 - protein, 169 aa, Homo sapiens; identical to SEQ ID NO: 845577

SEQ ID NO: 845618 - protein, 169 aa, Homo sapiens; identical to SEQ ID NO: 845577

SEQ ID NO: 845619 - protein, 104 aa, Homo sapiens; identical to SEQ ID NO: 845588

SEQ ID NO: 845620 - protein, 114 aa, Homo sapiens
MVSISLKFYKELQAHGADELLKRVYGSFLVNPESGYNVSLLYDLENLPASKDSIVHQAGMLKRNCFASVFEKYFQFQEEGKEGENRAVIHYRDDETMYVESKQGQSHSSLQHSV

SEQ ID NO: 845621 - protein, 86 aa, Homo sapiens
DDKARYSWCESPRLSVKRQWRRRRRLGRRVQASGASRRHDPAGGEQPHHRGDARAQVRERGRRKQTGSSRSNICRFRWGPLSYFKS

SEQ ID NO: 845622 - protein, 137 aa, Homo sapiens; identical to SEQ ID NO: 845595

SEQ ID NO: 845623 - protein, 104 aa, Homo sapiens; identical to SEQ ID NO: 845588

SEQ ID NO: 845624 - protein, 77 aa, Homo sapiens
SRGIAAGMMRPCMLSLNKDRVTVVFSTVFKDDDDVVIGKVFMQEFKEGRRASHTAPQVLFSHREPPLELKDTDAAVG

SEQ ID NO: 845625 - protein, 169 aa, Homo sapiens; identical to SEQ ID NO: 845577

SEQ ID NO: 845626 - protein, 104 aa, Homo sapiens; identical to SEQ ID NO: 845588

SEQ ID NO: 845627 - protein, 139 aa, Homo sapiens
MILLEVNNRIIEETLALKFENAAAGNKPEAVEVTFADFDGVLYHISNPNGDKTKVMVSISLKFYKELQAHGADELLKRVYGSFLVNPESGYNVSLLYDLENLPASKDSIVHQAGMLKHSSLLLFSSCKQLKIFKIKFTL

SEQ ID NO: 845628 - protein, 86 aa, Homo sapiens; identical to SEQ ID NO: 845621

SEQ ID NO: 845629 - protein, 589 aa, Homo sapiens
LGEGAQVAAILDCELGRYASRQGGVAALLLPATHVAAGDWEIRASESATLMDAMASPGKDNYRMKSYKNKALNPQEMRRRREEEGIQLRKQKREEQLFKRRNVYLPRNDESMLESPIQDPDISSTVPIPEEEVVTTDMVQMIFSNNADQQLTATQKFRKLLSKEPNPPIDQVIQKPGVVQRFVKFLERNENCTLQFEAAWALTNIASGTFLHTKVVIETGAVPIFIKLLNSEHEDVQEQAVWALGNIAGDNAECRDFVLNCEILPPLLELLTNSNRLTTTRNAVWALSNLCRGKNPPPNFSKVSPCLNVLSRLLFSSDPDVLADVCWALSYLSDGPNDKIQAVIDSGVCRRLVELLMHNDYKVVSPALRAVGNIVTGDDIQTQVILNCSALPCLLHLLSSPKESIRKEACWTVSNITAGNRAQIQAVIDANIFPVLIEILQKAEFRTRKEAAWAITNATSGGTPEQIRYLVALGCIKPLCDLLTVMDSKIVQVALNGLENILRLGEQESKQNGIGINPYCALIEEAYGLDKIEFLQSHENQEIYQKAFDLIEHYFGVEEDDPSIVPQVDENQQQFIFQQQEAPMDGFQL

SEQ ID NO: 845630 - protein, 589 aa, Homo sapiens; identical to SEQ ID NO: 845629

SEQ ID NO: 845631 - protein, 536 aa, Homo sapiens
MASPGKDNYRMKSYKNKALNPQEMRRRREEEGIQLRKQKREEQLFKRRNVYLPRNDESMLESPIQDPDISSTVPIPEEEVVTTDMVQMIFSNNADQQLTATQKFRKLLSKEPNPPIDQVIQKPGVVQRFVKFLERNENCTLQFEAAWALTNIASGTFLHTKVVIETGAVPIFIKLLNSEHEDVQEQAVWALGNIAGDNAECRDFVLNCEILPPLLELLTNSNRLTTTRNAVWALSNLCRGKNPPPNFSKVSPCLNVLSRLLFSSDPDVLADVCWALSYLSDGPNDKIQAVIDSGVCRRLVELLMHNDYKVVSPALRAVGNIVTGDDIQTQVILNCSALPCLLHLLSSPKESIRKEACWTVSNITAGNRAQIQAVIDANIFPVLIEILQKAEFRTRKEAAWAITNATSGGTPEQIRYLVALGCIKPLCDLLTVMDSKIVQVALNGLENILRLGEQESKQNGIGINPYCALIEEAYGLDKIEFLQSHENQEIYQKAFDLIEHYFGVEEDDPSIVPQVDENQQQFIFQQQEAPMDGFQL

SEQ ID NO: 845632 - protein, 199 aa, Homo sapiens
MIVSSDSNNIDITCTKLSYYSRNFSEGISKKEDNIKKKLQIMEEYEESGLLETDEATLDTRKIVEACKAKTDAGGEDAILQTRTYDLYITYDKYYQTPRLWLFGYDEQRQPLTVEHMYEDISQDHVKKTVTIENHPHLPPPPMCSVHPCRHAEVMKKIIETVAEGGGELGVHMYLLIFLKFVQAVIPTIEYDYTRHFTM

SEQ ID NO: 845633 - protein, 314 aa, Homo sapiens
MQNVINTVKGKALEVAEYLTPVLKESKFKETGVITPEEFVAAGDHLVHHCPTWQWATGEELKVKAYLPTGKQFLVTKNVPCYKRCKQMEYSDELEAIIEEDDGDGGWVDTYHNTGITGITEAVKEITLENKDNIRLQDCSALCEEEEDEDEGEAADMEEYEESGLLETDEATLDTRKIVEACKAKTDAGGEDAILQTRTYDLYITYDKYYQTPRLWLFGYDEQRQPLTVEHMYEDISQDHVKKTVTIENHPHLPPPPMCSVHPCRHAEVMKKIIETVAEGGGELGVHMYLLIFLKFVQAVIPTIEYDYTRHFTM

SEQ ID NO: 845634 - protein, 314 aa, Homo sapiens; identical to SEQ ID NO: 845633

SEQ ID NO: 845635 - protein, 311 aa, Homo sapiens
MQNVINTVKGKALEVAEYLTPVLKESKFKETGVITPEEFVAAGDHLVHHCPTWQWATGEELKVKAYLPTGKQFLVTKNVPCYKRCKQMEYSDELEAIIEEDDGDGGWVDTYHNTGITGITEAVKEITLENKDNIRLQDCSALCEEEEDEDEGEAADMEEYEESGLLETDEATLDTRKIVEACKAKTDAGGEDAILQTRTYDLYITYDKYYQTPRLWLFGYDEQRQPLTVEHMYEDISQDHVKKTVTIENHPHLPPPPMCSVHPCRHAEVMKKIIETVAEGGGELGVHMYPSLYVRLVAKWLLTIFFLRNLV

SEQ ID NO: 845636 - protein, 314 aa, Homo sapiens; identical to SEQ ID NO: 845633

SEQ ID NO: 845637 - protein, 306 aa, Homo sapiens
MQNVINTVKGKALEVAEYLTPVLKESKFKETGVITPEEFVAAGDHLVHHCPTWQWATGEELKVKAYLPTGKQFLVTKNVPCYKRCKQMEYSDELEAIIEEDDGDGGWVDTYHNTGITGITEAVKEITLENKDNIRLQDCSALCEEEEDEDEGEAADMEEYEESGLLETDEATLDTRKIVEACKAKTDAGGEDAILQTRTYDLYITYDKYYQTPRLWLFGYDEQRQPLTVEHMYEDISQDHVKKTVTIENHPHLPPPPMCSVHPCRHAEVMKKIIETVAEGGGELGVHMYLLISLKCSTNCAWDRYR

SEQ ID NO: 845638 - protein, 262 aa, Homo sapiens
MAWATGEELKVKAYLPTGKQFLVTKNVPCYKRCKQMEYSDELEAIIEEDDGDGGWVDTYHNTGITGITEAVKEITLENKDNIRLQDCSALCEEEEDEDEGEAADMEEYEESGLLETDEATLDTRKIVEACKAKTDAGGEDAILQTRTYDLYITYDKYYQTPRLWLFGYDEQRQPLTVEHMYEDISQDHVKKTVTIENHPHLPPPPMCSVHPCRHAEVMKKIIETVAEGGGELGVHMYLLIFLKFVQAVIPTIEYDYTRHFTM

SEQ ID NO: 845639 - protein, 267 aa, Homo sapiens
ERTRHERAQAPPSNAQEKVVVQPLSLFFPATLPCYKRCKQMEYSDELEAIIEEDDGDGGWVDTYHNTGITGITEAVKEITLENKDNIRLQDCSALCEEEEDEDEGEAADMEEYEESGLLETDEATLDTRKIVEACKAKTDAGGEDAILQTRTYDLYITYDKYYQTPRLWLFGYDEQRQPLTVEHMYEDISQDHVKKTVTIENHPHLPPPPMCSVHPCRHAEVMKKIIETVAEGGGELGVHMYLLIFLKFVQAVIPTIEYDYTRHFTM

SEQ ID NO: 845640 - protein, 140 aa, Homo sapiens
VQCYASGRRGEAAYPAPARPLSHVTCRESLVSREAPVAAQLRQESEKEGKPEGARVKQSEDRQLPEGEGCVCVRFSPQVSLRPRCPPSRLGDSWVRSVAGCLGCEDRAPRLRALCLPPRPLVPPVPSRRVPSPRVLPAGC

SEQ ID NO: 845641 - protein, 103 aa, Homo sapiens
RASLLSCCILIIPPFQTLIQRQPLTVEHMYEDISQDHVKKTVTIENHPHLPPPPMCSVHPCRHAEVMKKIIETVAEGGGELGVHMYLLISLKCSTNCAWDRYR

SEQ ID NO: 845642 - protein, 314 aa, Homo sapiens; identical to SEQ ID NO: 845633

SEQ ID NO: 845643 - protein, 314 aa, Homo sapiens; identical to SEQ ID NO: 845633

SEQ ID NO: 845644 - protein, 319 aa, Homo sapiens
MQNVINTVKGKALEVAEYLTPVLKESKFKETGVITPEEFVAAGDHLVHHCPTWQWATGEELKVKAYLPTGKQFLVTKNVPCYKRCKQMEYSDELEAIIEEDDGDGGWVDTYHNTGITGITEAVKEITLENKDNIRLQDCSALCEEEEDEDEGEAADMEEYEESGLLETDEATLDTRKIVEACKAKTDAGGEDAILQTRTYDLYITYDKYYQTPRLWLFGYDEQRQPLTVEHMYEDISQDHVKKTVTIENHPHLPPPPMCSVHPCRHAEVMKKIIETVAEGGGELGVHMYLLIFWKLGQAVIPTKKDPHPTRGKGKKNII

SEQ ID NO: 845645 - protein, 227 aa, Homo sapiens
MEYSDELEAIIEEDDGDGGWVDTYHNTGITGITEAVKEITLENKDNIRLQDCSALCEEEEDEDEGEAADMEEYEESGLLETDEATLDTRKIVEACKAKTDAGGEDAILQTRTYDLYITYDKYYQTPRLWLFGYDEQRQPLTVEHMYEDISQDHVKKTVTIENHPHLPPPPMCSVHPCRHAEVMKKIIETVAEGGGELGVHMYLLIFLKFVQAVIPTIEYDYTRHFTM

SEQ ID NO: 845646 - protein, 301 aa, Homo sapiens
MQNVINTVKGKALEVAEYLTPVLKESKFKETGVITPEEFVAAGDHLVHHCPTWQWATGEELKVKAYLPTGKQFLVTKNVPCYKRCKQMEYSDELEAIIEEDDGDGGWVDTYHNTGITGITEAVKEITLENKDNIRLQDCSALCEEEEDEDEGEAADMEEYEESGLLETDEATLDTRKIVEACKAYITYDKYYQTPRLWLFGYDEQRQPLTVEHMYEDISQDHVKKTVTIENHPHLPPPPMCSVHPCRHAEVMKKIIETVAEGGGELGVHMYLLIFWKLGQAVIPTKKDPHPTRGKGKKNII

SEQ ID NO: 845647 - protein, 741 aa, Homo sapiens
SLIPILQFSLPLEPLNSSSYVLLFLLDNSSSLQEDEEVEMEAISWQASSPAMNGHPAPPVTSARFPSWVTFDDNEVSCPLPPVTSPLKPNTPPSASVIPDVPYNSMGSFKKRDRPKSTLMNFSKVQKLDISSLNRTPSVTEASPWRATNPFLNETLQDVQPSPINPFSAFFEEQERRSQNSSISSTTGKSQRDSLIVIYQDAISFDDSSKTQSHSDAVEKLKQLQIDDPDHFGSATLPDDDPVAWIELDAHPPGSARSQPRDGWPMMLRIPEKKNIMSSRHWGPIFVKLTDTGYLQLYYEQGLEKPFREFKLEICHEISEPRLQNYDENGRIHSLRIDRVTYKEKKKYQPKPAVAHTAEREQVIKLGTTNYDDFLSFIHAVQDRLMDLPVLSMDLSTVGLNYLEEEITVDVRDEFSGIVSKGDNQILQHHVLTRIHILSFLSGLAECRLGLNDILVKGNEIVLRQDIMPTTTTKWIKLHECRFHGCVDEDVFHNSRVILFNPLDACRFELMRFRTVFAEKTLPFTLRTATSVNGAEVEVQSWLRMSTGFSANRDPLTQVPCENVMIRYPVPSEWVKNFRRESVLGEKSLKAKVNRGASFGSTSVSGSEPVMRVTLGTAKYEHAFNSIVWRINRLPDKNSASGHPHCFFCHLELGSDREVPSRFANHVNVEFSMPTTSASKASVRSISVEDKTDVRKWVNYSAHYSYQVALGSIWLMLPTPFVHPTTLPLLFLLAMLTMFAW

SEQ ID NO: 845648 - protein, 905 aa, Homo sapiens [sequence omitted]

SEQ ID NO: 845649 - protein, 884 aa, Homo sapiens
MTTLDHVIATHQSEWVSFNEEPPFPAHSQGGTEEHLPGLSSSPDQSESSSGENHVVDGGSQDHSHSEQDDSSEKMGLISEAASPPGSPEQPPPDLASAISNWVQFEDDTPWASTSPPHQETAETALPLTMPCWTCPSFDSLGRCPLTSESSWTTHSEDTSSPSFGCSYTDLQLINAEEQTSGQASGADSTDNSSSLQEDEEVEMEAISWQASSPAMNGHPAPPVTSARFPSWVTFDDNEVSCPLPPVTSPLKPNTPPSASVIPDVPYNSMGSFKKRDRPKSTLMNFSKVQKLDISSLNRTPSVTEAPPWRATNPFLNETLQDVQPSPINPFSAFFEEQERRSQNSSISSTTGKSQRDSLIVIYQDAISFDDSSKTQSHSDAVEKLKQLQIDDPDHFGSATLPDDDPVAWIELDAHPPGSARSQPRDGWPMMLRIPEKKNIMSSRHWGPIFVKLTDTGYLQLYYEQGLEKPFREFKLEICHEISEPRLQNYDENGRIHSLRIDRVTYKEKKKYQPKPAVAHTAEREQVIKLGTTNYDDFLSFIHAVQDRLMDLPVLSMDLSTVGLNYLEEEITVDVRDEFSGIVSKGDNQILQHHVLTRIHILSFLSGLAECRLGLNDILVKGNEIVLRQDIMPTTTTKWIKLHECRFHGCVDEDVFHNSRVILFNPLDACRFELMRFRTVFAEKTLPFTLRTATSVNGAEVEVQSWLRMSTGFSANRDPLTQVPCENVMIRYPVPSEWVKNFRRESVLGEKSLKAKVNRGASFGSTSVSGSEPVMRVTLGTAKYEHAFNSIVWRINRLPDKNSASGHPHCFFCHLELGSDREVPSRFANHVNVEFSMPTTSASKASVRSISVEDKTDVRKWVNYSAHYSYQVEIEQKKEFEAGL

SEQ ID NO: 845650 - protein, 173 aa, Homo sapiens
AAFVQSCYWMPSLAPDCPLLAMPEETQEDSVAPMMPSQRSRGPLAPNHVHEVCLHQVESISDLHSGAGTLRPYLTEEARPWDELLGVLPPSLCAQAGCSPVYRRGGFLLLLALLVLTCLVLALLAVYLSVLQSESLRILAHTLRTQEETLLKLRLASLSQLRRLNSSEAQAPS

SEQ ID NO: 845651 - protein, 212 aa, Homo sapiens
RSLPLQTLEGRALYYRPWKQEDCIQPSSWLLAKVTIDGRNYIVDAGSGSSSQMWQPLELISGKDQPQVPCIFCLTEERGIWYLDQIRREQYITNKEFLNSHLLPKKKHQKIYLFTLEPRTIEDFESMNTYLQTSPTSSFITTSFCSLQTPEGVYCLVGFILTYRKFNYKDNTDLVEFKTLTEEEVEEVLKNIFKISLGRNLVPKPGDGSLTI

SEQ ID NO: 845652 - protein, 325 aa, Homo sapiens
RSLPLQTLEGRALYYRPWKQEDCIQPSSWLLAKGIMDIEAYFERIGYKNSRNKLDLETLTDILEHQIRAVPFENLNMHCGQAMELGLEAIFDHIVRRNRGGWCLQVNQLLYWALTTIGFQTTMLGGYFYIPPVNKYSTGMVHLLLQVTIDGRNYIVDAGSGSSSQMWQPLELISGKDQPQVPCIFCLTEERGIWYLDQIRREQYITNKEFLNSHLLPKKKHQKIYLFTLEPRTIEDFESMNTYLQTSPTSSFITTSFCSLQTPEGVYCLVGFILTYRKFNYKDNTDLVEFKTLTEEEVEEVLKNIFKISLGRNLVPKPGDGSLTI

SEQ ID NO: 845653 - protein, 298 aa, Homo sapiens
RSLPLQTLEGRALYYRPWKQEDCIQPSSWLLAKGIMDIEAYFERIGYKNSRNKLDLETLTDILEHQIRAVPFENLNMHCGQAMELGLEAIFDHIVRRNRGGWCLQVNQLLYWALTTIGFQTTMLGGYFYIPPVNKYSTGMVHLLLQVTIDGRNYIVDAGSGSSSQMWQPLELISGKDQPQVPCIFCLTEERGIWYLDQIRREQYITNKEFLNSHLLPKKKHQKKKKNWGGGRGPARKSFLKTIARGAAGGPQGVRGTGGQSGVPRGKPGAEEQDGAGNLSSTKLKTGRAGDHTREGLA

SEQ ID NO: 845654 - protein, 106 aa, Homo sapiens
GNIFLPLKIFSQDRSPRPRQVKRHNLAQLQARTLHIQRGYLRHAVAHATGSQRTCGGGGEGNAFGKQPSEVGSQKTRGKASRKITEGRSRPPERSELSVTRPRERG

SEQ ID NO: 845655 - protein, 101 aa, Homo sapiens
GGGGLPAETSGWRRPRLRPGFPPPEGRDKPDLLQALVGVGEERGSVRLVCGWEALVLQKPARAAILRELRWRRWREGRTLLGRGRGVPQYLYGSSLLPPVL

SEQ ID NO: 845656 - protein, 101 aa, Homo sapiens; identical to SEQ ID NO: 845655

SEQ ID NO: 845657 - protein, 101 aa, Homo sapiens; identical to SEQ ID NO: 845655

SEQ ID NO: 845658 - protein, 101 aa, Homo sapiens; identical to SEQ ID NO: 845655

SEQ ID NO: 845659 - protein, 101 aa, Homo sapiens; identical to SEQ ID NO: 845655

SEQ ID NO: 845660 - protein, 101 aa, Homo sapiens; identical to SEQ ID NO: 845655

SEQ ID NO: 845661 - protein, 101 aa, Homo sapiens; identical to SEQ ID NO: 845655

SEQ ID NO: 845662 - protein, 101 aa, Homo sapiens; identical to SEQ ID NO: 845655

SEQ ID NO: 845663 - protein, 101 aa, Homo sapiens; identical to SEQ ID NO: 845655

SEQ ID NO: 845664 - protein, 101 aa, Homo sapiens; identical to SEQ ID NO: 845655

SEQ ID NO: 845665 - protein, 101 aa, Homo sapiens; identical to SEQ ID NO: 845655

SEQ ID NO: 845666 - protein, 106 aa, Homo sapiens; identical to SEQ ID NO: 845654

SEQ ID NO: 845667 - protein, 137 aa, Homo sapiens
MGCSALKMKNKSRRMEETEVDSDTETIFGAFLCMRTSQQNLKQVMSVPDREPSTSFPCSPGQKPNPSLWLHSPVSRAPSTVQPPPGSLPSSHDSLRPSHICFSLFPNIKTLPVSGRCPWFYPTYPVTFSSFRSRLRA

SEQ ID NO: 845668 - protein, 562 aa, Homo sapiens
SHPQAMQWNSTAFHQALQDPRVRGLYFPAGGSSSGTVNPAQNIASHISSISSRTGDPAPNMENITSGFLGPLLVLQAGFFLLTRILTIPQSLDSWWTSLNFLGGSPVCLGQNSQSPTSNHSPTSCPPICPGYRWMCLRRFIIFLFILLLCLIFLLVLLDYQGFPGAMLSEVLLVSAPGKVILHGEHAVVHGKVALAVSLNLRTFLRLQPHSNGKVDLSLPNIGIKRAWDVARLQSLDTSFLEQGDVTTPTSEQVEKLKEVAGLPDDCAVTERLAVLAFLYLYLSICRKQRALPSLDIVVWSELPPGAGLGSSAAYSVCLAAALLTVCEEIPNPLKDGDCVNRWTKEDLELINKWAFQGERMIHGNPSGVDNAVSTWGGALRYHQGKISSLKRSPALQILLTNTKVPRNTRALVAGVRNRLLKFPEIVAPLLTSIDAISLECERVLGEMGEAPAPEQYLVLEELIDMNQHHLNALGVGHASLDQLCQVTRARGLHSKLTGAGGGGCGITLLKPGLEQPEVEATKQALTSCGFDCLETSIGAPGVSIHSATSLDSRVQQALDGL

SEQ ID NO: 845669 - protein, 506 aa, Homo sapiens
AVTSRRCDVPMATTPRFTAGVRVALPASHSPVPVFHALRAAALETGIQEPGGAEAPAQAKTAPQAKTAPQAAHSHEPGCLTGPDPARFPSSPRGDSTHSWPRHRSGFPGAMLSEVLLVSAPGKVILHGEHAVVHGKVALAVSLNLRTFLRLQPHSNGKVDLSLPNIGIKRAWDVARLQSLDTSFLEQGDVTTPTSEQVEKLKEVAGLPDDCAVTERLAVLAFLYLYLSICRKQRALPSLDIVVWSELPPGAGLGSSAAYSVCLAAALLTVCEEIPNPLKDGDCVNRWTKEDLELINKWAFQGERMIHGNPSGVDNAVSTWGGALRYHQGKISSLKRSPALQILLTNTKVPRNTRALVAGVRNRLLKFPEIVAPLLTSIDAISLECERVLGEMGEAPAPEQYLVLEELIDMNQHHLNALGVGHASLDQLCQVTRARGLHSKLTGAGGGGCGITLLKPGLEQPEVEATKQALTSCGFDCLETSIGAPGVSIHSATSLDSRVQQALDGL

SEQ ID NO: 845670 - protein, 601 aa, Homo sapiens
SHPQAMQWNSTAFHQALQDPRVRGLYFPAGGSSSGTVNPAQNIASHISSISSRTGDPAPNMENITSGFLGPLLVLQAGFFLLTRILTIPQSLDSWWTSLNFLGGSPVCLGQNSQSPTSNHSPTSCPPICPGYRWMCLRRFIIFLFILLLCLIFLLVLLDYQGFPGAMLSEVLLVSAPGKVILHGEHAVVHGKVALAVSLNLRTFLRLQPHSNGKVDLSLPNIGIKRAWDVARLQSLDTSFLGSHSVMQPGVQWCDHSSLFLQPPGLKRSSCLSLLRAGTTEQGDVTTPTSEQVEKLKEVAGLPDDCAVTERLAVLAFLYLYLSICRKQRALPSLDIVVWSELPPGAGLGSSAAYSVCLAAALLTVCEEIPNPLKDGDCVNRWTKEDLELINKWAFQGERMIHGNPSGVDNAVSTWGGALRYHQGKISSLKRSPALQILLTNTKVPRNTRALVAGVRNRLLKFPEIVAPLLTSIDAISLECERVLGEMGEAPAPEQYLVLEELIDMNQHHLNALGVGHASLDQLCQVTRARGLHSKLTGAGGGGCGITLLKPGLEQPEVEATKQALTSCGFDCLETSIGAPGVSIHSATSLDSRVQQALDGL

SEQ ID NO: 845671 - protein, 439 aa, Homo sapiens
SHPQAMQWNSTAFHQALQDPRVRGLYFPAGGSSSGTVNPAQNIASHISSISSRTGDPAPNMENITSGFLGPLLVLQAGFFLLTRILTIPQSLDSWWTSLNFLGGSPVCLGQNSQSPTSNHSPTSCPPICPGYRWMCLRRFIIFLFILLLCLIFLLVLLDYQGFPGAMLSEVLLVSAPGKVILHGEHAVVHGKVALAVSLNLRTFLRLQPHSNGKVDLSLPNIGIKRAWDVARLQSLDTSFLGSHSVMQPGVQWCDHSSLFLQPPGLKRSSCLSLLRAGTTEQGDVTTPTSEQVEKLKEVAGLPDDCAVTERLAVLAFLYLYLSICRKQRALPSLDIVVWSELPPGAGLGSSAAYSVCLAAALLTVCEEIPNPLKDGDCVNRWTKEDLELINKWAFQGERMIHGNPSGVDNAVSTWGGALRYHQGKISSLKSSQRSWPPS

SEQ ID NO: 845672 - protein, 128 aa, Homo sapiens
MLSAPGCERVLGEMGEAPAPEQYLVLEELIDMNQHHLNALGVGHASLDQLCQVTRARGLHSKLTGAGGGGCGITLLKPGLEQPEVEATKQALTSCGFDCLETSIGAPGVSIHSATSLDSRVQQALDGL

SEQ ID NO: 845673 - protein, 510 aa, Homo sapiens
SHPQAMQWNSTAFHQALQDPRVRGLYFPAGGSSSGTVNPAQNIASHISSISSRTGDPAPNMENITSGFLGPLLVLQAGFFLLTRILTIPQSLDSWWTSLNFLGGSPVCLGQNSQSPTSNHSPTSCPPICPGYRWMCLRRFIIFLFILLLCLIFLLVLLDYQGFPGAMLSEVLLVSAPGKVILHGEHAVVHGKVALAVSLNLRTFLRLQPHSNGKVDLSLPNIGIKRAWDVARLQSLDTSFLEQGDVTTPTSEQVEKLKEVAGLPDDCAVTERLAVLAFLYLYLSICRKQRWTKEDLELINKWAFQGERMIHGNPSGVDNAVSTWGGALRYHQGKISSLKRSPALQILLTNTKVPRNTRALVAGVRNRLLKFPEIVAPLLTSIDAISLECERVLGEMGEAPAPEQYLVLEELIDMNQHHLNALGVGHASLDQLCQVTRARGLHSKLTGAGGGGCGITLLKPGLEQPEVEATKQALTSCGFDCLETSIGAPGVSIHSATSLDSRVQQALDGL

SEQ ID NO: 845674 - protein, 73 aa, Homo sapiens
HSKLTGAGGGGCGITLLKPGIPGVGGPGCQPGLLRGVHLENSLERKKRPGNRSQLRCVALGKLVNLWSLLPHW

SEQ ID NO: 845675 - protein, 433 aa, Homo sapiens
PLEARALWVVGVGELLRLRRGGAAAGEAAAAAGFPGAMLSEVLLVSAPGKVILHGEHAVVHGKVALAVSLNLRTFLRLQPHSNGKVDLSLPNIGIKRAWDVARLQSLDTSFLEQGDVTTPTSEQVEKLKEVAGLPDDCAVTERLAVLAFLYLYLSICRKQRALPSLDIVVWSELPPGAGLGSSAAYSVCLAAALLTVCEEIPNPLKDGDCVNRWTKEDLELINKWAFQGERMIHGNPSGVDNAVSTWGGALRYHQGKISSLKRSPALQILLTNTKVPRNTRALVAGVRNRLLKFPEIVAPLLTSIDAISLECERVLGEMGEAPAPEQYLVLEELIDMNQHHLNALGVGHASLDQLCQVTRARGLHSKLTGAGGGGCGITLLKPGLEQPEVEATKQALTSCGFDCLETSIGAPGVSIHSATSLDSRVQQALDGL

SEQ ID NO: 845676 - protein, 237 aa, Homo sapiens
MATQPVPGMEAQLWPAAEAPCSPNPVSPLVPPFFLRIRVGGFPDCSQSCPSSSILSSVWTCLLFTLQSPALQILLTNTKVPRNTRALVAGVRNRLLKFPEIVAPLLTSIDAISLECERVLGEMGEAPAPEQYLVLEELIDMNQHHLNALGVGHASLDQLCQVTRARGLHSKLTGAGGGGCGITLLKPGLEQPEVEATKQALTSCGFDCLETSIGAPGVSIHSATSLDSRVQQALDGL

SEQ ID NO: 845677 - protein, 202 aa, Homo sapiens
MIHGNPSGVDNAVSTWGGALRYHQGKISSLKRSPALQILLTNTKVPRNTRALVAGVRNRLLKFPEIVAPLLTSIDAISLECERVLGEMGEAPAPEQYLVLEELIDMNQHHLNALGVGHASLDQLCQVTRARGLHSKLTGAGGGGCGITLLKPGLEQPEVEATKQALTSCGFDCLETSIGAPGVSIHSATSLDSRVQQALDGL

SEQ ID NO: 845678 - protein, 514 aa, Homo sapiens
SHPQAMQWNSTAFHQALQDPRVRGLYFPAGGSSSGTVNPAQNIASHISSISSRTGDPAPNMENITSGFLGPLLVLQAGFFLLTRILTIPQSLDSWWTSLNFLGGSPVCLGQNSQSPTSNHSPTSCPPICPGYRWMCLRRFIIFLFILLLCLIFLLVLLDYARIPRSHVVRSPTGVCSGESHPSWRTCRGTWQGSTGCILELENIPPASTPQQWESGPQLTQHWYQAGLGCGQASVTGHKLSGALPSLDIVVWSELPPGAGLGSSAAYSVCLAAALLTVCEEIPNPLKDGDCVNRWTKEDLELINKWAFQGERMIHGNPSGVDNAVSTWGGALRYHQGKISSLKRSPALQILLTNTKVPRNTRALVAGVRNRLLKFPEIVAPLLTSIDAISLECERVLGEMGEAPAPEQYLVLEELIDMNQHHLNALGVGHASLDQLCQVTRARGLHSKLTGAGGGGCGITLLKPGLEQPEVEATKQALTSCGFDCLETSIGAPGVSIHSATSLDSRVQQALDGL

SEQ ID NO: 845679 - protein, 263 aa, Homo sapiens
PLEARALWVVGVGELLRLRRGGAAAGEAAAAAGFPGAMLSEVLLVSAPGKVILHGEHAVVHGKVALAVSLNLRTFLRLQPHSNGKVDLSLPNIGIKRAWDVARLQSLDTSFLEQGDVTTPTSEQVEKLKEVAGLPDDCAVTERLAVLAFLYLYLSICRKQRALPSLDIVVWSELPPGAGLGSSAAYSVCLAAALLTVCEEIPNPLKDGDCVNRWTKEDLELINKWAFQGERMIHGNPSGVDNAVSTWGGALRYHQGKISSLKR

SEQ ID NO: 845680 - protein, 31 aa, Homo sapiens
MLLFHQISQYWGIWPSCLNLLPPPSLYGMTL

SEQ ID NO: 845681 - protein, 544 aa, Homo sapiens
MSDGLDNEEKPPAPPLRMNSNNRDSSALNHSSKPLPMAPEEKNKKARLRSIFPGGGDKTNKKKEKERPEISLPSDFEHTIHVGFDAVTGEFTGIPEQWARLLQTSNITKLEQKKNPQAVLDVLKFYDSKETVNNQKYMSFTSGDKSAHGYIAAHPSSTKTASEPPLAPPVSEEEDEEEEEEEDENEPPPVIAPRPEHTKSIYTRSVVESIASPAVPNKEVTPPSAENANSSTLYRNTDRQRKKSKMTDEEILEKLRSIVSVGDPKKKYTRFEKIGQGASGTVYTALDIATGQEVAIKQMNLQQQPKKELIINEILVMRENKNPNIVNYLDSYLVGDELWVVMEYLAGGSLTDVVTETCMDEGQIAAVCRECLQALDFLHSNQVIHRDIKSDNILLGMDGSVKLTDFGFCAQITPEQSKRSTMVGTPYWMAPEVVTRKAYGPKVDIWSLGIMAIEMVEGEPPYLNENPLRALYLIATNGTPELQNPERLSAVFRDFLNRCLEMDVDRRGSAKELLQHPFLKLAKPLSSLTPLIIAAKEAIKNSSR

SEQ ID NO: 845682 - protein, 89 aa, Homo sapiens
SFSLPPPPTTAAATTAAAVISYPLWSSFLPQFLLLLPSPAPPAQQRRAEPSAAALLRSDQEEAGTEVSPKKEQLSPCILWQLVCPALSL

SEQ ID NO: 845683 - protein, 176 aa, Homo sapiens
MSDGLDNEEKPPAPPLRMNSNNRDSSALNHSSKPLPMAPEEKNKKARLRSIFPGGGDKTNKKKEKERPEISLPSDFEHTIHVGFDAVTGEFTGIPEQWARLLQTSNITKLEQKKNPQAVLDVLKFYDSKETVNNQKYMSFTSGDKSAHGYIAAHPSVSEKLKTVSHDWCFQRFKRI

SEQ ID NO: 845684 - protein, 544 aa, Homo sapiens; identical to SEQ ID NO: 845681

SEQ ID NO: 845685 - protein, 544 aa, Homo sapiens; identical to SEQ ID NO: 845681

SEQ ID NO: 845686 - protein, 307 aa, Homo sapiens
MVAGKVLMAKQEIVECVASAAMISPGKLPGETHSQRIAEEALGGLDNSKKQKGNAAGNKISQLPSQDRHFSLATFNRRIPTEHSVLESHESEGSFSMNSNDITQQSVDTREKLYECFDCGKAFCQSSKLIRHQRIHTGERPYACKECGKAFSLSSDLVRHQRIHSGEKPYECCECGKAFRGSSELIRHRRIHTGEKPYECGECGKAFSRSSALIQHKKIHTGDKSYECIACGKAFGRSSILIEHQRIHTGEKPYECNECGKSFNQSSALTQHQRIHTGEKPYECSECRKTFRHRSGLMQHQRTHTRV

SEQ ID NO: 845687 - protein, 104 aa, Homo sapiens
LLMLEQFLAILPEELQAWLREHRPENGEEAVTMLEELEKELEEPRQQDTTHGQEMFWQEMTSTGALKSLSLNSPVQPLENQCKTETQESQAFQERGEKPQSMWG

SEQ ID NO: 845688 - protein, 403 aa, Homo sapiens
MLEQFLAILPEELQAWLREHRPENGEEAVTMLEELEKELEEPRQQDTTHGQEMFWQEMTSTGALKSLSLNSPVQPLENQCKTETQESQAFQERDGRMVAGKVLMAKQEIVECVASAAMISPGKLPGETHSQRIAEEALGGLDNSKKQKGNAAGNKISQLPSQDRHFSLATFNRRIPTEHSVLESHESEGSFSMNSNDITQQSVDTREKLYECFDCGKAFCQSSKLIRHQRIHTGERPYACKECGKAFSLSSDLVRHQRIHSGEKPYECCECGKAFRGSSELIRHRRIHTGEKPYECGECGKAFSRSSALIQHKKIHTGDKSYECIACGKAFGRSSILIEHQRIHTGEKPYECNECGKSFNQSSALTQHQRIHTGEKPYECSECRKTFRHRSGLMQHQRTHTRV

SEQ ID NO: 845689 - protein, 123 aa, Homo sapiens
NSEGISQTQISISSLPHLGSLFRLSLPRMSGEATVLAYHAPEEQEGLLVVKVEEENYVLDQDFGLQENPWSQEMFWQEMTSTGALKSLSLNSPVQPLENQCKTETQESQAFQERGEKPQSMWG

SEQ ID NO: 845690 - protein, 424 aa, Homo sapiens
NSEGISQTQISISSLPHLGSLFRLSLPRMSGEATVLAYHAPEEQEGLLVVKVEEENYVLDQDFGLQENPWSQEMFWQEMTSTGALKSLSLNSPVQPLENQCKTETQESQAFQERDGRMVAGKVLMAKQEIVECVASAAMISPGKLPGETHSQRIAEEALGGLDNSKKQKGNAAGNKISQLPSQDRHFSLATFNRRIPTEHSVLESHESEGSFSMNSNDITQQSVDTREKLYECFDCGKAFCQSSKLIRHQRIHTGERPYACKECGKAFSLSSDLVRHQRIHSGEKPYECCECGKAFRGSSELIRHRRIHTGEKPYECGECGKAFSRSSALIQHKKIHTGDKSYECIACGKAFGRSSILIEHQRIHTGEKPYECNECGKSFNQSSALTQHQRIHTGEKPYECSECRKTFRHRSGLMQHQRTHTRV

SEQ ID NO: 845691 - protein, 108 aa, Homo sapiens
FIGIQPHSFIYILSMTVFSIMAEWSRKDSGSVSSKDENIYYFCLYQKRRKERMKERKEGKGREGRKEGRGRKKERKERKKERKKERKKERKKERKKERRKKEREKEKK

SEQ ID NO: 845692 - protein, 668 aa, Homo sapiens
MSNVTLRKMSPTGNEMKSTTQGTTRKQQDFHEVNKRRTFLQDNSWIKKRPEEEKDENYGRVVLNRHNSHDALDRKVNERDVPKATISRYSSDDTLDRISDRNDAAKTYKANTLDNQLTNRSMSMFRSLEVTKLQPGGSLNANTSNTIASTSATTPVKKKRQSWFPPPPPGYNASSSTGTRRREPGVHPPIPPKPSSPVSSPNQLRQDNRQIHPPKPGVYTETNRSAERNISEELDNLIKMNKSLNRNQGLDSLFRANPKVEEREKRAKSLESLIYMSTRTDKDGKGIQSLGSPIKVNQRTDKNEKGRQNLESVAKVNARMNKTSRRSEDLDNATEVNPKGHENTTGKKDLDGLIKVDPETNKNITRGQSLDNLIKVTPEVKRSNQGSKDLNNFIKVYPGTEKSTEGGQSLDSLIKVTPERNRTNQGNQDLENLIKVIPSANKSSEQGLDEHINVSPKAVKNTDGKQDLDKLIKVNPEIFTNNQRNQDLANLIKVNPAVIRNNQSQDLDNLIKVKPSALRNTNRDQNLENLIEVNSHVSENKNGSSNTGAKQAGPQDTVVYTRTYVENSKSPKDGYQENISGKYIQTVYSTSDRSVIERDMCTYCRKPLGVETKMILDELQICCHSTCFKCEICKQPLENLQAGDSIWIYRQTIHCEPCYSKIMAKWIP

SEQ ID NO: 845693 - protein, 150 aa, Homo sapiens
  misc_feature (147)..(147): Xaa can be any naturally occurring amino acid
  misc_feature (150)..(150): Xaa can be any naturally occurring amino acid
MNKSLNRAKSLESLIYMSTRTDKDGKGIQSLGSPIKVNQRTDKNEKGGQSLDNLIKVTPEVKRSNQGSKDLNNFIKVYPGTEKSTEGGQSLDSLIKVTPERNRTNQGNQDLENLIKVIPSANKSSEQGLDEHINVSPKAVKNTDGKXDLX

SEQ ID NO: 845694 - protein, 628 aa, Homo sapiens
MSNVTLRKMSPTGNEMKSTTQGTTRKQQDFHEVNKRRTFLQDNSWIKKRPEEEKDENYGRVVLNRHNSHDALDRKVNERDVPKATISRYSSDDTLDRISDRNDAAKTYKANTLDNQLTNRSMSMFRSLEVTKLQPGGSLNANTSNTIASTSATTPVKKKRQSWFPPPPPGYNASSSTGTRRREPGVHPPIPPKPSSPVSSPNQLRQDNRQIHPPKPGVYTETNRSAERNISEELDNLIKMNKSLNRNQGLDSLFRANPKVEEREKRAKSLESLIYMSTRTDKDGKGIQSLGSPIKVNQRTDKNEKGSEDLDNATEVNPKGHENTTGGQSLDNLIKVTPEVKRSNQGSKDLNNFIKVYPGTEKSTEGGQSLDSLIKVTPERNRTNQGNQDLENLIKVIPSANKSSEQGLDEHINVSPKAVKNTDGKQDLDKLIKVNPEIFTNNQRNQDLANLIKVNPAVIRNNQSQDLDNLIKVKPSALRNTNRDQNLENLIEVNSHVSENKNGSSNTGAKQAGPQDTVVYTRTYVENSKSPKDGYQENISGKYIQTVYSTSDRSVIERDMCTYCRKPLGVETKMILDELQICCHSTCFKCEICKQPLENLQAGDSIWIYRQTIHCEPCYSKIMAKWIP

SEQ ID NO: 845695 - protein, 507 aa, Homo sapiens
MSMFRSLEVTKLQPGGSLNANTSNTIASTSATTPVKKKRQSWFPPPPPGYNASSSTGTRRREPGVHPPIPPKPSSPVSSPNQLRQDNRQIHPPKPGVYTETNRSAERNISEELDNLIKMNKSLNRNQGLDSLFRANPKVEEREKRAKSLESLIYMSTRTDKDGKGIQSLGSPIKVNQRTDKNEKGSEDLDNATEVNPKGHENTTGGQSLDNLIKVTPEVKRSNQGSKDLNNFIKVYPGTEKSTEGGQSLDSLIKVTPERNRTNQGNQDLENLIKVIPSANKSSEQGLDEHINVSPKAVKNTDGKQDLDKLIKVNPEIFTNNQRNQDLANLIKVNPAVIRNNQSQDLDNLIKVKPSALRNTNRDQNLENLIEVNSHVSENKNGSSNTGAKQAGPQDTVVYTRTYVENSKSPKDGYQENISGKYIQTVYSTSDRSVIERDMCTYCRKPLGVETKMILDELQICCHSTCFKCEICKQPLENLQAGDSIWIYRQTIHCEPCYSKIMAKWIP

SEQ ID NO: 845696 - protein, 424 aa, Homo sapiens
MSNVTLRKMSPTGNEMKSTTQGTTRKQQDFHEVNKRRTFLQDNSWIKKRPEEEKDENYGRVVLNRHNSHDALDRKVNERDVPKATISRYSSDDTLDRSMSMFRSLEVTKLQPGGSLNANTSNTIASTSATTPVKKKRQSWFPPPPPGYNASSSTGTRRREPGVHPPIPPKPSSPVSSPNQLRQDNRQIHPPKPGVYTETNRSAERNISEELDNLIKMNKSLNRNQGLDSLFRANPKVEEREKRAKSLESLIYMSTRTDKDGKGIQSLGSPIKVNQRTDKNEKGRQNLESVAKVNARMNKTSRRSEDLDNATEVNPKGHENTTGGQSLDNLIKVTPEVKRSNQGSKDLNNFIKVYPGTEKSTEGGQSLDSLIKVTPERNRTNQGNQDLENLIKVIPSANKSSEQGPDELLVTAPTCQNIIEPNLI

SEQ ID NO: 845697 - protein, 688 aa, Homo sapiens
MSNVTLRKMSPTGNEMKSTTQGTTRKQQDFHEVNKRRTFLQDNSWIKKRPEEEKDENYGRVVLNRHNSHDALDRKVNERDVPKATISRYSSDDTLDRISDRNDAAKTYKANTLDNQLTNRSMSMFRSLEVTKLQPGGSLNANTSNTIASTSATTPVKKKRQSWFPPPPPGYNASSSTGTRRREPGVHPPIPPKPSSPVSSPNQLRQDNRQIHPPKPGVYTETNRSAERNIRSQDLDNIVKVATSLQRSDKGEELDNLIKMNKSLNRNQGLDSLFRANPKVEEREKRAKSLESLIYMSTRTDKDGKGIQSLGSPIKVNQRTDKNEKGRQNLESVAKVNARMNKTSRRSEDLDNATEVNPKGHENTTGKKDLDGLIKVDPETNKNITRGQSLDNLIKVTPEVKRSNQGSKDLNNFIKVYPGTEKSTEGGQSLDSLIKVTPERNRTNQGNQDLENLIKVIPSANKSSEQGLDEHINVSPKAVKNTDGKQDLDKLIKVNPEIFTNNQRNQDLANLIKVNPAVIRNNQSQDLDNLIKVKPSALRNTNRDQNLENLIEVNSHVSENKNGSSNTGAKQAGPQDTVVYTRTYVENSKSPKDGYQENISGKYIQTVYSTSDRSVIERDMCTYCRKPLGVETKMILDELQICCHSTCFKCEICKQPLENLQAGDSIWIYRQTIHCEPCYSKIMAKWIP

SEQ ID NO: 845698 - protein, 605 aa, Homo sapiens
MSNVTLRKMSPTGNEMKSTTQGTTRKQQDFHEVNKRRTFLQDNSWIKKRPEEEKDENYGRVVLNRHNSHDALDRKVNERDVPKATISRYSSDDTLDRSMSMFRSLEVTKLQPGGSLNANTSNTIASTSATTPVKKKRQSWFPPPPPGYNASSSTGTRRREPGVHPPIPPKPSSPVSSPNQLRQDNRQIHPPKPGVYTETNRSAERNISEELDNLIKMNKSLNRNQGLDSLFRANPKVEEREKRAKSLESLIYMSTRTDKDGKGIQSLGSPIKVNQRTDKNEKGSEDLDNATEVNPKGHENTTGGQSLDNLIKVTPEVKRSNQGSKDLNNFIKVYPGTEKSTEGGQSLDSLIKVTPERNRTNQGNQDLENLIKVIPSANKSSEQGLDEHINVSPKAVKNTDGKQDLDKLIKVNPEIFTNNQRNQDLANLIKVNPAVIRNNQSQDLDNLIKVKPSALRNTNRDQNLENLIEVNSHVSENKNGSSNTGAKQAGPQDTVVYTRTYVENSKSPKDGYQENISGKYIQTVYSTSDRSVIERDMCTYCRKPLGVETKMILDELQICCHSTCFKCEICKQPLENLQAGDSIWIYRQTIHCEPCYSKIMAKWIP

SEQ ID NO: 845699 - protein, 605 aa, Homo sapiens; identical to SEQ ID NO: 845698

SEQ ID NO: 845700 - protein, 263 aa, Homo sapiens
MSNVTLRKMSPTGNEMKSTTQGTTRKQQDFHEVNKRRTFLQDNSWIKKRPEEEKDENYGRVVLNRHNSHDALDRKVNERDVPKATISRYSSDDTLDRSMSMFRSLEVTKLQPGGSLNANTSNTIASTSATTPVKKKRQSWFPPPPPGYNASSSTGTRRREPGVHPPIPPKPSSPVSSPNQLRQDNRQIHPPKPGVYTETNRSAERNISEELDNLIKMNKSLNRNQGLDSLFRANPKVEEREKRAKSLESLIYMSTRTDKDGKG

SEQ ID NO: 845701 - protein, 1937 aa, Homo sapiens
MSRWLWPWSNCVKERVCRYLLHHYLGHFFQEHLSLDQLSLDLYKGSVALRDIHLEIWSVNEVLESMESPLELVEGFVGSIEVAVPWAALLTDHCTVRVSGLQLTLQPRRGPAPGAADSQSWASCMTTSLQLAQECLRDGLPEPSEPPQPLEGLEMFAQTIETVLRRIKVTFLDTVVRVEHSPGDGERGVAVEVRVQRLEYCDEAVRDPSQAPPVDVHQPPAFLHKLLQLAGVRLHYEELPAQEEPPEPPLQIGSCSGYMELMVKLKQNEAFPGPKLEVAGQLGSLHLLLTPRQLQQLQELLSAVSLTDHEGLADKLNKSRPLGAEDLWLIEQDLNQQLQAGAVAEPLSPDPLTNPLLNLDNTDLFFSMAGLTSSVASALSELSLSDVDLASSVRSDMASRRLSAQAHPAGKMAPNPLLDTMRPDSLLKMTLGGVTLTLLQTSAPSSGPPDLATHFFTEFDATKDGPFGSRDFHHLRPRFQRACPCSHVRLTGTAVQLSWELRTGSRGRRTTSMEVHFGQLEVLECLWPRGTSEPEYTEILTFPGTLGSQASARPCAHLRHTQILRRVPKSRPRRSVACHCHSELALDLANFQADVELGALDRLAALLRLATVPAEPPAGLLTEPLPAMEQQTVFRLSAPRATLRLRFPIADLRPERDPWAGQAVRAEQLRLELSEPQFRSELSSGPGPPVPTHLELTCSDLHGIYEDGGKPPVPCLRVSKALDPKSTGRKYFLPQVVVTVNPQSSSTQWEVAPEKGEELELSVESPCELREPEPSPFSSKRTMYETEEMVIPGDPEEMRTFQSRTLALSRCSLEVILPSVHIFLPSKEVYESIYNRINNDLLMWEPADLLPTPDPAAQPSGFPGPSGFWHDSFKMCKSAFKLANCFDLTPDSDSDDEDAHFFSVGASGGPQAAAPEAPSLHLQSTFSTLVTVLKGRITALCETKDEGGKRLEAVHGELVLDMEHGTLFSVSQYCGQPGLGYFCLEAEKATLYHRGLDDYPLPSHLDLPSFAPPAQLAPTIYPSEEGVTERGASGRKGQGRGPHMLSTAVRIHLDPHKNVKEFLVTLRLHKATLRHYMALPEQSWHSQLLEFLDVLDDPVLGYLPPTVITILHTHLFSCSVDYRPLYLPVRVLITAETFTLSSNIIMDTSTFLLRFILDDSALYLSDKCEVETLDLRRDYVCVLDVDLLELVIKTWKGSTEGKLSQPLFELRCSNNVVHVHSCADSCALLVNLLQYVMSTGDLHPPPRPPSPTEIAGQKLSESPASLPSCPPVETALINQRDLADALLDTERSLRELAQPSGGHLPQASPISVYLFPGERSGAPPPSPPVGGPAGSLGSCSEEKEDEREEEGDGDTLDSDEFCILDAPGLGIPPRDGEPVVTQLHPGPIVVRDGYFSRPIGSTDLLRAPAHFPVPSTRVVLREVSLVWHLYGGRDFGPHPGHRARTGLSGPRSSPSRCSGPNRPQNSWRTQGGSGRQHHVLMEIQLSKVSFQHEVYPAEPATGPAAPSQELEERPLSRQVFIVQELEVRDRLASSQINKFLYLHTSERMPRRAHSNMLTIKALHVAPTTNLGGPECCLRVSLMPLRLNVDQDALFFLKDFFTSLVAGINPVVPGETSAEARPETRAQPSSPLEGQAEGVETTGSQEAPGGGHSPSPPDQQPIYFREFRFTSEVPIWLDYHGKHVTMDQVGTFAGLLIGLAQLNCSELKLKRLCCRHGLLGVDKVLGYALNEWLQDIRKNQLPGLLGGVGPMHSVVQLFQGFRDLLWLPIEQYRKDGRLMRGLQRGAASFGSSTASAALELSNRLVQAIQATAETVYDILSPAAPVSRSLQDKRSARRLRRGQQPADLREGVAKAYDTVREGILDTAQTICDVASRGHEQKGLTGAVGGVIRQLPPTVVKPLILATEATSSLLGGMRNQIVPDAHKDHALKWRSDSAQD

SEQ ID NO: 845702 - protein, 114 aa, Homo sapiens
  misc_feature (8)..(8): Xaa can be any naturally occurring amino acid
QNPANFCXFSRDGVSPCCPGWSQSPDLKRSTHLSLHYEELPAQEEPPEPPLQIGSCSGYMELMVKLKQNEAFPGPKVGPQAPGEGVSTPSQDSSSSARLIIYSPQWGCQVGDLL

SEQ ID NO: 845703 - protein, 1904 aa, Homo sapiens
MSRWLWPWSNCVKERVCRYLLHHYLGHFFQEHLSLDQLSLDLYKGSVALRDIHLEIWSVNEVLESMESPLELVEGFVGSIEVAVPWAALLTDHCTVRVSGLQLTLQPRRGPAPGAADSQSWASCMTTSLQLAQECLRDGLPEPSEPPQPLEGLEMFAQTIETVLRRIKVTFLDTVVRVEHSPGDGERGVAVEVRVQRLEYCDEAVRDPSQAPPVDVHQPPAFLHKLLQLAGVRLHYEELPAQEEPPEPPLQIGSCSGYMELMVKLKQNEAFPGPKLEVAGQLGSLHLLLTPRQLQQLQELLSAVSLTDHEGLADKLNKSRPLGAEDLWLIEQDLNQQLQAGAVAEPLSPDPLTNPLLNLDNTDLFFSMAGLTSSVASALSELSLSDVDLASSVRSDMASRRLSAQAHPAGKMAPNPLLDTMRPDSLLKMTLGGVTLTLLQTSAPSSGPPDLATHFFTEFDATKDGPFGSRDFHHLRPRFQRACPCSHVRLTGTAVQLSWELRTGSRGRRTTSMEVHFGQLEVLECLWPRGTSEPEYTEILTFPGTLGSQASARPCAHLRHTQILRRVPKSRPRRSVACHCHSELALDLANFQADVELGALDRLAALLRLATVPAEPPAGLLTEPLPAMEQQTVFRLSAPRATLRLRFPIADLRPERDPWAGQAVRAEQLRLELSEPQFRSELSSGPGPPVPTHLELTCSDLHGIYEDGGKPPVPCLRVSKALDPKSTGRKYFLPQVVVTVNPQSSSTQWEVAPEKGEELELSVESPCELREPEPSPFSSKRTMYETEEMVIPGDPEEMRTFQSRTLALSRCSLEVILPSVHIFLPSKEVYESIYNRINNDLLMWEPADLLPTPDPAAQPSGFPGPSGFWHDSFKMCKSAFKLDSDSDDEDAHFFSVGASGGPQAAAPEAPSLHLQSTFSTLVTVLKGRITALCETKDEGGKRLEAVHGELVLDMEHGTLFSVSQYCGQPGLGYFCLEAEKATLYHRGDDYPLPSHLDLPSFAPPAQLAPTIYPSEEGVTERGASGRKGQGRGPHMLSTAVRIHLDPHKNVKEFLVTLRLHKATLRHYMALPEQSWHSQLLEFLDVLDDPVLGYLPPTVITILHTHLFSCSVDYRPLYLPVRVLITAETFTLSSNIIMDTSTFLLRLCLCLDVDLLELVIKTWKGSTEGKLSQPLFELRCSNNVVHVHSCADSCALLVNLLQYVMSTGDLHPPPRPPSPTEIAGQKLSESPASLPSCPPVETALINQRDLADALLDTERSLRELAQPSGGHLPQASPISVYLFPGERSGAPPPSPPVGGPAGSLGSCSEEKEDEREEEGDGDTLDSDEFCILDAPGLGIPPRDGEPVVTQLHPGPIVVRDGYFSRPIGSTDLLRAPAHFPVPSTRVVLREVSLVWHLYGGRDFGPHPGHRARTGLSGPRSSPSRCSGPNRPQNSWRTQGGSGRQHHVLMEIQLSKVSFQHEVYPAEPATGPAAPSQELEERPLSRQVFIVQELEVRDRLASSQINKFLYLHTSERMPRRAHSNMLTIKALHVAPTTNLGGPECCLRVSLMPLRLNVDQDALFFLKDFFTSLVAGINPVVPGETSAEARPETRAQPSSPLEGQAEGVETTGSQEAPGGGHSPSPPDQQPIYFREFRFTSEVPIWLDYHGKHVTMDQVGTFAGLLIGLAQLNCSELKLKRLCCRHGLLGVDKVLGYALNEWLQDIRKNQLPGLLGGVGPMHSVVQLFQGFRDLLWLPIEQYRKDGRLMRGLQRGAASFGSSTASAALELSNRLVQAIQATAETVYDILSPAAPVSRSLQDKRSARRLRRGQQPADLREGVAKAYDTVREGILDTAQTICDVASRGHEQKGLTGAVGGVIRQLPPTVVKPLILATEATSSLLGGMRNQIVPDAHKDHALKWRSDSAQD

SEQ ID NO: 845704 - protein, 1928 aa, Homo sapiens
MSRWLWPWSNCVKERVCRYLLHHYLGHFFQEHLSLDQLSLDLYKGSVALRDIHLEIWSVNEVLESMESPLELVEGFVGSIEVAVPWAALLTDHCTVRVSGLQLTLQPRRGPAPGAADSQSWASCMTTSLQLAQECLRDGLPEPSEPPQPLEGLEMFAQTIETVLRRIKVTFLDTVVRVEHSPGDGERGVAVEVRVQRLEYCDEAVRDPSQAPPVDVHQPPAFLHKLLQLAGVRLHYEELPAQEEPPEPPLQIGSCSGYMELMVKLKQNEAFPGPKLEVAGQLGSLHLLLTPRQLQQLQELLSAVSLTDHEGLADKLNKSRPLGAEDLWLIEQDLNQQLQAGAVAEPLSPDPLTNPLLNLDNTDLFFSMAGLTSSVASALSELSLSDVDLASSVRSDMASRRLSAQAHPAGKMAPNPLLDTMRPDSLLKMTLGGVTLTLLQTSAPSSGPPDLATHFFTEFDATKDGPFGSRDFHHLRPRFQRACPCSHVRLTGTAVQLSWELRTGSRGRRTTSMEVHFGQLEVLECLWPRGTSEPEYTEILTFPGTLGSQASARPCAHLRHTQILRRVPKSRPRRSVACHCHSELALDLANFQADVELGALDRLAALLRLATVPAEPPAGLLTEPLPAMEQQTVFRLSAPRATLRLRFPIADLRPERDPWAGQAVRAEQLRLELSEPQFRSELSSGPGPPVPTHLELTCSDLHGIYEDGGKPPVPCLRVSKALDPKSTGRKYFLPQVVVTVNPQSSSTQWEVAPEKGEELELSVESPCELREPEPSPFSSKRTMYETEEMVIPGDPEEMRTFQSRTLALSRCSLEVILPSVHIFLPSKEVYESIYNRINNDLLMWEPADLLPTPDPAAQPSGFPGPSGFWHDSFKMCKSAFKLDSDSDDEDAHFFSVGASGGPQAAAPEAPSLHLQSTFSTLVTVLKGRITALCETKDEGGKRLEAVHGELVLDMEHGTLFSVSQYCGQPGLGYFCLEAEKATLYHRGDDYPLPSHLDLPSFAPPAQLAPTIYPSEEGVTERGASGRKGQGRGPHMLSTAVRIHLDPHKNVKEFLVTLRLHKATLRHYMALPEQSWHSQLLEFLDVLDDPVLGYLPPTVITILHTHLFSCSVDYRPLYLPVRVLITAETFTLSSNIIMDTSTFLLRFILDDSALYLSDKCEVETLDLRRDYVCVLDVDLLELVIKTWKGSTEGKLSQPLFELRCSNNVVHVHSCADSCALLVNLLQYVMSTGDLHPPPRPPSPTEIAGQKLSESPASLPSCPPVETALINQRDLADALLDTERSLRELAQPSGGHLPQASPISVYLFPGERSGAPPPSPPVGGPAGSLGSCSEEKEDEREEEGDGDTLDSDEFCILDAPGLGIPPRDGEPVVTQLHPGPIVVRDGYFSRPIGSTDLLRAPAHFPVPSTRVVLREVSLVWHLYGGRDFGPHPGHRARTGLSGPRSSPSRCSGPNRPQNSWRTQGGSGRQHHVLMEIQLSKVSFQHEVYPAEPATGPAAPSQELEERPLSRQVFIVQELEVRDRLASSQINKFLYLHTSERMPRRAHSNMLTIKALHVAPTTNLGGPECCLRVSLMPLRLNVDQDALFFLKDFFTSLVAGINPVVPGETSAEARPETRAQPSSPLEGQAEGVETTGSQEAPGGGHSPSPPDQQPIYFREFRFTSEVPIWLDYHGKHVTMDQVGTFAGLLIGLAQLNCSELKLKRLCCRHGLLGVDKVLGYALNEWLQDIRKNQLPGLLGGVGPMHSVVQLFQGFRDLLWLPIEQYRKDGRLMRGLQRGAASFGSSTASAALELSNRLVQAIQATAETVYDILSPAAPVSRSLQDKRSARRLRRGQQPADLREGVAKAYDTVREGILDTAQTICDVASRGHEQKGLTGAVGGVIRQLPPTVVKPLILATEATSSLLGGMRNQIVPDAHKDHALKWRSDSAQD

SEQ ID NO: 845705 - protein, 1550 aa, Homo sapiens
MSRWLWPWSNCVKERVCRYLLHHYLGHFFQEHLSLDQLSLDLYKGSVALRDIHLEIWSVNEVLESMESPLELVEGFVGSIEVAVPWAALLTDHCTVRVSGLQLTLQPRRGPAPGAADSQSWASCMTTSLQLAQECLRDGLPEPSEPPQPLEGLEMFAQTIETVLRRIKVTFLDTVVRVEHSPGDGERGVAVEVRVQRLEYCDEAVRDPSQAPPVDVHQPPAFLHKLLQLAGVRLHYEELPAQEEPPEPPLQIGSCSGYMELMVKLKQNEAFPGPKLEVAGQLGSLHLLLTPRQLQQLQELLSAVSLTDHEGLADKLNKSRPLGAEDLWLIEQDLNQQLQAGAVAEPLSPDPLTNPLLNLDNTDLFFSMAGLTSSVASALSELSLSDVDLASSVRSDMASRRLSAQAHPAGKMAPNPLLDTMRPDSLLKMTLGGVTLTLLQTSAPSSGPPDLATHFFTEFDATKDGPFGSRDFHHLRPRFQRACPCSHVRLTGTAVQLSWELRTGSRGRRTTSMEVHFGQLEVLECLWPRGTSEPEYTEILTFPGTLGSQASARPCAHLRHTQILRRVPKSRPRRSVACHCHSELALDLANFQADVELGALDRLAALLRLATVPAEPPAGLLTEPLPAMEQQTVFRLSAPRATLRLRFPIADLRPERDPWAGQAVRAEQLRLELSEPQFRSELSSGPGPPVPTHLELTCSDLHGIYEDGGKPPVPCLRVSKALDPKSTGRKYFLPQVVVTVNPQSSSTQWEVAPEKGEELELSVESPCELREPEPSPFSSKRTMYETEEMVIPGDPEEMRTFQSRTLALSRCSLEVILPSVHIFLPSKEVYESIYNRINNDLLMWEPADLLPTPDPAAQPSGFPGPSGFWHDSFKMCKSAFKLDSDSDDEDAHFFSVGASGGPQAAAPEAPSLHLQSTFSTLVTVLKGRITALCETKDEGGKRLEAVHGELVLDMEHGTLFSVSQYCGQPGLGYFCLEAEKATLYHRGDDYPLPSHLDLPSFAPPAQLAPTIYPSEEGVTERGASGRKGQGRGPHMLSTAVRIHLDPHKNVKEFLVTLRLHKATLRHYMALPEQSWHSQLLEFLDVLDDPVLGYLPPTVITILHTHLFSCSVDYRPLYLPVRVLITAETFTLSSNIIMDTSTFLLRFILDDSALYLSDKCEVETLDLRRDYVCVLDVDLLELVIKTWKGSTEGKLSQPLFELRCSNNVVHVHSCADSCALLVNLLQYVMSTGDLHPPPRPPSPTEIAGQKLSESPASLPSCPPVETALINQRDLADALLDTERSLRELAQPSGGHLPQASPISVYLFPGERSGAPPPSPPVGGPAGSLGSCSEEKEDEREEEGDGDTLDSDEFCILDAPGLGIPPRDGEPVVTQLHPGPIVVRDGYFSRPIGSTDLLRAPAHFPVPSTRVVLREVSLVWHLYGGRDFGPHPGHRARTGLSGPRSSPSRCSGPNRPQNSWRTQGGSGRQHHVLMEIQLSKVSFQHEVYPAEPATGPAAPSQELEERPLSRQVFIVQELEVRDRLASSQINKFLYLHTSERMPRRAHSNMLVL

SEQ ID NO: 845706 - protein, 92 aa, Homo sapiens
KRLEAVHGELVLDMEHGTLFSVSQYCGQPGLGYFCLEAEKATLYHRGVRPGGRSPLGSRVGGGGLSGRMWALGGVGSQLAWQGAHETPPQRP

SEQ ID NO: 845707 - protein, 1928 aa, Homo sapiens; identical to SEQ ID NO: 845704

SEQ ID NO: 845708 - protein, 1960 aa, Homo sapiens
MSRWLWPWSNCVKERVCRYLLHHYLGHFFQEHLSLDQLSLDLYKGSVALRDIHLEIWSVNEVLESMESPLELVEGFVGSIEVAVPWAALLTDHCTVRVSGLQLTLQPRRGPAPGAADSQSWASCMTTSLQLAQECLRDGLPEPSEPPQPLEGLEMFAQTIETVLRRIKVTFLDTVVRVEHSPGDGERGVAVEVRVQRLEYCDEAVRDPSQAPPVDVHQPPAFLHKLLQLAGVRLHYEELPAQEEPPEPPLQIGSCSGYMELMVKLKQNEAFPGPKLEVAGQLGSLHLLLTPRQLQQLQELLSAVSLTDHEGLADKLNKSRPLGAEDLWLIEQDLNQQLQAGAVAEPLSPDPLTNPLLNLDNTDLFFSMAGLTSSVASALSELSLSDVDLASSVRSDMASRRLSAQAHPAGKMAPNPLLDTMRPDSLLKMTLGGVTLTLLQTSAPSSGPPDLATHFFTEFDATKDGPFGSRDFHHLRPRFQRACPCSHVRLTGTAVQLSWELRTGSRGRRTTSMEVHFGQLEVLECLWPRGTSEPEYTEILTFPGTLGSQASARPCAHLRHTQILRRVPKSRPRRSVACHCHSELALDLANFQADVELGALDRLAALLRLATVPAEPPAGLLTEPLPAMEQQTVFRLSAPRATLRLRFPIADLRPERDPWAGQAVRAEQLRLELSEPQFRSELSSGPGPPVPTHLELTCSDLHGIYEDGGKPPVPCLRVSKALDPKSTGRKYFLPQVVVTVNPQSSSTQWEVAPEKGEELELSVESPCELREPEPSPFSSKRTMYETEEMVIPGDPEEMRTFQSRTLALSRCSLEVILPSVHIFLPSKEVYESIYNRINNDLLMWEPADLLPTPDPAAQPSGFPGPSGFWHDSFKMCKSAFKLDSDSDDEDAHFFSVGASGGPQAAAPEAPSLHLQSTFSTLVTVLKGRITALCETKDEGGKRLEAVHGELVLDMEHGTLFSVSQYCGQPGLGYFCLEAEKATLYHRGDDYPLPSHLDLPSFAPPAQLAPTIYPSEEGVTERGASGRKGQGRGPHMLSTAVRIHLDPHKNVKEFLVTLRLHKATLRHYMALPEQSWHSQLLEFLDVLDDPVLGYLPPTVITILHTHLFSCSVDYRPLYLPVRVLITAETFTLSSNIIMDTSTFLLRFILDDSALYLSDKCEVETLDLRRDYVCVLDVDLLELVIKTWKGSTEGKLSQPLFELRCSNNVVHVHSCADSCALLVNLLQYVMSTGDLHPPPRPPSPTEIAGQKLSESPASLPSCPPVETALINQRDLADALLDTERSLRELAQPSGGHLPQASPISVYLFPGERSGAPPPSPPVGGPAGSLGSCSEEKEDEREEEGDGDTLDSDEFCILDAPGLGIPPRDGEPVVTQLHPGPIVVRDGYFSRPIGSTDLLRAPAHFPVPSTRVVLREVSLVWHLYGGRDFGPHPGHRARTGLSGPRSSPSRCSGPNRPQNSWRTQGGSGRQHHVLMEIQLSKVSFQHEVYPAEPATGPAAPSQELEERPLSRQVFIVQELEVRDRLASSQINKFLYLHTSERMPRRAHSNMLTIKALHVAPTTNLGGPECCLRVSLMPLRLNVDQDALFFLKDFFTSLVAGINPVVPGETSAEARPETRAQPSSPLEGQAEGVETTGSQEAPGGGHSPSPPDQQPIYFRYGCWTAGGGPWARLLGARPVSKEPPLPAPLPREFRFTSEVPIWLDYHGKHVTMDQVGTFAGLLIGLAQLNCSELKLKRLCCRHGLLGVDKVLGYALNEWLQDIRKNQLPGLLGGVGPMHSVVQLFQGFRDLLWLPIEQYRKDGRLMRGLQRGAASFGSSTASAALELSNRLVQAIQATAETVYDILSPAAPVSRSLQDKRSARRLRRGQQPADLREGVAKAYDTVREGILDTAQTICDVASRGHEQKGLTGAVGGVIRQLPPTVVKPLILATEATSSLLGGMRNQIVPDAHKDHALKWRSDSAQD

SEQ ID NO: 845709 - protein, 1707 aa, Homo sapiens
MSRWLWPWSNCVKERVCRYLLHHYLGHFFQEHLSLDQLSLDLYKGSVALRDIHLEIWSVNEVLESMESPLELVEGFVGSIEVAVPWAALLTDHCTVRVSGLQLTLQPRRGPAPGAADSQSWASCMTTSLQLAQECLRDGLPEPSEPPQPLEGLEMFAQTIETVLRRIKVTFLDTVVRVEHSPGDGERGVAVEVRVQRLEYCDEAVRDPSQAPPVDVHQPPAFLHKLLQLAGVRLHYEELPAQEEPPEPPLQIGSCSGYMELMVKLKQNEAFPGPKLEVAGQLGSLHLLLTPRQLQQLQELLSAVSLTDHEGLADKLNKSRPLGAEDLWLIEQDLNQQLQAGAVAEPLSPDPLTNPLLNLDNTDLFFSMAGLTSSVASALSELSLSDVDLASSVRSDMASRRLSAQAHPAGKMAPNPLLDTMRPDSLLKMTLGGVTLTLLQTSAPSSGPPDLATHFFTEFDATKDGPFGSRDFHHLRPRFQRACPCSHVRLTGTAVQLSWELRTGSRGRRTTSMEVHFGQLEVLECLWPRGTSEPEYTEILTFPGTLGSQASARPCAHLRHTQILRRVPKSRPRRSVACHCHSELALDLANFQADVELGALDRLAALLRLATVPAEPPAGLLTEPLPAMEQQTVFRLSAPRATLRLRFPIADLRPERDPWAGQAVRAEQLRLELSEPQFRSELSSGPGPPVPTHLELTCSDLHGIYEDGGKPPVPCLRVSKALDPKSTGRKYFLPQVVVTVNPQSSSTQWEVAPEKGEELELSVESPCELREPEPSPFSSKRTMYETEEMVIPGDPEEMRTFQSRTLALSRCSLEVILPSVHIFLPSKEVYESIYNRINNDLLMWEPADLLPTPDPAAQPSGFPGPSGFWHDSFKMCKSAFKLDSDSDDEDAHFFSVGASGGPQAAAPEAPSLHLQSTFSTLVTVLKGRITALCETKDEGGKRLEAVHGELVLDMEHGTLFSVSQYCGQPGLGYFCLEAEKATLYHRGDDYPLPSHLDLPSFAPPAQLAPTIYPSEEGVTERGASGRKGQGRGPHMLSTAVRIHLDPHKNVKEFLVTLRLHKATLRHYMALPEQSWHSQLLEFLDVLDDPVLGYLPPTVITILHTHLFSCSVDYRPLYLPVRVLITAETFTLSSNIIMDTSTFLLRFILDDSALYLSDKCEVETLDLRRDYVCVLDVDLLELVIKTWKGSTEGKLSQPLFELRCSNNVVHVHSCADSCALLVNLLQYVMSTGDLHPPPRPPSPTEIAGQKLSESPASLPSCPPVETALINQRDLADALLDTERSLRELAQPSGGHLPQASPISVYLFPGERSGAPPPSPPVGGPAGSLGSCSEEKEDEREEEGDGDTLDSDEFCILDAPGLGIPPRDGEPVVTQLHPGPIVVRDGYFSRPIGSTDLLRAPAHFPVPSTRVVLREVSLVWHLYGGRDFGPHPGHRARTGLSGPRSSPSRCSGPNRPQNSWRTQGGSGRQHHVLMEIQLSKVSFQHEVYPAEPATGPAAPSQELEERPLSRQVFIVQELEVRDRLASSQINKFLYLHTSERMPRRAHSNMLTIKALHVAPTTNLGGPECCLRVSLMPLRLNVDQDALFFLKDFFTSLVAGINPVVPGETSAEARPETRAQPSSPLEGQAEGVETTGSQEAPGGGHSPSPPDQQPIYFREFRFTSEVPIWLDYHGKHVTMDQVGTFAGLLIGLAQLNCSELKLKRLCCRHG

SEQ ID NO: 845710 - protein, 76 aa, Homo sapiens
LKPGNDPTLRVIWALKALQFPGFFKKMSNVLPHMSDAHGSPPTRKITIEDHLLEDVVLGAVFFPVADRLDLHRRQY

SEQ ID NO: 845711 - protein, 130 aa, Homo sapiens
VSTLWVILHLCKRGIPLCALINQHLSGLARRFPDVKFIKANSTTRIPNYPDRNLPMVFVYLEGDIKAQLIGPLVFGGMNLTRDELGWKLSESRAVKTDLEENPKKPIEGVLLSSVQSSVPMRRDSDSKGD

SEQ ID NO: 845712 - protein, 97 aa, Homo sapiens [sequence omitted]

SEQ ID NO: 845713 - protein, 13 aa, Homo sapiens
MLSRNDEAASAQQ

SEQ ID NO: 845714 - protein, 13 aa, Homo sapiens
MLSRNDEAASAQQ

SEQ ID NO: 845715 - protein, 87 aa, Homo sapiens
RERGREVRKAGGGSRTHREGSDGIASHQHLLSWSQAQGSSEQELHYASLQRLPVPSSEGPDLRGRDKRGTKEDPRADYACIAENKPT

SEQ ID NO: 845716 - protein, 110 aa, Homo sapiens
MYLRGPGAGRAPASGSGPSVRLPVLAASKSTFCPGPRPRAPQSRNSTMHLCRGCQCPAVRDLTSGAETREAPRRIQELTMPALLRTNPPEHPRHLPQPRRVDRVPLWSSQ

SEQ ID NO: 845717 - protein, 103 aa, Homo sapiens
MYLRGPGAGRAPASGSGPSVRLPVLAASKRPRAPQSRNSTMHLCRGCQCPAVRDLTSGAETREAPRRIQELTMPALLRTNPPEHPRHLPQPRRVDRVPLWSSQ

SEQ ID NO: 845718 - protein, 43 aa, Homo sapiens
MLSRNDVKRLERSWHLSVLVPGPGLLRAGTPLCISAEAASAQQ

SEQ ID NO: 845719 - protein, 103 aa, Homo sapiens; identical to SEQ ID NO: 845717

SEQ ID NO: 845720 - protein, 53 aa, Homo sapiens
MTQGSSEQELHYASLQRLPVPSSEGPDLRGRDKRGTKEDPRADYACIAENKPT

SEQ ID NO: 845721 - protein, 35 aa, Homo sapiens
MLSRNDAPSVLVPGPGLLRAGTPLCISAEAASAQQ

SEQ ID NO: 845722 - protein, 13 aa, Homo sapiens
MLSRNDEAASAQQ

SEQ ID NO: 845723 - protein, 35 aa, Homo sapiens; identical to SEQ ID NO: 845721

SEQ ID NO: 845724 - protein, 35 aa, Homo sapiens; identical to SEQ ID NO: 845721

SEQ ID NO: 845725 - protein, 187 aa, Homo sapiens
MGLYPLPLLNSTLDDGKATLTPSNTPLGRNLSTHQTYPVVADPHSPFAIKQETPEVSSSSSTPSSLSSSAFLDLQQVGSGVPPFNAFPHAASVYGQFTGQALLSGREMVGPTLPGYPPHIPTSGQGSYASSAIAGMVAGKERAGRKGSTAKRKYWSKVGHKEQEAYCALFIDFPKGIEGWTKEGISL

SEQ ID NO: 845726 - protein, 454 aa, Homo sapiens
GNKLQKEERHRAQGTLRRADPSSEGLQPAGQGSGRRGPDLREEAPSPRRAASDSPAMPHNSIRSGHGGLNQLGGAFVNGRPLPEVVRQRIVDLAHQGVRPCDISRQLRVSHGCVSKILGRYYETGSIRPGVIGGSKPKVATPKVVEKIGDYKRQNPTMFAWEIRDRLLAEGVCDNDTVPSVSSINRIIRTKVQQPFNLPMDSCVATKSLSPGHTLIPSSAVTPPESPQSDSLGSTYSINGLLGIAQPGSDKRKMDDSDQDSCRLSIDSQSSSSGPRKHLRTDAFSQHHLEPLECPFERQHYPEAYASPSHTKGEQGLYPLPLLNSTLDDGKATLTPSNTPLGRNLSTHQTYPVVAAPPFWICSKSAPGSRPSMPFPMLPPCTGSSRARPSSQGERWWGPRCPDTHPTSPPADRAAMPPLPSQAWWQEVNTLAMPMATPPTPPTARPGASPTPAC

SEQ ID NO: 845727 - protein, 506 aa, Homo sapiens
GNKLQKEERHRAQGTLRRADPSSEGLQPAGQGSGRRGPDLREEAPSPRRAASDSPAMPHNSIRSGHGGLNQLGGAFVNGRPLPEVVRQRIVDLAHQGVRPCDISRQLRVSHGCVSKILGRYYETGSIRPGVIGGSKPKVATPKVVEKIGDYKRQNPTMFAWEIRDRLLAEGVCDNDTVPSVSSINRIIRTKVQQPFNLPMDSCVATKSLSPGHTLIPSSAVTPPESPQSDSLGSTYSINGLLGIAQPGSDKRKMDDSDQDSCRLSIDSQSSSSGPRKHLRTDAFSQHHLEPLECPFERQHYPEAYASPSHTKGEQGLYPLPLLNSTLDDGKATLTPSNTPLGRNLSTHQTYPVVADPHSPFAIKQETPEVSSSSSTPSSLSSSAFLDLQQVGSGVPPFNAFPHAASVYGQFTGQALLSGREMVGPTLPGYPPHIPTSGQGSYASSAIAGMVAGSEYSGNAYGHTPYSSYSEAWRFPNSSLLSSPYYYSSTSRPSAPPTTATAFDHL

SEQ ID NO: 845728 - protein, 343 aa, Homo sapiens
GNKLQKEERHRAQGTLRRADPSSEGLQPAGQGSGRRGPDLREEAPSPRRAASDSPAMPHNSIRSGHGGLNQLGGAFVNGRPLPEVVRQRIVDLAHQGVRPCDISRQLRVSHGCVSKILGRYYETGSIRPGVIGGSKPKVATPKVVEKIGDYKRQNPTMFAWEIRDRLLAEGVCDNDTVPSVSSINRIIRTKVQQPFNLPMDSCVATKSLSPGHTLIPSSAVTPPESPQSDSLGSTYSINGLLGIAQPGSDKRKMDDSDQDSCRLSIDSQSSSSGPRKHLRTDAFSQHHLEPLECPFERQHYPEAYASPSHTKGEQEVNTLAMPMATPPTPPTARPGASPTPAC

SEQ ID NO: 845729 - protein, 506 aa, Homo sapiens; identical to SEQ ID NO: 845727

SEQ ID NO: 845730 - protein, 499 aa, Homo sapiens
GNKLQKEERHRAQGTLRRADPSSEGLQPAGQGSGRRGPDLREEAPSPRRAASDSPAMPHNSIRSGHGGLNQLGGAFVNGRPLPEVVRQRIVDLAHQGVRPCDISRQLRVSHGCVSKILGRYYETGSIRPGVIGGSKPKVATPKVVEKIGDYKRQNPTMFAWEIRDRLLAEGVCDNDTVPSVSSINRIIRTKVQQPFNLPMDSCVATKSLSPGHTLIPSSAVTPPESPQSDSLGSTYSINGLLGIAQPGSDKRKMDDSDQDSCRLSIDSQSSSSGPRKHLRTDAFSQHHLEPLECPFERQHYPEAYASPSHTKGEQGLYPLPLLNSTLDDGKATLTPSNTPLGRNLSTHQTYPVVADPHSPFAIKQETPEVSSSSSTPSSLSSSAFLDLQQVGSGVPPFNAFPHAASVYGQFTGQALLSGREMVGPTLPGYPPHIPTSGQGSYASSAIAGMVAGKERAGRKGSTAKRKYWSKEVNTLAMPMATPPTPPTARPGASPTPAC

SEQ ID NO: 845731 - protein, 506 aa, Homo sapiens; identical to SEQ ID NO: 845727

SEQ ID NO: 845732 - protein, 506 aa, Homo sapiens; identical to SEQ ID NO: 845727

SEQ ID NO: 845733 - protein, 186 aa, Homo sapiens
GNKLQKEERHRAQGTLRRADPSSEGLQPAGQGSGRRGPDLREEAPSPRRAASDSPAMPHNSIRSGHGGLNQLGGAFVNGRPLPEVVRQRIVDLAHQGVRPCDISRQLRVSHGCVSKILGRYYETGSIRPGVIGGSKPKVATPKVVEKIGDYKRQNPTMFAWEIRDRLLAEGVCDNDTVPSVSSINR

SEQ ID NO: 845734 - protein, 123 aa, Homo sapiens
GNKLQKEERHRAQGTLRRADPSSEGLQPAGQGSGRRGPDLREEAPSPRRAASDSPAMPHNSIRSGHGGLNQLGGAFVNGRPLPEVVRQRIVDLAHPGLIISIIPLLFFIQINNNLFSCSQLAQ

SEQ ID NO: 845735 - protein, 506 aa, Homo sapiens; identical to SEQ ID NO: 845727

SEQ ID NO: 845736 - protein, 203 aa, Homo sapiens
MDSCVATKSLSPGHTLIPSSAVTPPESPQSDSLGSTYSINGLLGIAQPGSDKRKMDDSDQDSCRLSIDSQSSSSGPRKHLRTDAFSQHHLEPLECPFERQHYPEAYASPSHTKGEQGLYPLPLLNSTLDDGKATLTPSNTPLGRNLSTHQTYPVVAAPPFWICSKSAPGSRPSMPFPMLPPCTGSSRARPSSQVRQGGPGAMQ

SEQ ID NO: 845737 - protein, 377 aa, Homo sapiens
GNKLQKEERHRAQGTLRRADPSSEGLQPAGQGSGRRGPDLREEAPSPRRAASDSPAMPHNSIRSGHGGLNQLGGAFVNGRPLPEVVRQRIVDLAHQGVRPCDISRQLRVSHGCVSKILGRYYETGSIRPGVIGGSKPKVATPKVVEKIGDYKRQNPTMFAWEIRDRLLAEGVCDNDTVPSVSSINRIIRTKVQQPFNLPMDSCVATKSLSPGHTLIPSSAVTPPESPQSDSLGSTYSINGLLGIAQPGSDKRKMDDSDQDSCRLSIDSQSSSSGPRKHLRTDAFSQHHLEPLECPFERQHYPEAYASPSHTKGEQGERWWGPRCPDTHPTSPPADRAAMPPLPSQAWWQEVNTLAMPMATPPTPPTARPGASPTPAC

SEQ ID NO: 845738 - protein, 443 aa, Homo sapiens
GNKLQKEERHRAQGTLRRADPSSEGLQPAGQGSGRRGPDLREEAPSPRRAASDSPAMPHNSIRSGHGGLNQLGGAFVNGRPLPEVVRQRIVDLAHQGVRPCDISRQLRVSHGCVSKILGRYYETGSIRPGVIGGSKPKVATPKVVEKIGDYKRQNPTMFAWEIRDRLLAEGVCDNDTVPSVSSINRIIRTKVQQPFNLPMDSCVATKSLSPGHTLIPSSAVTPPESPQSDSLGSTYSINGLLGIAQPGSDKRKMDDSDQDSCRLSIDSQSSSSGPRKHLRTDAFSQHHLEPLECPFERQHYPEAYASPSHTKGEQGLYPLPLLNSTLDDGKATLTPSNTPLGRNLSTHQTYPVVAGREMVGPTLPGYPPHIPTSGQGSYASSAIAGMVAGSEYSGNAYGHTPYSSYSEAWRFPNSSLLSSPYYYSSTSRPSAPPTTATAFDHL

SEQ ID NO: 845739 - protein, 197 aa, Homo sapiens [sequence omitted]

SEQ ID NO: 845740 - protein, 197 aa, Homo sapiens [sequence omitted]

SEQ ID NO: 845741 - protein, 362 aa, Homo sapiens
GNKLQKEERHRAQGTLRRADPSSEGLQPAGQGSGRRGPDLREEAPSPRRAASDSPAMPHNSIRSGHGGLNQLGGAFVNGRPLPEVVRQRIVDLAHQGVRPCDISRQLRVSHGCVSKILGRYYETGSIRPGVIGGSKPKVATPKVVEKIGDYKRQNPTMFAWEIRDRLLAEGVCDNDTVPSVSSINRIIRTKVQQPFNLPMDSCVATKSLSPGHTLIPSSAVTPPESPQSDSLGSTYSINGLLGIAQPGSDKRKMDDSDQDSCRLSIDSQSSSSGPRKHLRTDAFSQHHLEPLECPFERQHYPEAYASPSHTKGEQVRSWALGGEQGGQGPEKVYSPNEPVLHQSSWKLHQWAQGTCLMQLQA

SEQ ID NO: 845742 - protein, 501 aa, Homo sapiens
GNKLQKEERHRAQGTLRRADPSSEGLQPAGQGSGRRGPDLREEAPSPRRAASDSPAMPHNSIRSGHGGLNQLGGAFVNGRPLPEVVRQRIVDLAHQGVRPCDISRQLRVSHGCVSKILGRYYETGSIRPGVIGGSKPKVATPKVVEKIGDYKRQNPTMFAWEIRDRLLAEGVCDNDTVPSVSSINRIIRTKVQQPFNLPMDSCVATKSLSPGHTLIPSSAVTPPESPQSDSLGSTYSINGLLGIAQPGSDKRKMDDSDQDSCRLSIDSQSSSSGPRKHLRTDAFSQHHLEPLECPFERQHYPEAYASPSHTKGEQGLYPLPLLNSTLDDGKATLTPSNTPLGRNLSTHQTYPVVADPHSPFAIKQETPEVSSSSSTPSSLSSSAFLDLQQVGSGVPPFNAFPHAASVYGQFTGQALLSGREMVGPTLPGYPPHIPTSGQGSYASSAIAGMVAGKERAGRKGSTAKRKYWSKVGHKEQEAYCALFIDFPKGIEGWTKEGISL

SEQ ID NO: 845743 - protein, 120 aa, Homo sapiens
GNKLQKEERHRAQGTLRRADPSSEGLQPAGQGSGRRGPDLREEAPSPRRAASDSPAMPHNSIRSGHGGLNQLGGAFVNGRPLPEVVRQRIVDLAHQGVRPCDISRQLRVSHGCVSKILGR

SEQ ID NO: 845744 - protein, 540 aa, Homo sapiens
MNGEAICSALPTIPYHKLADLRYLSRGASGTVSSARHADWRVQVAVKHLHIHTPLLDSERKDVLREAEILHKARFSYILPILGICNEPEFLGIVTEYMPNGSLNELLHRKTEYPDVAWPLRFRILHEIALGVNYLHNMTPPLLHHDLKTQNILLDNEFHVKIADFGLSKWRMMSLSQSRSSKSAPEGGTIIYMPPENYEPGQKSRASIKHDIYSYAVITWEVLSRKQPFEDVTNPLQIMYSVSQGHRPVINEESLPYDIPHRARMISLIESGWAQNPDERPSFLKCLIELEPVLRTFEEITFLEAVIQLKKTKLQSVSSAIHLCDKKKMELSLNIPVNHGPQEESCGSSQLHENSGSPETSRSLPAPQDNDFLSRKAQDCYFMKLHHCPGNHSWDSTISGSQRAAFCDHKTTPCSSAIINPLSTAGNSERLQPGIAQQWIQSKREDIVNQMTEACLNQSLDALLSRDLIMKEDYELVSTKPTRTSKVRQLLDTTDIQGEEFAKVIVQKLKDNKQMGLQPYPEILVVSRSPSLNLLQNKSM

SEQ ID NO: 845745 - protein, 540 aa, Homo sapiens; identical to SEQ ID NO: 845744

SEQ ID NO: 845746 - protein, 403 aa, Homo sapiens
MTPPLLHHDLKTQNILLDNEFHVKIADFGLSKWRMMSLSQSRSSKSAPEGGTIIYMPPENYEPGQKSRASIKHDIYSYAVITWEVLSRKQPFEDVTNPLQIMYSVSQGHRPVINEESLPYDIPHRARMISLIESGWAQNPDERPSFLKCLIELEPVLRTFEEITFLEAVIQLKKTKLQSVSSAIHLCDKKKMELSLNIPVNHGPQEESCGSSQLHENSGSPETSRSLPAPQDNDFLSRKAQDCYFMKLHHCPGNHSWDSTISGSQRAAFCDHKTTPCSSAIINPLSTAGNSERLQPGIAQQWIQSKREDIVNQMTEACLNQSLDALLSRDLIMKEDYELVSTKPTRTSKVRQLLDTTDIQGEEFAKVIVQKLKDNKQMGLQPYPEILVVSRSPSLNLLQNKSM

SEQ ID NO: 845747 - protein, 403 aa, Homo sapiens; identical to SEQ ID NO: 845746

SEQ ID NO: 845748 - protein, 443 aa, Homo sapiens
MPNGSLNELLHRKTEYPDVAWPLRFRILHEIALGVNYLHNMTPPLLHHDLKTQNILLDNEFHVKIADFGLSKWRMMSLSQSRSSKSAPEGGTIIYMPPENYEPGQKSRASIKHDIYSYAVITWEVLSRKQPFEDVTNPLQIMYSVSQGHRPVINEESLPYDIPHRARMISLIESGWAQNPDERPSFLKCLIELEPVLRTFEEITFLEAVIQLKKTKLQSVSSAIHLCDKKKMELSLNIPVNHGPQEESCGSSQLHENSGSPETSRSLPAPQDNDFLSRKAQDCYFMKLHHCPGNHSWDSTISGSQRAAFCDHKTTPCSSAIINPLSTAGNSERLQPGIAQQWIQSKREDIVNQMTEACLNQSLDALLSRDLIMKEDYELVSTKPTRTSKVRQLLDTTDIQGEEFAKVIVQKLKDNKQMGLQPYPEILVVSRSPSLNLLQNKSM

SEQ ID NO: 845749 - protein, 293 aa, Homo sapiens
MIPLLLRACGRQPQEPSLLRCSQGGPTHCLHSEAVAIGPRGCSGSLRWLQESDAAPLPLSCHLAAHRGEDAPAVSPHGIPEGRVRAVRREGSEGPAREPGSIWGTDARVRGSSPNPSMGTGWEQAQRKPHWRQQPRADCKTLVPTAWRAPPRHKLHWFSMLRKKQHGCKDCKQCPFMISQLSRAEVAVGSVGALSGVSQTDVRPWWAALSPGGSGEASASRTIQAVDKSTPHGCRTEVPKSLSLVLWSLHLQTSNGALSKLWSNIHHIKFTILTIVKCMVCGIKYIHIVVQPS

SEQ ID NO: 845750 - protein, 320 aa, Homo sapiens
MGPWSRVRVAKCQMLVTCFFILLLGLSVATMVTLTYFGAHFAVIRRASLEKNPYQAVHQWAFSAGLSLVGLLTLGAVLSAAATVREAQGLMAGGFLCFSLAFCAQVQVVFWRLHSPTQVEDAMLDTYDLVYEQAMKGTSHVRRQELAAIQDVFLCCGKKSPFSRLGSTEADLCQGEEAAREDCLQGIRSFLRTHQQVASSLTSIGLALTVSALLFSSFLWFAIRCGCSLDRKGKYTLTPRACGRQPQEPSLLRCSQGGPTHCLHSEAVAIGPRGCSGSLRWLQESDAAPLPLSCHLAAHRALQGRSRGGLSGCPERGLSD

SEQ ID NO: 845751 - protein, 212 aa, Homo sapiens
MGPWSRVRVAKCQMLVTCFFILLLGLSVATMVTLTYFGAHFAVIRRASLEKNPYQAVHQWAFSAGLSLVGLLTLGAVLSAAATVREAQGLMAGGFLCFSLAFCAQVQVVFWRLHSPTQVEDAMLDTYDLVYEQAMKGTSHVRRQELAAIQDVFLCCGKKSPFSRLGSTEADLCQGEEAAREVRGGPGCWPGKTLGGWTPWGPTPRPRAILPP

SEQ ID NO: 845752 - protein, 290 aa, Homo sapiens
MVTLTYFGAHFAVIRRASLEKNPYQAVHQWAFSAGLSLVGLLTLGAVLSAAATVREAQGLMAGGFLCFSLAFCAQVQVVFWRLHSPTQVEDAMLDTYDLVYEQAMKGTSHVRRQELAAIQDVFLCCGKKSPFSRLGSTEADLCQGEEAAREDCLQGIRSFLRTHQQVASSLTSIGLALTVSALLFSSFLWFAIRCGCSLDRKGKYTLTPRACGRQPQEPSLLRCSQGGPTHCLHSEAVAIGPRGCSGSLRWLQESDAAPLPLSCHLAAHRALQGRSRGGLSGCPERGLSD

SEQ ID NO: 845753 - protein, 124 aa, Homo sapiens
MVTLTYFGAHFAVIRRASLEKNPYQAVHQWAFSAGLSLVGLLTLGAVLSAAATVREAQGLMAGGFLCFSLAFCAQVQVVFWRLHSPTQVEDAMLDTYDLVYEQAMKVSVLWEEVSFQPSGEHRG

SEQ ID NO: 845754 - protein, 339 aa, Homo sapiens
MLPGEGRPHPGAVGQPRVSPSQVSALLFSSFLWFAIRCGCSLDRKGKYTLTPRACGRQPQEPSLLRCSQGGPTHCLHSEAVAIGPRGCSGSLRWLQESDAAPLPLSCHLAAHRGEDAPAVSPHGIPEGRVRAVRREGSEGPAREPGSIWGTDARVRGSSPNPSMGTGWEQAQRKPHWRQQPRADCKTLVPTAWRAPPRHKLHWFSMLRKKQHGCKDCKQCPFMISQLSRAEVAVGSVGALSGVSQTDVRPWWAALSPGGSGEASASRTIQAVDKSTPHGCRTEVPKSLSLVLWSLHLQTSNGALSKLWSNIHHIKFTILTIVKCMVCGIKYIHIVVQPS

SEQ ID NO: 845755 - protein, 124 aa, Homo sapiens; identical to SEQ ID NO: 845753

SEQ ID NO: 845756 - protein, 210 aa, Homo sapiens
MGPWSRVRVAKCQMLVTCFFILLLGLSVATMVTLTYFGAHFAVIRRASLEKNPYQAVHQWAFSAGLSLVGLLTLGAVLSAAATVREAQGLMAGGFLCFSLAFCAQVQVVFWRLHSPTQVEDAMLDTYDLVYEQAMKGTSHVRRQELAAIQDVFLCCGKKSPFSRLGSTEADLCQGEEAAREVLCPALGWMLGTQSEFEVARPRGANVWPN

SEQ ID NO: 845757 - protein, 154 aa, Homo sapiens
MGPWSRVRVAKCQMLVTCFFILLLGLSVATMVTLTYFGAHFAVIRRASLEKNPYQAVHQWAFSAGLSLVGLLTLGAVLSAAATVREAQGLMAGGFLCFSLAFCAQVQVVFWRLHSPTQVEDAMLDTYDLVYEQAMKVSVLWEEVSFQPSGEHRG

SEQ ID NO: 845758 - protein, 126 aa, Homo sapiens
MGPWSRVRVAKCQMLVTCFFILLLGLSVATMVTLTYFGAHFAVIRRASLEKNPYQAVHQWAFSAGLSLVGLLTLGAVLSAAATVREAQGLMAGGFLCFSLAFCAQVQVVFWRLHSPTQHPSFRPGC

SEQ ID NO: 845759 - protein, 223 aa, Homo sapiens
MVTLTYFGAHFAVIRRASLEKNPYQAVHQWAFSAGLSLVGLLTLGAVLSAAATVREAQGLMAGGFLCFSLAFCAQVQVVFWRLHSPTQVEDAMLDTYDLVYEQAMKGTSHVRRQELAAIQDVFLCCGKKSPFSRLGSTEADLCQGEEAAREDCLQGIRSFLRTHQQVASSLTSIGLALTVSALLFSSFLWFAIRCGCSLDRKGKYTLTPRSPGQKSRWAQWVP

SEQ ID NO: 845760 - protein, 481 aa, Homo sapiens
LPRNVPHPPPCCPGIGLGGRCSSMAPQRPLVQAGRAAQGGYHACCPLTGLPSGHPELPEDTPAGRLQPDQHRPGPHGTLSPPSLPLPTSCPSACPAPDSDGRVTRDRISGLEPHWLPTSGSCSGVTGPASYSWAAPLHCRVLMLPGEGRPHPGAVGQPRVSPSQVSALLFSSFLWFAIRCGCSLDRKGKYTLTPRACGRQPQEPSLLRCSQGGPTHCLHSEAVAIGPRGCSGSLRWLQESDAAPLPLSCHLAAHRGEDAPAVSPHGIPEGRVRAVRREGSEGPAREPGSIWGTDARVRGSSPNPSMGTGWEQAQRKPHWRQQPRADCKTLVPTAWRAPPRHKLHWFSMLRKKQHGCKDCKQCPFMISQLSRAEVAVGSVGALSGVSQTDVRPWWAALSPGGSGEASASRTIQAVDKSTPHGCRTEVPKSLSLVLWSLHLQTSNGALSKLWSNIHHIKFTILTIVKCMVCGIKYIHIVVQPS

SEQ ID NO: 845761 - protein, 790 aa, Homo sapiens
MEKMSRVTTALGGSVLTGRTMHCHLDAPANAISVCRDAAQVVVAGRSIFKIYAIEEEQFVEKLNLRVGRKPSLNLSCADVVWHQMDENLLATAATNGVVVTWNLGRPSRNKQDQLFTEHKRTVNKVCFHPTEAHVLLSGSQDGFMKCFDLRRKDSVSTFSGQSESVRDVQFSIRDYFTFASTFENGNVQLWDIRRPDRCERMFTAHNGPVFCCDWHPEDRGWLATGGRDKMVKVWDMTTHRAKEMHCVQTIASVARVKWRPECRHHLATCSMMVDHNIYVWDVRRPFVPAAMFEEHRDVTTGIAWRHPHDPSFLLSGSKDSSLCQHLFRDASQPVERANPEGLCYGLFGDLAFAAKESLVAAESGRKPYTGDRRHPIFFKRKLDPAEPFAGLASSALSVFETEPGGGGMRWFVDTAERYALAGRPLAELCDHNAKVARELGRNQVAQTWTMLRIIYCSPGLVPTANLNHSVGKGGSCGLPLMNSFNLKDMAPGLGSETRLDRSKGDARSDTVLLDSSATLITNEDNEETEGSDVPADYLLGDVEGEEDELYLLDPEHAHPEDPECVLPQEAFPLRHEIVDTPPGPEHLQDKADSPHVSGSEADVASLAPVDSSFSLLSVSHALYDSRLPPDFFGVLVRDMLHFYAEQGDVQMAVSVLIVLGERVRKDIDEQTQEHWYTSYIDLLQRFRLWNVSNEVVKLSTSRAVSCLNQASTTLHVNCSHCKRPMSSRGWVCDRCHRCASMCAVCHHVVKGLFVWCQGCSHGGHLQHIMKWLEGSSHCPAGCGHLCEYS

SEQ ID NO: 845762 - protein, 816 aa, Homo sapiens
MEKMSRVTTALGGSVLTGRTMHCHLDAPANAISVCRDAAQVVVAGRSIFKIYAIEEEQFVEKLNLRVGRKPSLNLSCADVVWHQMDENLLATAATNGVVVTWNLGRPSRNKQDQLFTEHKRTVNKVCFHPTEAHVLLSGSQDGFMKCFDLRRKDSVSTFSGQSESVRDVQFSIRDYFTFASTFENGNVQLWDIRRPDRCERMFTAHNGPVFCCDWHPEDRGWLATGGRDKMVKVWDMTTHRAKEMHCVQTIASVARVKWRPECRHHLATCSMMVDHNIYVWDVRRPFVPAAMFEEHRDVTTGIAWRHPHDPSFLLSGSKDSSLCQHLFRDASQPVERANPEGLCYGLFGDLAFAAKESLVAAESGRKPYTGDRRHPIFFKRKLDPAEPFAGLASSALSVFETEPGGGGMRWFVDTAERYALAGRPLAELCDHNAKVARELGRNQVAQTWTMLRIIYCSPGLVPTANLNHSVGKGGSCGLPLMNRYDAGGSSPQGLGLLEPTHPWALPAPSFNLKDMAPGLGSETRLDRSKGDARSDTVLLDSSATLITNEDNEETEGSDVPADYLLGDVEGEEDELYLLDPEHAHPEDPECVLPQEAFPLRHEIVDTPPGPEHLQDKADSPHVSGSEADVASLAPVDSSFSLLSVSHALYDSRLPPDFFGVLVRDMLHFYAEQGDVQMAVSVLIVLGERVRKDIDEQTQEHWYTSYIDLLQRFRLWNVSNEVVKLSTSRAVSCLNQASTTLHVNCSHCKRPMSSRGWVCDRCHRCASMCAVCHHVVKGLFVWCQGCSHGGHLQHIMKWLEGSSHCPAGCGHLCEYS

SEQ ID NO: 845763 - protein, 845 aa, Homo sapiens
MEKMSRVTTALGGSVLTGRTMHCHLDAPANAISVCRDAAQVVVAGRSIFKIYAIEEEQFVEKLNLRVGRKPSLNLSCADVVWHQMDENLLATAATNGVVVTWNLGRPSRNKQDQLFTEHKRTVNKVCFHPTEAHVLLSGSQDGFMKCFDLRRKDSVSTFSGQSESVRDVQFSIRDYFTFASTFENGNVQLWDIRRPDRCERMFTAHNGPVFCCDWHPEDRGWLATGGRDKMVKVWDMTTHRAKEMHCVQTIASVARVKWRPECRHHLATCSMMVDHNIYVWDVRRPFVPAAMFEEHRDVTTGIAWRHPHDPSFLLSGSKDSSLCQHLFRDASQPVERANPEGLCYGLFGDLAFAAKESLVAAESGRKPYTGDRRHPIFFKRKLDPAEPFAGLASSALSVFETEPGGGGMRWFVDTAERYALAGRPLAELCDHNAKVARELGRNQVAQTWTMLRIIYCSPGLVPTANLNHSVGKGGSCGLPLMNSFNLKDMAPGLGSETRLDRSKGDARSDTVLLDSSATLITNEDNEETEGSDVPADYLLGDVEGEEDELYLLDPEHAHPEDPECVLPQEAFPLRHEIVDTPPGPEHLQDKADSPHVSGSEADVASLAPVDSSFSLLSVSHALYDSRLPPDFFGVLVRDMLHFYAEQGDVQMAVSVLIVLGERVRKDIDEQTQVCGGGASPLQRRPWHPDPDCRALPPPGALVHFLHRPAAALPPLERVQRGGQAEHQPRRQLPQPGLHHPARQLQPLQAAHEQPGLGLRQVPPLRQHVCRLPPRSQGSLRVVPGLQPRRPPAAHHEVAGRQLPLSRRLRPPLRVLLTGHLLGLPGRPRAEPRLVLCPRRAEAGT

SEQ ID NO: 845764 - protein, 846 aa, Homo sapiens
MEKMSRVTTALGGSVLTGRTMHCHLDAPANAISVCRDAAQVVVAGRSIFKIYAIEEEQFVEKLNLRVGRKPSLNLSCADVVWHQMDENLLATAATNGVVVTWNLGRPSRNKQDQLFTEHKRTVNKVCFHPTEAHVLLSGSQDGFMKCFDLRRKDSVSTFSGQSESVRDVQFSIRDYFTFASTFENGNVQLWDIRRPDRCERMFTAHNGPVFCCDWHPEDRGWLATGGRDKMVKVWDMTTHRAKEMHCVQTIASVARVKWRPECRHHLATCSMMVDHNIYVWDVRRPFVPAAMFEEHRDVTTGIAWRHPHDPSFLLSGSKDSSLCQHLFRDASQPVERANPEGLCYGLFGDLAFAAKESLVAAESGRKPYTGDRRHPIFFKRKLDPAEPFAGLASSALSVFETEPGGGGMRWFVDTAERYALAGRPLAELCDHNAKVARELGRNQVAQTWTMLRIIYCSPGLVPTANLNHSVGKGGSCGLPLMNSFNLKDMAPGLGSETRLDRSKGDARSDTVLLDSSATLITNEDNEETEGSDVPADYLLGDVEGEEDELYLLDPEHAHPEDPECVLPQEAFPLRHEIVDTPPGPEHLQDKADSPHVSGSEADVASLAPVDSSFSLLSVSHALYDSRLPPDFFGVLVRDMLHFYAEQGDVQMAVSVLIVLGERVRKDIDEQTQVCGGGASPLQRRPWHPDPDCRALPPPGALVHFLHRPAAALPPLERVQRGGQAEHQPRRQLPQPGLHHPARQLQPLQAAHEQPGLGLRQVGQWGREVGQGPAGSAAAPAEAPSLPPAPRCHRCASMCAVCHHVVKGLFVWCQGCSHGGHLQHIMKWLEGSSHCPAGCGHLCEYS

SEQ ID NO: 845765 - protein, 448 aa, Homo sapiens [sequence omitted]

SEQ ID NO: 845766 - protein, 778 aa, Homo sapiens
MEKMSRVTTALGGSVLTGRTMHCHLDAPANAISVCRDAAQVVVAGRSIFKIYAIEEEQFVEKLNLRVGRKPSLNLSCADVVWHQMDENLLATAATNGVVVTWNLGRPSRNKQDQLFTEHKRTVNKVCFHPTEAHVLLSGSQDGFMKCFDLRRKDSVSTFSGQSESVRDVQFSIRDYFTFASTFENGNVQLWDIRRPDRCERMFTAHNGPVFCCDWHPEDRGWLATGGRDKMVKVWDMTTHRAKEMHCVQTIASVARVKWRPECRHHLATCSMMVDHNIYVWDVRRPFVPAAMFEEHRDVTTGIAWRHPHDPSFLLSGSKDSSLCQHLFRDASQPVERANPEGLCYGLFGDLAFAAKESLVAAESGRKPYTGDRRHPIFFKRKLDPAEPFAGLASSALSVFETEPGGGGMRWFVDTAERYALAGRPLAELCDHNAKVARELGRNQVAQTWTMLRIIYCSPGLVPTANLNHSVGKGGSCGLPLMNSFNLKDMAPGLGSETRLDRSKGDARSDTVLLDSSATLITNEDNEETEGSDVPADYLLGDVEGEEDELYLLDPEHAHPEDPECVLPQEAFPLRHEIVDTPPGPEHLQDKADSPHVSGSEADVASLAPVDSSFSLLSVSHALYDSRLPPDFFGVLVRDMLHFYAEQGDVQMAVSVLIVLGERVRKDIDEQTQEHWYTSYIDLLQRFRLWNVSNEVVKLSTSRAVSCLNQASTTLHVNCSHCKRPMSSRGWVCDRWGSGVGRWGRGLQAAQQPPLRHPPSRPPPGATAAPACVPSATT

SEQ ID NO: 845767 - protein, 725 aa, Homo sapiens
MEKMSRVTTALGGSVLTGRTMHCHLDAPANAISVCRDAAQVVVAGRSIFKIYAIEEEQFVEKLNLRVGRKPSLNLSCADVVWHQMDENLLATAATNGVVVTWNLGRPSRNKQDQLFTEHKRTVNKVCFHPTEAHVLLSGSQDGFMKCFDLRRKDSVSTFSGQSESVRDVQFSIRDYFTFASTFENGNVQLWDIRRPDRCERMFTAHNGPVFCCDWHPEDRGWLATGGRDKMVKVWDMTTHRAKEMHCVQTIASVARVKWRPECRHHLATCSMMVDHNIYVWDVRRPFVPAAMFEEHRDVTTGIAWRHPHDPSFLLSGSKDSSLCQHLFRDASQPVERANPEGLCYGLFGDLAFAAKESLVAAESGRKPYTGDRRHPIFFKRKLDPAEPFAGLASSALSVFETEPGGGGMRWFVDTAERYALAGRPLAELCDHNAKVARELGRNQVAQTWTMLRIIYCSPGLVPTANLNHSVGKGGSCGLPLMNSFNLKDMAPGLGSETRLDRSKGDARSDTVLLDSSATLITNEDNEETEGSDVPADYLLGDVEGEEDELYLLDPEHAHPEDPECVLPQEAFPLRHEIVDTPPGPEHLQDKADSPHVSGSEADVASLAPVDSSFSLLSVSHALYDSRLPPDFFGVLVRDMLHFYAEQGDVQMAVSVLIVLGERVRKDIDEQTQEHWYTSYIDLLQRFRLWNVSNEVVKLSTSRAVSCLNQASTTLHVNCSHCSTS

SEQ ID NO: 845768 - protein, 579 aa, Homo sapiens
GLGGPSSHRGWLATGGRDKMVKVWDMTTHRAKEMHCVQTIASVARVKWRPECRHHLATCSMMVDHNIYVWDVRRPFVPAAMFEEHRDVTTGIAWRHPHDPSFLLSGSKDSSLCQHLFRDASQPVERANPEGLCYGLFGDLAFAAKESLVAAESGRKPYTGDRRHPIFFKRKLDPAEPFAGLASSALSVFETEPGGGGMRWFVDTAERYALAGRPLAELCDHNAKVARELGRNQVAQTWTMLRIIYCSPGLVPTANLNHSVGKGGSCGLPLMNSFNLKDMAPGLGSETRLDRSKGDARSDTVLLDSSATLITNEDNEETEGSDVPADYLLGDVEGEEDELYLLDPEHAHPEDPECVLPQEAFPLRHEIVDTPPGPEHLQDKADSPHVSGSEADVASLAPVDSSFSLLSVSHALYDSRLPPDFFGVLVRDMLHFYAEQGDVQMAVSVLIVLGERVRKDIDEQTQEHWYTSYIDLLQRFRLWNVSNEVVKLSTSRAVSCLNQASTTLHVNCSHCKRPMSSRGWVCDRCHRCASMCAVCHHVVKGLFVWCQGCSHGGHLQHIMKWLEGSSHCPAGCGHLCEYS

SEQ ID NO: 845769 - protein, 103 aa, Homo sapiens
FFFFFRWSLTLSHPGWSAVAHDLGLLQPPPPGFKQFSYLSLPSSWYYRYEEAEVRKKLEEKDRQEEAQRLQQKRQEQITMVECHQLRQEPALFTSFVFTASGI

SEQ ID NO: 845770 - protein, 1089 aa, Homo sapiens
MPAVASVPKELYLSSSLKDLNKKTEVKPEKISTKSYVHSALKIFKTAEECRLDRDEERAYVLYMKYVTVYNLIKKRPDFKQQQDYFHSILGPGNIKKAVEEAERLSESLKLRYEEAEVRKKLEEKDRQEEAQRLQQKRQETGREDGGTLAKGSLENVLDSKDKTQKSNGEKNEKCETKEKGAITAKELYTMMTDKNISLIIMDARRMQDYQDSCILHSLSVPEEAISPGVTASWIEAHLPDDSKDTWKKRGNVEYVVLLDWFSSAKDLQIGTTLRSLKDALFKWESKTVLRNEPLVLEGGYENWLLCYPQYTTNAKVTPPPRRQNEEVSISLDFTYPSLEESIPSKPAAQTPPASIEVDENIELISGQNERMGPLNISTPVEPVAASKSDVSPIIQPVPSIKNVPQIDRTKKPAVKLPEEHRIKSESTNHEQQSPQSGKVIPDRSTKPVVFSPTLMLTDEEKARIHAETALLMEKNKQEKELRERQQEEQKEKLRKEEQEQKAKKKQEAEENEITEKQQKAKEEMEKKESEQAKKEDKETSAKRGKEITGVKRQSKSEHETSDAKKSVEDRGKRCPTPEIQKKSTGDVPHTSVTGDSGSGKAQREPLTRARSEEMGRIVPGLPSGWAKFLDPITGTFRYYHSPTNTVHMYPPEMAPSSAPPSTPPTHKAKPQIPAERDREPSKLKRSYSSPDITQAIQEEEKRKPTVTPTVNRENKPTCYPKAEISRLSASQIRNLNPVFGGSGPALTGLRNLGNTCYMNSILQCLCNAPHLADYFNRNCYQDDINRSNLLGHKGEVAEEFGIIMKALWTGQYRYISPKDFKITIGKINDQFAGYSQQDSQELLLFLMDGLHEDLNKADNRKRYKEENNDHLDDFKAAEHAWQKHKQLNESIIVALFQGQFKSTVQCLTCHKKSRTFEAFMYLSLPLASTSKCTLQDCLRLFSKEEKLTDNNRFYCSHCRARRDSLKKIEIWKLPPVLLVHLKRFSYDGRWKQKLQTSVDFPLENLDLSQYVIGPKNNLKKYNLFSVSNHYGGLDGGHYTAYCKNAARQRWFKFDDHEVSDISVSSVKSSAAYILFYTSLGPRVTDVAT

SEQ ID NO: 845771 - protein, 1089 aa, Homo sapiens; identical to SEQ ID NO: 845770

SEQ ID NO: 845772 - protein, 899 aa, Homo sapiens
MMTDKNISLIIMDARRMQDYQDSCILHSLSVPEEAISPGVTASWIEAHLPDDSKDTWKKRGNVEYVVLLDWFSSAKDLQIGTTLRSLKDALFKWESKTVLRNEPLVLEGGYENWLLCYPQYTTNAKVTPPPRRQNEEVSISLDFTYPSLEESIPSKPAAQTPPASIEVDENIELISGQNERMGPLNISTPVEPVAASKSDVSPIIQPVPSIKNVPQIDRTKKPAVKLPEEHRIKSESTNHEQQSPQSGKVIPDRSTKPVVFSPTLMLTDEEKARIHAETALLMEKNKQEKELRERQQEEQKEKLRKEEQEQKAKKKQEAEENEITEKQQKAKEEMEKKESEQAKKEDKETSAKRGKEITGVKRQSKSEHETSDAKKSVEDRGKRCPTPEIQKKSTGDVPHTSVTGDSGSGKAQREPLTRARSEEMGRIVPGLPSGWAKFLDPITGTFRYYHSPTNTVHMYPPEMAPSSAPPSTPPTHKAKPQIPAERDREPSKLKRSYSSPDITQAIQEEEKRKPTVTPTVNRENKPTCYPKAEISRLSASQIRNLNPVFGGSGPALTGLRNLGNTCYMNSILQCLCNAPHLADYFNRNCYQDDINRSNLLGHKGEVAEEFGIIMKALWTGQYRYISPKDFKITIGKINDQFAGYSQQDSQELLLFLMDGLHEDLNKADNRKRYKEENNDHLDDFKAAEHAWQKHKQLNESIIVALFQGQFKSTVQCLTCHKKSRTFEAFMYLSLPLASTSKCTLQDCLRLFSKEEKLTDNNRFYCSHCRARRDSLKKIEIWKLPPVLLVHLKRFSYDGRWKQKLQTSVDFPLENLDLSQYVIGPKNNLKKYNLFSVSNHYGGLDGGHYTAYCKNAARQRWFKFDDHEVSDISVSSVKSSAAYILFYTSLGPRVTDVAT

SEQ ID NO: 845773 - protein, 1034 aa, Homo sapiens
MPAVASVPKELYLSSSLKDLNKKTEVKPEKISTKSYVHSALKIFKTAEECRLDRDEERAYVLYMKYVTVYNLIKKRPDFKQQQDYFHSILGPGNIKKAVEEAERLSESLKLRYEEAEVRKKLEEKDRQEEAQRLQQKRQETGREDGGTLAKGSLENVLDSKDKTQKSNGEKNEKCETKEKGAITAKELYTMMTDKNISLIIMDARRMQDYQDSCILHSLSVPEEAISPGVTASWIEAHLPDDSKDTWKKRGNVEYVVLLDWFSSAKDLQIGTTLRSLKDALFKWESKTVLRNEPLVLEGGYENWLLCYPQYTTNAKVTPPPRRQNEEVSISLDFTYPSLEESIPSKPAAQTPPASIEVDENIELISGQNERMGPLNISTPVEPVAASKSDVSPIIQPVPSIKNVPQIDRTKKPAVKLPEEHRIKSESTNHEQQSPQSGKVIPDRSTKPVVFSPTLMLTDEEKARIHAETALLMEKNKQEKELRERQQEEQKEKLRKEEQEQKAKKKQEAEENEITEKQQKAKEEMEKKESEQAKKEDKETSAKRGKEITGVKRQSKSEHETSDAKKSVEDRGKRCPTPEIQKKSTGDVPHTSVTGDSGSGKAQREPLTRARSEEMGRIVPGLPSGWAKFLDPITGTFRYYHSPTNTVHMYPPEMAPSSAPPSTPPTHKAKPQIPAERDREPSKLKRSYSSPDITQAIQEEEKRKPTVTPTVNRENKPTCYPKAEISRLSASQIRNLNPVFGGSGPALTGLRNLGNTCYMNSILQCLCNAPHLADYFNRNCYQDDINRSNLLGHKGEVAEEFGIIMKALWTGQYRYISPKDFKITIGKINDQFAGYSQQDSQELLLFLMDGLHEDLNKADNRKRYKEENNDHLDDFKAAEHAWQKHKQLNESIIVALFQGQFKSTVQCLTCHKKSRTFEAFMYLSLPLASTSKCTLQDCLRLFSKEEKLTDNNRFYCSHCRARRDSLKKIEIWKLPPVLLVHLKRFSYDGRWKQKLQTSVDFPLENLDLSQYVIGPKNNLKKYNLFSVSVSISLN

SEQ ID NO: 845774 - protein, 718 aa, Homo sapiens
MGPLNISTPVEPVAASKSDVSPIIQPVPSIKNVPQIDRTKKPAVKLPEEHRIKSESTNHEQQSPQSGKVIPDRSTKPVVFSPTLMLTDEEKARIHAETALLMEKNKQEKELRERQQEEQKEKLRKEEQEQKAKKKQEAEENEITEKQQKAKEEMEKKESEQAKKEDKETSAKRGKEITGVKRQSKSEHETSDAKKSVEDRGKRCPTPEIQKKSTGDVPHTSVTGDSGSGKAQREPLTRARSEEMGRIVPGLPSGWAKFLDPITGTFRYYHSPTNTVHMYPPEMAPSSAPPSTPPTHKAKPQIPAERDREPSKLKRSYSSPDITQAIQEEEKRKPTVTPTVNRENKPTCYPKAEISRLSASQIRNLNPVFGGSGPALTGLRNLGNTCYMNSILQCLCNAPHLADYFNRNCYQDDINRSNLLGHKGEVAEEFGIIMKALWTGQYRYISPKDFKITIGKINDQFAGYSQQDSQELLLFLMDGLHEDLNKADNRKRYKEENNDHLDDFKAAEHAWQKHKQLNESIIVALFQGQFKSTVQCLTCHKKSRTFEAFMYLSLPLASTSKCTLQDCLRLFSKEEKLTDNNRFYCSHCRARRDSLKKIEIWKLPPVLLVHLKRFSYDGRWKQKLQTSVDFPLENLDLSQYVIGPKNNLKKYNLFSVSNHYGGLDGGHYTAYCKNAARQRWFKFDDHEVSDISVSSVKSSAAYILFYTSLGPRVTDVAT

SEQ ID NO: 845775 - protein, 1046 aa, Homo sapiens
MPAVASVPKELYLSSSLKDLNKKTEVKPEKISTKSYVHSALKIFKTAEECRLDRDEERAYVLYMKYVTVYNLIKKRPDFKQQQDYFHSILGPGNIKKAVEEAERLSESLKLRYEEAEVRKKLEEKDRQEEAQRLQQKRQETGREDGGTLAKGSLENVLDSKDKTQKSNGEKNEKCETKEKGAITAKELYTMMTDKNISLIIMDARRMQDYQDSCILHSLSVPEEAISPGVTASWIEAHLPDDSKDTWKKRGNVEYVVLLDWFSSAKDLQIGTTLRSLKDALFKWESKTVLRNEPLVLEGGYENWLLCYPQYTTNAKVTPPPRRQNEEVSISLDFTYPSLEESIPSKPAAQTPPASIEVDENIELISGQNERMGPLNISTPVEPVAASKSDVSPIIQPVPSIKNVPQIDRTKKPAVKLPEEHRIKSESTNHEQQSPQSGKVIPDRSTKPVVFSPTLMLTDEEKARIHAETALLMEKNKQEKELRERQQEEQKEKLRKEEQEQKAKKKQEAEENEITEKQQKAKEEMEKKESEQAKKEDKETSAKRGKEITGVKRQSKSEHETSDAKKSVEDRGKRCPTPEIQKKSTGDVPHTSVTGDSGSGKAQREPLTRARSEEMGRIVPGLPSGWAKFLDPITGTFRYYHSPTNTVHMYPPEMAPSSAPPSTPPTHKAKPQIPAERDREPSKLKRSYSSPDITQAIQEEEKRKPTVTPTVNRENKPTCYPKAEISRLSASQIRNLNPVFGGSGPALTGLRNLGNTCYMNSILQCLCNAPHLADYFNRNCYQDDINRSNLLGHKGEVAEEFGIIMKALWTGQYRYISPKDFKITIGKINDQFAGYSQQDSQELLLFLMDGLHEDLNKADNRKRYKEENNDHLDDFKAAEHAWQKHKQLNESIIVALFQGQFKSTVQCLTCHKKSRTFEAFMYLSLPLASTSKCTLQDCLRLFSKEEKLTDNNRFYCSHCRARRDSLKKIEIWKLPPVLLVHLKRFSYDGRWKQKLQTSVDFPLENLDLSQYVIGPKNNLKKYNLFSVSNHQNGSMGERNVKLSIHI

SEQ ID NO: 845776 - protein, 1118 aa, Homo sapiens
MPAVASVPKELYLSSSLKDLNKKTEVKPEKISTKSYVHSALKIFKTAEECRLDRDEERAYVLYMKYVTVYNLIKKRPDFKQQQDYFHSILGPGNIKKAVEEAERLSESLKLRYEEAEVRKKLEEKDRQEEAQRLQQKRQETGREDGGTLAKGSLENVLDSKDKTQKSNGEKNEKCETKEKGAITAKELYTMMTDKNISLIIMDARRMQDYQDSCILHSLSVPEEAISPGVTASWIEAHLPDDSKDTWKKRGNVEYVVLLDWFSSAKDLQIGTTLRSLKDALFKWESKTVLRNEPLVLEGGYENWLLCYPQYTTNAKVTPPPRRQNEEVSISLDFTYPSLEESIPSKPAAQTPPASIEVDENIELISGQNERMGPLNISTPVEPVAASKSDVSPIIQPVPSIKNVPQIDRTKKPAVKLPEEHRIKSESTNHEQQSPQSGKVIPDRSTKPVVFSPTLMLTDEEKARIHAETALLMEKNKQEKELRERQQEEQKEKLRKEEQEQKAKKKQEAEENEITEKQQKAKEEMEKKESEQAKKEDKETSAKRGKEITGVKRQSKSEHETSDAKKSVEDRGKRCPTPEIQKKSTGDVPHTSVTGDSGSGKPFKIKGQPESGILRTGTFREDTDDTERNKAQREPLTRARSEEMGRIVPGLPSGWAKFLDPITGTFRYYHSPTNTVHMYPPEMAPSSAPPSTPPTHKAKPQIPAERDREPSKLKRSYSSPDITQAIQEEEKRKPTVTPTVNRENKPTCYPKAEISRLSASQIRNLNPVFGGSGPALTGLRNLGNTCYMNSILQCLCNAPHLADYFNRNCYQDDINRSNLLGHKGEVAEEFGIIMKALWTGQYRYISPKDFKITIGKINDQFAGYSQQDSQELLLFLMDGLHEDLNKADNRKRYKEENNDHLDDFKAAEHAWQKHKQLNESIIVALFQGQFKSTVQCLTCHKKSRTFEAFMYLSLPLASTSKCTLQDCLRLFSKEEKLTDNNRFYCSHCRARRDSLKKIEIWKLPPVLLVHLKRFSYDGRWKQKLQTSVDFPLENLDLSQYVIGPKNNLKKYNLFSVSNHYGGLDGGHYTAYCKNAARQRWFKFDDHEVSDISVSSVKSSAAYILFYTSLGPRVTDVAT

SEQ ID NO: 845777 - protein, 765 aa, Homo sapiens
MPAVASVPKELYLSSSLKDLNKKTEVKPEKISTKSYVHSALKIFKTAEECRLDRDEERAYVLYMKYVTVYNLIKKRPDFKQQQDYFHSILGPGNIKKAVEEAERLSESLKLRYEEAEVRKKLEEKDRQEEAQRLQQKRQETGREDGGTLAKGSLENVLDSKDKTQKSNGEKNEKCETKEKGAITAKELYTMMTDKNISLIIMDARRMQDYQDSCILHSLSVPEEAISPGVTASWIEAHLPDDSKDTWKKRGNVEYVVLLDWFSSAKDLQIGTTLRSLKDALFKWESKTVLRNEPLVLEGGYENWLLCYPQYTTNAKVTPPPRRQNEEVSISLDFTYPSLEESIPSKPAAQTPPASIEVDENIELISGQNERMGPLNISTPVEPVAASKSDVSPIIQPVPSIKNVPQIDRTKKPAVKLPEEHRIKSESTNHEQQSPQSGKVIPDRSTKPVVFSPTLMLTDEEKARIHAETALLMEKNKQEKELRERQQEEQKEKLRKEEQEQKAKKKQEAEENEITEKQQKAKEEMEKKESEQAKKEDKETSAKRGKEITGVKRQSKSEHETSDAKKSVEDRGKRCPTPEIQKKSTGDVPHTSVTGDSGSGKPFKIKGQPESGILRTGTFREDTDDTERNKAQREPLTRARSEEMGRIVPGLPSGWAKFLDPITGTFRYYHSPTNTVHMYPPEMAPSSAPPSTPPTHKAKPQIPAERDREPSKLKRSYSSPDITQAIQEEEKRKPTVTPTVNRENKFGTSILFLEVLDQLLLDFVT

SEQ ID NO: 845778 - protein, 1047 aa, Homo sapiens
MPAVASVPKELYLSSSLKDLNKKTEVKPEKISTKSYVHSALKIFKTAEECRLDRDEERAYVLYMKYVTVYNLIKKRPDFKQQQDYFHSILGPGNIKKAVEEAERLSESLKLRYEEAEVRKKLEEKDRQEEAQRLQQKRQETGREDGGTLAKGSLENVLDSKDKTQKSNGEKNEKCETKEKGAITAKELYTMMTDKNISLIIMDARRMQDYQDSCILHSLSVPEEAISPGVTASWIEAHLPDDSKDTWKKRGNVEYVVLLDWFSSAKDLQIGTTLRSLKDALFKWESKTVLRNEPLVLEGGYENWLLCYPQYTTNAKVTPPPRRQNEEVSISLDFTYPSLEESIPSKPAAQTPPASIEVDENIELISGQNERMGPLNISTPVEPVAASKSDVSPIIQPVPSIKNVPQIDRTKKPAVKLPEEHRIKSESTNHEQQSPQSGKVIPDRSTKPVVFSPTLMLTDEEKARIHAETALLMEKNKQEKELRERQQEEQKEKLRKEEQEQKAKKKQEAEENEITEKQQKAKEEMEKKESEQAKKEDKETSAKRGKEITGVKRQSKSEHETSDAKKSVEDRGKRCPTPEIQKKSTGDVPHTSVTGDSGSGKPFKIKGQPESGILRTGTFREDTDDTERNKAQREPLTRARSEEMGRIVPGLPSGWAKFLDPITGTFRYYHSPTNTVHMYPPEMAPSSAPPSTPPTHKAKPQIPAERDREPSKLKRSYSSPDITQAIQEEEKRKPTVTPTVNRENKSNLLGHKGEVAEEFGIIMKALWTGQYRYISPKDFKITIGKINDQFAGYSQQDSQELLLFLMDGLHEDLNKADNRKRYKEENNDHLDDFKAAEHAWQKHKQLNESIIVALFQGQFKSTVQCLTCHKKSRTFEAFMYLSLPLASTSKCTLQDCLRLFSKEEKLTDNNRFYCSHCRARRDSLKKIEIWKLPPVLLVHLKRFSYDGRWKQKLQTSVDFPLENLDLSQYVIGPKNNLKKYNLFSVSNHYGGLDGGHYTAYCKNAARQRWFKFDDHEVSDISVSSVKSSAAYILFYTSLGPRVTDVAT

SEQ ID NO: 845779 - protein, 1089 aa, Homo sapiens; identical to SEQ ID NO: 845770

SEQ ID NO: 845780 - protein, 230 aa, Homo sapiens
DYRPSPSPLHDHLDDFKAAEHAWQKHKQLNESIIVALFQGQFKSTVQCLTCHKKSRTFEAFMYLSLPLASTSKCTLQDCLRLFSKEEKLTDNNRFYCSHCRARRDSLKKIEIWKLPPVLLVHLKRFSYDGRWKQKLQTSVDFPLENLDLSQYVIGPKNNLKKYNLFSVSNHYGGLDGGHYTAYCKNAARQRWFKFDDHEVSDISVSSVKSSAAYILFYTSLGPRVTDVAT

SEQ ID NO: 845781 - protein, 183 aa, Homo sapiens
MVFRECRLTVHLSSRVSNTDPRYVKLYAPGDCLRLFSKEEKLTDNNRFYCSHCRARRDSLKKIEIWKLPPVLLVHLKRFSYDGRWKQKLQTSVDFPLENLDLSQYVIGPKNNLKKYNLFSVSNHYGGLDGGHYTAYCKNAARQRWFKFDDHEVSDISVSSVKSSAAYILFYTSLGPRVTDVAT

SEQ ID NO: 845782 - protein, 189 aa, Homo sapiens
PGDSRGSGLHLVAQGCSRSRPAHREPSSGQGSPRQPRAQPISAPDCTRAMVGRRALIVLAHSERTSFNYAMKEAAAAALKKKGWEVVESDLYAMNFNPIISRKDITGKLKDPANFQYPAESVLAYKEGHLSPDIVAEQKKLEAADLVIFQVWGDIGRGVRDICVLIVLDMYLISYEILNSYPLYCILCK

SEQ ID NO: 845783 - protein, 323 aa, Homo sapiens
PGDSRGSGLHLVAQGCSRSRPAHREPSSGQGSPRQPRAQPISAPDCTRAMVGRRALIVLAHSERTSFNYAMKEAAAAALKKKGWEVVESDLYAMNFNPIISRKDITGKLKDPANFQYPAESVLAYKEGHLSPDIVAEQKKLEAADLVIFQFPLQWFGVPAILKGWFERVFIGEFAYTYAAMYDKGPFRSKKAVLSITTGGSGSMYSLQGIHGDMNVILWPIQSGILHFCGFQVLEPQLTYSIGHTPADARIQILEGWKKRLENIWDETPLYFAPSSLFDLNFQAGFLMKKEVQDEEKNKKFGLSVGHHLGKSIPTDNQIKARK

SEQ ID NO: 845784 - protein, 339 aa, Homo sapiens
ALVGCPPQTGRTGYIRENAPCTTHATPTTQGCSRSRPAHREPSSGQGSPRQPRAQPISAPDCTRAMVGRRALIVLAHSERTSFNYAMKEAAAAALKKKGWEVVESDLYAMNFNPIISRKDITGKLKDPANFQYPAESVLAYKEGHLSPDIVAEQKKLEAADLVIFQFPLQWFGVPAILKGWFERVFIGEFAYTYAAMYDKGPFRSKKAVLSITTGGSGSMYSLQGIHGDMNVILWPIQSGILHFCGFQVLEPQLTYSIGHTPADARIQILEGWKKRLENIWDETPLYFAPSSLFDLNFQAGFLMKKEVQDEEKNKKFGLSVGHHLGKSIPTDNQIKARK

SEQ ID NO: 845785 - protein, 339 aa, Homo sapiens; identical to SEQ ID NO: 845784

SEQ ID NO: 845786 - protein, 391 aa, Homo sapiens
  misc_feature (27)..(27): Xaa can be any naturally occurring amino acid
  misc_feature (107)..(107): Xaa can be any naturally occurring amino acid
QLPTTGFDSERTPRGVSIFPIYFQPLXVPLEIKAKAPRKVTYSWKFTSWSLFRSKSSISLAISASCSFEPMVSSFWISSFSSFLLRVCLSPSLPEYLWKMATRRPMXNPGGMPWLSSAECRRALIVLAHSERTSFNYAMKEAAAAALKKKGWEVVESDLYAMNFNPIISRKDITGKLKDPANFQYPAESVLAYKEGHLSPDIVAEQKKLEAADLVIFQFPLQWFGVPAILKGWFERVFIGEFAYTYAAMYDKGPFRSKKAVLSITTGGSGSMYSLQGIHGDMNVILWPIQSGILHFCGFQVLEPQLTYSIGHTPADARIQILEGWKKRLENIWDETPLYFAPSSLFDLNFQAGFLMKKEVQDEEKNKKFGLSVGHHLGKSIPTDNQIKARK

SEQ ID NO: 845787 - protein, 197 aa, Homo sapiens
SRISSYRIRYVAKKKLEAQSCDDSFPLQWFGVPAILKGWFERVFIGEFAYTYAAMYDKGPFRSKKAVLSITTGGSGSMYSLQGIHGDMNVILWPIQSGILHFCGFQVLEPQLTYSIGHTPADARIQILEGWKKRLENIWDETPLYFAPSSLFDLNFQAGFLMKKEVQDEEKNKKFGLSVGHHLGKSIPTDNQIKARK

SEQ ID NO: 845788 - protein, 305 aa, Homo sapiens
ALVGCPPQTGRTGYIRENAPCTTHATPTTQGCSRSRPAHREPSSGQGSPRQPRAQPISAPDCTRAMVGRRALIVLAHSERTSFNYAMKEAAAAALKKKGWEVVESDLYAMNFNPIISRKDITGKLKDPANFQYPAESVLAYKEGHLSPDIVAEQKKLEAADLVIFQFPLQWFGVPAILKGWFERVFIGEFAYTYAAMYDKGPFRSGILHFCGFQVLEPQLTYSIGHTPADARIQILEGWKKRLENIWDETPLYFAPSSLFDLNFQAGFLMKKEVQDEEKNKKFGLSVGHHLGKSIPTDNQIKARK

SEQ ID NO: 845789 - protein, 305 aa, Homo sapiens; identical to SEQ ID NO: 845788

SEQ ID NO: 845790 - protein, 301 aa, Homo sapiens
ALVGCPPQTGRTGYIRENAPCTTHATPTTQGCSRSRPAHREPSSGQGSPRQPRAQPISAPDCTRAMVGRRALIVLAHSERTSFNYAMKEAAAAALKKKGWEVVESDLYAMNFNPIISRKDITGKLKDPANFQYPAESVLAYKEGHLSPDIVAEQKKLEAADLVIFQSKKAVLSITTGGSGSMYSLQGIHGDMNVILWPIQSGILHFCGFQVLEPQLTYSIGHTPADARIQILEGWKKRLENIWDETPLYFAPSSLFDLNFQAGFLMKKEVQDEEKNKKFGLSVGHHLGKSIPTDNQIKARK

SEQ ID NO: 845791 - protein, 179 aa, Homo sapiens
ALVGCPPQTGRTGYIRENAPCTTHATPTTQGCSRSRPAHREPSSGQGSPRQPRAQPISAPDCTRAMVGRRALIVLAHSERTSFNYAMKEAAAAALKKKGWEVVESDLYAMNFNPIISRKDITGKLKDPANFQYPAESVLAYKEGHLSPDIVAEQKKLEAADLVIFQFLLHLLNLMSETW

SEQ ID NO: 845792 - protein, 339 aa, Homo sapiens; identical to SEQ ID NO: 845784

SEQ ID NO: 845793 - protein, 339 aa, Homo sapiens; identical to SEQ ID NO: 845784

SEQ ID NO: 845794 - protein, 339 aa, Homo sapiens; identical to SEQ ID NO: 845784

SEQ ID NO: 845795 - protein, 169 aa, Homo sapiens
ALVGCPPQTGRTGYIRENAPCTTHATPTTQGCSRSRPAHREPSSGQGSPRQPRAQPISAPDCTRAMVGRRALIVLAHSERTSFNYAMKEAAAAALKKKGWEVVESDLYAMNFNPIISRKDITGKLKDPANFQYPAESVLAYKEGHLSPDIVAELPPAVVWSPCHSERLV

SEQ ID NO: 845796 - protein, 301 aa, Homo sapiens; identical to SEQ ID NO: 845790

SEQ ID NO: 845797 - protein, 323 aa, Homo sapiens
ALVGCPPQTGRTGYIRENAPCTTHATPTTQGCSRSRPAHREPSSGQGSPRQPRAQPISAPDCTRAMVGRRALIVLAHSERTSFNYAMKEAAAAALKKKGWEVVESDLYAMNFNPIISRKDITGKLKDPANFQYPAESVLAYKEGHLSPDIVAEQKKLEAADLVIFQFPLQWFGVPAILKGWFERVFIGEFAYTYAAMYDKGPFRSKKAVLSITTGGSGSMYSLQGIHGDMNVILWPIQSLALLPKLECSGSIWAHYNLRLLDSSDSPVSASQLARITSTHHHAQLIFLFLVETGFCHVGQVGLKLLTSGDPLAWPPKVLGLQV

SEQ ID NO: 845798 - protein, 280 aa, Homo sapiens
ALVGCPPQTGRTGYIRENAPCTTHATPTTQGCSRSRPAHREPSSGQGSPRQPRAQPISAPDCTRAMVGRRALIVLAHSERTSFNYAMKEAAAAALKKKGWEVVESDLYAMNFNPIISRKDITGKLKDPANFQYPAESVLAYKEGHLSPDIVAEQKKLEAADLVIFQSKKAVLSITTGGSGSMYSLQGIHGDMNVILWPIQSGILHFCGFQVLEPQLTYSIGHTPADARIQILEGWKKRLENIWDETPLYFAPSSLFDLNFQAGFLMKKEVPLELGRPLEL

SEQ ID NO: 845799 - protein, 147 aa, Homo sapiens
PAAREADAGELLEPRRRRLHWAENVPLHSSLGVTERDSVPKRNNQPINHCPSLPVFEPLCQRRKPCISCAFPGLTLSSPRPRSALQVLHKACEVARRHNYFPGGVALIWATYYESCISSEQSCINEWNAMQDLESTRPDSPALFVDK

SEQ ID NO: 845800 - protein, 255 aa, Homo sapiens
TSVAPSHRAAAMALVTLQRSPTPSAASSSASNSELEAGSEEDRKLNLSLSESFFMVKGAALFLQQGSSPQGQRSLQHPHKHAGDLPQHLQVMINLLRCEDRIKLAVRLESAWADRVRYMVVVYSSGRQDTEENILLGVDFSSKESKSCTIGMVLRLWSDTKIHLDGDGGFSVSTAGRMHIFKPVSVQAMWSALQVLHKACEVARRHNYFPGGVALIWATYYESCISSEQSCINEWNAMQDLESTRPDSPALFVDK

SEQ ID NO: 845801 - protein, 286 aa, Homo sapiens
TSVAPSHRAAAMALVTLQRSPTPSAASSSASNSELEAGSEEDRKLNLSLSESFFMVKGAALFLQQGSSPQGQRSLQHPHKHAGDLPQHLQVMINLLRCEDRIKLAVRLESAWADRVRYMVVVYSSGRQDTEENILLGVDFSSKESKSCTIGMVLRLWSDTKIHLDGDGGFSVSTAGRMHIFKPVSVQAMWSALQVLHKACEVARRHNYFPGGVALIWATYYESCISSEQSCINEWNAMQDLESTRPDSPALFVDKPTEGERTERLIKAKLRSIMMSQDLENVTSKE

SEQ ID NO: 845802 - protein, 118 aa, Homo sapiens
MSSLPHRSKSCTIGMVLRLWSDTKIHLDGDGGFSVSTAGRMHIFKPVSVQAMWSALQVLHKACEVARRHNYFPGGVALIWATYYESCISSEQSCINEWNAMQDLESTRPDSPALFVDK

SEQ ID NO: 845803 - protein, 43 aa, Homo sapiens
MPILGWVRWVTPVIPALWEAEAGGSQGQEIETILANMVKPCLY

SEQ ID NO: 845804 - protein, 480 aa, Homo sapiens
MAGGGGDLSTRRLNECISPVANEMNHLPAHSHDLQRMFTEDQGVDDRLLYDIVFKHFKRNKVEISNAIKKTFPFLEGLRDRDLITNKMFEDSQDSCRNLVPVQRVVYNVLSELEKTFNLPVLEALFSDVNMQEYPDLIHIYKGFENVIHDKLPLQESEEEEREERSGLQLSLEQGTGENSFRSLTWPPSGSPSHAGTTPPENGLSEHPCETEQINAKRKDTTSDKDDSLGSQQTNEQCAQKAEPTESCEQIAVQVNNGDAGREMPCPLPCDEESPEAELHNHGIQINSCSVRLVDIKKEKPFSNSKVECQAQARTHHNQASDIIVISSEDSEGSTDVDEPLEVFISAPRSEPVINNDNPLESNDEKEGQEATCSRPQIVPEPMDFRKLSTFRESFKKRVIGQDHDFSESSEEEAPAEASSGALRSKHGEKAPMTSRSTSTWRIPSRKRRFSSSDFSDLSNGEELQETCSSSLRRGSGKED

SEQ ID NO: 845805 - protein, 885 aa, Homo sapiens
MAGGGGDLSTRRLNECISPVANEMNHLPAHSHDLQRMFTEDQGVDDRLLYDIVFKHFKRNKVEISNAIKKTFPFLEGLRDRDLITNKMFEDSQDSCRNLVPVQRVVYNVLSELEKTFNLPVLEALFSDVNMQEYPDLIHIYKGFENVIHDKLPLQESEEEEREERSGLQLSLEQGTGENSFRSLTWPPSGSPSHAGTTPPENGLSEHPCETEQINAKRKDTTSDKDDSLGSQQTNEQCAQKAEPTESCEQIAVQVNNGDAGREMPCPLPCDEESPEAELHNHGIQINSCSVRLVDIKKEKPFSNSKVECQAQARTHHNQASDIIVISSEDSEGSTDVDEPLEVFISAPRSEPVINNDNPLESNDEKEGQEATCSRPQIVPEPMDFRKLSTFRESFKKRVIGQDHDFSESSEEEAPAEASSGALRSKHGEKAPMTSRSTSTWRIPSRKRRFSSSDFSDLSNGEELQETCSSSLRRGSGSQPQEPENKKCSCVMCFPKGVPRSQEARTESSQASDMMDTMDVENNSTLEKHSGKRRKKRRHRSKVNGLQRGRKKDRPRKHLTLNNKVQKKRWQQRGRKANTRPLKRRRKRGPRIPKDENINFKQSELPVTCGEVKGTLYKERFKQGTSKKCIQSEDKKWFTPREFEIEGDRGASKNWKLSIRCGGYTLKVLMENKFLPEPPSTRKKRILESHNNTLVDPCPENSNICEVCNKWGRLFCCDTCPRSFHEHCHIPSVEANKNPWSCIFCRIKTIQERCPESQSGHQESEVLMRQMLPEEQLKCEFLLLKVYCDSKSCFFASEPYYNREGSQGPQKPMWLNKVKTSLNEQMYTRVEGFVQDMRLIFHNHKEFYREDKFTRLGIQVQDIFEKNFRNIFAIQETSKNIIMFI

SEQ ID NO: 845806 - protein, 480 aa, Homo sapiens; identical to SEQ ID NO: 845804

SEQ ID NO: 845807 - protein, 452 aa, Homo sapiens
MAGGGGDLSTRRLNECISPVANEMNHLPAHSHDLQRMFTEDQGVDDRLLYDIVFKHFKRNKVEISNAIKKTFPFLEGLRDRDLITNKMFEDSQDSCRNLVPVQRVVYNVLSELEKTFNLPVLEALFSDVNMQEYPDLIHIYKGFENVIHDKLPLQESEEEEREERSGLQLSLEQGTGENSFRSLTWPPSGSPSHAGTTPPENGLSEHPCETEQINAKRKDTTSDKDDSLGSQQTNEQCAQKAEPTESCEQIAVQVNNGDAGREMPCPLPCDEESPEAELHNHGIQINSCSVRLVDIKKEKPFSNSKVECQAQARTHHNQASDIIVISSEDSEGSTDVDEPLEVFISAPRSEPEPMDFRKLSTFRESFKKRVIGQDHDFSESSEEEAPAEASSGALRSKHGEKAPMTSRSTSTWRIPSRKRRFSSSDFSDLSNGEELQETCSSSLRRGSGKED

SEQ ID NO: 845808 - protein, 493 aa, Homo sapiens
RSEQLLSQQPRVEDGGGGGTLSTRRLNECISPVANEMNHLPAHSHDLQRMFTEDQGVDDRLLYDIVFKHFKRNKVEISNAIKKTFPFLEGLRDRDLITNKMFEDSQDSCRNLVPVQRVVYNVLSELEKTFNLPVLEALFSDVNMQEYPDLIHIYKGFENVIHDKLPLQESEEEEREERSGLQLSLEQGTGENSFRSLTWPPSGSPSHAGTTPPENGLSEHPCETEQINAKRKDTTSDKDDSLGSQQTNEQCAQKAEPTESCEQIAVQVNNGDAGREMPCPLPCDEESPEAELHNHGIQINSCSVRLVDIKKEKPFSNSKVECQAQARTHHNQASDIIVISSEDSEGSTDVDEPLEVFISAPRSEPVINNDNPLESNDEKEGQEATCSRPQIVPEPMDFRKLSTFRESFKKRVIGQDHDFSESSEEEAPAEASSGALRSKHGEKAPMTSRSTSTWRIPSRKRRFSSSDFSDLSNGEELQETCSSSLRRGSGKED

SEQ ID NO: 845809 - protein, 859 aa, Homo sapiens
MAGGGGDLSTRRLNECISPVANEMNHLPAHSHDLQRMFTEDQGVDDRLLYDIVFKHFKRNKVEISNAIKKTFPFLEGLRDRDLITNKMFEDSQDSCRNLVPVQRVVYNVLSELEKTFNLPVLEALFSDVNMQEYPDLIHIYKGFENVIHDKLPLQESEEEEREERSGLQLSLEQGTGENSFRSLTWPPSGSPSHAGTTPPENGLSEHPCETEQINAKRKDTTSDKDDSLGSQQTNEQCAQKAEPTESCEQIAVQVNNGDAGREMPCPLPCDEESPEAELHNHGIQINSCSVRLVDIKKEKPFSNSKVECQAQARTHHNQASDIIVISSEDSEGSTDVDEPLEVFISAPRSEPVINNDNPLESNDEKEGQEATCSRPQIVPEPMDFRKLSTFRESFKKRVIGQDHDFSESSEEEAPAEASSGALRSKHGEKAPMTSRSTSTWRIPSRKRRFSSSDFSDLSNGEELQETCSSSLRRGSGVPRSQEARTESSQASDMMDTMDVENNSTLEKHSGKRRKKRRHRSKVNGLQRGRKKDRPRKHLTLNNKVQKKRWQQRGRKANTRPLKRRRKRGPRIPKDENINFKQSELPVTCGEVKGTLYKERFKQGTSKKCIQSEDKKWFTPREFEIEGDRGASKNWKLSIRCGGYTLKVLMENKFLPEPPSTRKKRILESHNNTLVDPCEEHKKKNPDASVKFSEFLKKCSETWKTIFAKEKGKFEDMAKADKAHYEREMKTYIPPKGEKKKKFKDPNAPKRPPLAFFLFCSEYRPKIKGEHPGLSIDDVVKKLAGMWNNTAAADKQFYEKKAAKLKEKYKKDIAAYRAKGKPNSAKKRVVKAEKSKKKKEEEEDEEDEQEEENEEDDDK

SEQ ID NO: 845810 - protein, 217 aa, Homo sapiens [sequence omitted]

SEQ ID NO: 845811 - protein, 415 aa, Homo sapiens
MAGGGGDLSTRRLNECISPVANEMNHLPAHSHDLQRMFTEDQGVDDRLLYDIVFKHFKRNKVEISNAIKKTFPFLEGLRDRDLITNKMFEDSQDSCRNLVPVQRVVYNVLSELEKTFNLPVLEALFSDVNMQEYPDLIHIYKGFENVIHDKLPLQESEEEEREERSGLQLSLEQGTGENSFRSLTWPPSGSPSHAGTTPPENGLSEHPCETEQINAKRKDTTSDKDDSLGSQQTNEQCAQKAEPTESCEQIAVQVNNGDAGREMPCPLPCDEESPEAELHNHGIQINSCSVRLVDIKKEKPFSNSKVECQAQARTHHNQASDIIVISSEDSEGSTDVDEPLEVFISAPRSEPVINNDNPLESNDEKEGQEATCSRPQIVPGKNIRVATRDCRISRVQIQSSVFLINFILSGLLMP

SEQ ID NO: 845812 - protein, 332 aa, Homo sapiens
MAGGGGDLSTRRLNECISPVANEMNHLPAHSHDLQRMFTEDQGVDDRLLYDIVFKHFKRNKVEISNAIKKTFPFLEGLRDRDLITNKMFEDSQDSCRNLVPVQRVVYNVLSELEKTFNLPVLEALFSDVNMQEYPDLIHIYKGFENVIHDKLPLQESEEEEREERSGLQLSLEQGTGENSFRSLTWPPSGSPSHAGTTPPENGLSEHPCETEQINAKRKDTTSDKDDSLGSQQTNEQCAQKAEPTESCEQIAVQVNNGDAGREMPCPLPCDEESPEAELHNHGIQINSCSVRLVDIKKEKPFSNSKVECQAQARTHHNQASDIIGKADWESL

SEQ ID NO: 845813 - protein, 285 aa, Homo sapiens
MAGGGGDLSTRRLNECISPVANEMNHLPAHSHDLQRMFTEDQGVDDRLLYDIVFKHFKRNKVEISNAIKKTFPFLEGLRDRDLITNKMFEDSQDSCRNLVPVQRVVYNVLSELEKTFNLPVLEALFSDVNMQEYPDLIHIYKGFENVIHDKLPLQESEEEEREERSGLQLSLEQGTGENSFRSLTWPPSGSPSHAGTTPPENGLSEHPCETEQINAKRKDTTSDKDDSLGSQQTNEQCAQKAEPTGKTDWVGMNGEEPRGPGWWQRKSLMHNTRRHLFNKQGKIT

SEQ ID NO: 845814 - protein, 113 aa, Homo sapiens
RGRHGRGVKKKIREPRYSQEEMGRETHQDKERYKETPSLETEAEAGEMAEQRGKMRSKMRVKEKNRMRVGVRTVSVDGHNCLLCVNFISFWLRTWNKLQVACIQGTPQGLELT

SEQ ID NO: 845815 - protein, 879 aa, Homo sapiens
MAGGGGDLSTRRLNECISPVANEMNHLPAHSHDLQRMFTEDQGVDDRLLYDIVFKHFKRNKVEISNAIKKTFPFLEGLRDRDLITNKMFEDSQDSCRNLVPVQRVVYNVLSELEKTFNLPVLEALFSDVNMQEYPDLIHIYKGFENVIHDKLPLQESEEEEREERSGLQLSLEQGTGENSFRSLTWPPSGSPSHAGTTPPENGLSEHPCETEQINAKRKDTTSDKDDSLGSQQTNEQCAQKAEPTESCEQIAVQVNNGDAGREMPCPLPCDEESPEAELHNHGIQINSCSVRLVDIKKEKPFSNSKVECQAQARTHHNQASDIIVISSEDSEGSTDVDEPLEVFISAPRSEPVINNDNPLESNDEKEGQEATCSRPQIVPEPMDFRKLSTFRESFKKRVIGQDHDFSESSEEEAPAEASSGALRSKHGEKAPMTSRSTSTWRIPSRKRRFSSSDFSDLSNGEELQETCSSSLRRGSGSQPQEPENKKCSCVMCFPKGVPRSQEARTESSQASDMMDTMDVENNSTLEKHSGKRRKKRRHRSKVNGLQRGRKKDRPRKHLTLNNKVQKKRWQQRGRKANTRPLKRRRKRGPRIPKDENINFKQSELPVTCGEVKGTLYKERFKQGTSKKCIQSEDKKWFTPREFEIEGDRGASKNWKLSIRCGGYTLKVLMENKFLPEPPSTRKKRILESHNNTLVDPCEEHKKKNPDASVKFSEFLKKCSETWKTIFAKEKGKFEDMAKADKAHYEREMKTYIPPKGEKKKKFKDPNAPKRPPLAFFLFCSEYRPKIKGEHPGLSIDDVVKKLAGMWNNTAAADKQFYEKKAAKLKEKYKKDIAAYRAKGKPNSAKKRVVKAEKSKKKKEEEEDEEDEQEEENEEDDDK

SEQ ID NO: 845816 - protein, 688 aa, Homo sapiens
MAGGGGDLSTRRLNECISPVANEMNHLPAHSHDLQRMFTEDQGVDDRLLYDIVFKHFKRNKVEISNAIKKTFPFLEGLRDRDLITNKMFEDSQDSCRNLVPVQRVVYNVLSELEKTFNLPVLEALFSDVNMQEYPDLIHIYKGFENVIHDKLPLQESEEEEREERSGLQLSLEQGTGENSFRSLTWPPSGSPSHAGTTPPENGLSEHPCETEQINAKRKDTTSDKDDSLGSQQTNEQCAQKAEPTESCEQIAVQVNNGDAGREMPCPLPCDEESPEAELHNHGIQINSCSVRLVDIKKEKPFSNSKVECQAQARTHHNQASDIIVISSEDSEGSTDVDEPLEVFISAPRSEPVINNDNPLESNDEKEGQEATCSRPQIVPEPMDFRKLSTFRESFKKRVIGQDHDFSESSEEEAPAEASSGALRSKHGEKAPMTSRSTSTWRIPSRKRRFSSSDFSDLSNGEELQETCSSSLRRGSGSQPQEPENKKCSCVMCFPKGVPRSQEARTESSQASDMMDTMDVENNSTLEKHSGKRRKKRRHRSKVNGLQRGRKKDRPRKHLTLNNKVQKKRWQQRGRKANTRPLKRRRKRGPRIPKDENINFKQSELPVTCGEVKGTLYKERFKQGTSKKCIQSEDKKWFTPREFEIEGDRGASKNWKLSIRCGGYTLKVLMENKFLPEPPSTRKKVMIK

SEQ ID NO: 845817 - protein, 455 aa, Homo sapiens
MAGGGGDLSTRMFTEDQGVDDRLLYDIVFKHFKRNKVEISNAIKKTFPFLEGLRDRDLITNKMFEDSQDSCRNLVPVQRVVYNVLSELEKTFNLPVLEALFSDVNMQEYPDLIHIYKGFENVIHDKLPLQESEEEEREERSGLQLSLEQGTGENSFRSLTWPPSGSPSHAGTTPPENGLSEHPCETEQINAKRKDTTSDKDDSLGSQQTNEQCAQKAEPTESCEQIAVQVNNGDAGREMPCPLPCDEESPEAELHNHGIQINSCSVRLVDIKKEKPFSNSKVECQAQARTHHNQASDIIVISSEDSEGSTDVDEPLEVFISAPRSEPVINNDNPLESNDEKEGQEATCSRPQIVPEPMDFRKLSTFRESFKKRVIGQDHDFSESSEEEAPAEASSGALRSKHGEKAPMTSRSTSTWRIPSRKRRFSSSDFSDLSNGEELQETCSSSLRRGSGKED

SEQ ID NO: 845818 - protein, 203 aa, Homo sapiens
MAGGGGDLSTRRLNECISPVANEMNHLPAHSHDLQRMFTEDQGVDDRLLYDIVFKHFKRNKVEISNAIKKTFPFLEGLRDRDLITNKMFEDSQDSCRNLVPVQRVVYNVLSELEKTFNLPVLEALFSDVNMQEYPDLIHIYKGFENVIHDKLPLQESEEEEREERSGLQLSLEQGTGENSFRSLTWPPSGSPSHAGLFLFTTL

SEQ ID NO: 845819 - protein, 831 aa, Homo sapiens
MAGGGGDLSTRRLNECISPVANEMNHLPAHSHDLQRMFTEDQGVDDRLLYDIVFKHFKRNKVEISNAIKKTFPFLEGLRDRDLITNKMFEDSQDSCRNLVPVQRVVYNVLSELEKTFNLPVLEALFSDVNMQEYPDLIHIYKGFENVIHDKLPLQESEEEEREERSGLQLSLEQGTGENSFRSLTWPPSGSPSHAGTTPPENGLSEHPCETEQINAKRKDTTSDKDDSLGSQQTNEQCAQKAEPTESCEQIAVQVNNGDAGREMPCPLPCDEESPEAELHNHGIQINSCSVRLVDIKKEKPFSNSKVECQAQARTHHNQASDIIVISSEDSEGSTDVDEPLEVFISAPRSEPEPMDFRKLSTFRESFKKRVIGQDHDFSESSEEEAPAEASSGALRSKHGEKAPMTSRSTSTWRIPSRKRRFSSSDFSDLSNGEELQETCSSSLRRGSGVPRSQEARTESSQASDMMDTMDVENNSTLEKHSGKRRKKRRHRSKVNGLQRGRKKDRPRKHLTLNNKVQKKRWQQRGRKANTRPLKRRRKRGPRIPKDENINFKQSELPVTCGEVKGTLYKERFKQGTSKKCIQSEDKKWFTPREFEIEGDRGASKNWKLSIRCGGYTLKVLMENKFLPEPPSTRKKRILESHNNTLVDPCEEHKKKNPDASVKFSEFLKKCSETWKTIFAKEKGKFEDMAKADKAHYEREMKTYIPPKGEKKKKFKDPNAPKRPPLAFFLFCSEYRPKIKGEHPGLSIDDVVKKLAGMWNNTAAADKQFYEKKAAKLKEKYKKDIAAYRAKGKPNSAKKRVVKAEKSKKKKEEEEDEEDEQEEENEEDDDK

SEQ ID NO: 845820 - protein, 462 aa, Homo sapiens
MAGGGGDLSTRRLNECISPVANEMNHLPAHSHDLQRMFTEDQGVDDRLLYDIVFKHFKRNKVEISNAIKKTFPFLEGLRDRDLITNKMFEDSQDSCRNLVPVQRVVYNVLSELEKTFNLPVLEALFSDVNMQEYPDLIHIYKGFENVIHDKLPLQESEEEEREERSGLQLSLEQGTGENSFRSLTWPPSGSPSHAGTTPPENGLSEHPCETEQINAKRKDTTSDKDDSLGSQQTNEQCAQKAEPTESCEQIAVQVNNGDAGREMPCPLPCDEESPEAELHNHGIQINSCSVRLVDIKKEKPFSNSKVECQAQARTHHNQASDIIVISSEDSEGSTDVDEPLEVFISAPRSEPVINNDNPLESNDEKEGQEATCSRPQIVPEPMDFRKLSTFRESFKKRVIGQDHDFSESSEEEAPAEASSGALRSKHGEKAPMTSRSTSTWRIPSRKRLKKKKEEETMSSPA

SEQ ID NO: 845821 - protein, 278 aa, Homo sapiens
MPDQALQQMLDRSCWVCFATDEDDRTAEWVRPCRCRGSTKWVHQACLQRWVDEKQRGNSTARVACPQCNAEYLIVFPKLGPVVYVLDLADRLISKACPFAAAGIMVGSIYWTAVTYGAVTVMQVVGHKEGLDVMERADPLFLLIGLPTIPVMLILGKMIRWEDYVLRLWRKYSNKLQILNSIFPGIGCPVPRIPAEANPLADHVSATRILCGALVFPTIATIVGKLMFSSVNSNLQRTILGGIAFVAIKGAFKVYFKQQQYLRQAHRKILNYPEQEEA

SEQ ID NO: 845822 - protein, 278 aa, Homo sapiens; identical to SEQ ID NO: 845821

SEQ ID NO: 845823 - protein, 235 aa, Homo sapiens
MPDQALQQMLDRSCWVCFATDEDDRTAEWVRPCRCRGSTKWVHQACLQRWVDEKQRGNSTARVACPQCNAEYLIVFPKLGPVVYVLDLADRLISKACPFAAAGIMVGSIYWTAVTYGAVTVMQVVGHKEGLDVMERADPLFLLIGLPTIPVMLILGKMIRWEDYVLRLWRKYSNKLQILNSIFPGIGCPVPRIPAEANPLADHVSATRILCGALVFPTIATIVGWNCVCCHKRSI

SEQ ID NO: 845824 - protein, 397 aa, Homo sapiens
MDRNLGPTDGNPGRDRRLPASGSSSSLSAASAGLPQALHRRRQASGAAPGSWVTGSRLPPDCGLLRRLSVLLSLGLALSGSTGEGRVRRLRGRCRTKPYSRCWTGTGSCGGDREPPTLALALPAPALEALGSCWVCFATDEDDRTAEWVRPCRCRGSTKWVHQACLQRWVDEKQRGNSTARVACPQCNAEYLIVFPKLGPVVYVLDLADRLISKACPFAAAGIMVGSIYWTAVTYGAVTVMQVVGHKEGLDVMERADPLFLLIGLPTIPVMLILGKMIRWEDYVLRLWRKYSNKLQILNSIFPGIGCPVPRIPAEANPLADHVSATRILCGALVFPTIATIVGKLMFSSVNSNLQRTILGGIAFVAIKGAFKVYFKQQQYLRQAHRKILNYPEQEEA

SEQ ID NO: 845825 - protein, 122 aa, Homo sapiens [sequence omitted]

SEQ ID NO: 845826 - protein, 115 aa, Homo sapiens
VPRERASTALFLKSHMSLGCLPWFSLSKLACAYLLYFVQSVSSGGGKTWEEWGLNPSWQNTVEASKVFCSSLILMNLLCCFDSIINALVETCDKLLLLYFLRNIIKHLGQGKSSR

SEQ ID NO: 845827 - protein, 244 aa, Homo sapiens [sequence omitted]

SEQ ID NO: 845828 - protein, 253 aa, Homo sapiens
  misc_feature (6)..(6): Xaa can be any naturally occurring amino acid
CRLYPXGLWDIVDPRRSHPEGKSGGKNKQAGRADLVATDSGAAHPAASWKAARKTFFPPGGRKREGAGQTAAGAEALVRAGCAASSGDGPKTTSPRLLWAALRRNPGAHGGGDSYLTKVAPPPAATRRPRSMDRNLGPTDGNPGRDRRLPASGSSSSLSAASAGLPQALHRRRQASGAAPGSWVTGSRLPPDCGLLRRLSVLLSLGLALSGSTGEGRVRRLRGRCRTKPYSRCWTEVAGFVLLLMKMIEQLNG

SEQ ID NO: 845829 - protein, 278 aa, Homo sapiens; identical to SEQ ID NO: 845821

SEQ ID NO: 845830 - protein, 278 aa, Homo sapiens; identical to SEQ ID NO: 845821

SEQ ID NO: 845831 - protein, 204 aa, Homo sapiens
MHKQRGPVVYVLDLADRLISKACPFAAAGIMVGSIYWTAVTYGAVTVMQVVGHKEGLDVMERADPLFLLIGLPTIPVMLILGKMIRWEDYVLRLWRKYSNKLQILNSIFPGIGCPVPRIPAEANPLADHVSATRILCGALVFPTIATIVGKLMFSSVNSNLQRTILGGIAFVAIKGAFKVYFKQQQYLRQAHRKILNYPEQEEA

SEQ ID NO: 845832 - protein, 485 aa, Homo sapiens
SGVCAGLGGACAGPVGSRREPVPRPEPRESSEDSAEAAVSPWASPAAAMGIKFLEVIKPFCAVLPEIQKPERKIQFREKVLWTAITLFIFLVCCQIPLFGIMSSDSADPFYWMRVILASNRGTLMELGISPIVTSGLIMQLLAGAKIIEVGDTPKDRALFNGAQKLFGMIITIGQAIVYVMTGMYGDPAEMGAGICLLIIIQLFVAGLIVLLLDELLQKGYGLGSGISLFIATNICETIVWKAFSPTTINTGRGTEFEGAVIALFHLLATRTDKVRALREAFYRQNLPNLMNLIATVFVFAVVIYFQGFRVDLPIKSARYRGQYSSYPIKLFYTSNIPIILQSALVSNLYVISQMLSVRFSGNFLVNLLGQWADVSGGGPARSYPVGGLCYYLSPPESMGAIFEDPVHVVVYIIFMLGSCAFFSKTWIEVSGSSAKDVAKQLKEQQMVMRGHRDTSMVHELNRPKVKLRRWKGEGRHFTKRILFY

SEQ ID NO: 845833 - protein, 524 aa, Homo sapiens
SGVCAGLGGACAGPVGSRREPVPRPEPRESSEDSAEAAVSPWASPAAAMGIKFLEVIKPFCAVLPEIQKPERKIQFREKVLWTAITLFIFLVCCQIPLFGIMSSDSADPFYWMRVILASNRGTLMELGISPIVTSGLIMQLLAGAKIIEVGDTPKDRALFNGAQKLFGMIITIGQAIVYVMTGMYGDPAEMGAGICLLIIIQLFVAGLIVLLLDELLQKGYGLGSGISLFIATNICETIVWKAFSPTTINTGRGTEFEGAVIALFHLLATRTDKVRALREAFYRQNLPNLMNLIATVFVFAVVIYFQGFRVDLPIKSARYRGQYSSYPIKLFYTSNIPIILQSALVSNLYVISQMLSVRFSGNFLVNLLGQWADVSGGGPARSYPVGGLCYYLSPPESMGAIFEDPVHVVVYIIFMLGSCAFFSKTWIEVSGSSAKDVAKQLKEQQMVMRGHRDTSMVHELNRYIPTAAAFGGLCIGALSVLADFLGAIGSGTGILLAVTIIYQYFEIFVKEQAEVGGMGALFF

SEQ ID NO: 845834 - protein, 532 aa, Homo sapiens
SGVCAGLGGACAGPVGSRREPVPRPEPRESSEDSAEAAVSPWASPAAAMGIKFLEVIKPFCAVLPEIQKPERKIQFREKVLWTAITLFIFLVCCQIPLFGIMSSDSADPFYWMRVILASNRGTLMELGISPIVTSGLIMQLLAGAKIIEVGDTPKDRALFNGAQKLFGMIITIGQAIVYVMTGMYGDPAEMGAGICLLIIIQLFVAGLIVLLLDELLQKGYGLGSGISLFIATNICETIVWKAFSPTTINTGRGTEFEGAVIALFHLLATRTDKVRALREAFYRQNLPNLMNLIATVFVFAVVIYFQVSITFFTKGFRVDLPIKSARYRGQYSSYPIKLFYTSNIPIILQSALVSNLYVISQMLSVRFSGNFLVNLLGQWADVSGGGPARSYPVGGLCYYLSPPESMGAIFEDPVHVVVYIIFMLGSCAFFSKTWIEVSGSSAKDVAKQLKEQQMVMRGHRDTSMVHELNRYIPTAAAFGGLCIGALSVLADFLGAIGSGTGILLAVTIIYQYFEIFVKEQAEVGGMGALFF

SEQ ID NO: 845835 - protein, 234 aa, Homo sapiens
MNLIATVFVFAVVIYFQGFRVDLPIKSARYRGQYSSYPIKLFYTSNIPIILQSALVSNLYVISQMLSVRFSGNFLVNLLGQWADVSGGGPARSYPVGGLCYYLSPPESMGAIFEDPVHVVVYIIFMLGSCAFFSKTWIEVSGSSAKDVAKQLKEQQMVMRGHRDTSMVHELNRYIPTAAAFGGLCIGALSVLADFLGAIGSGTGILLAVTIIYQYFEIFVKEQAEVGGMGALFF

SEQ ID NO: 845836 - protein, 524 aa, Homo sapiens; identical to SEQ ID NO: 845833

SEQ ID NO: 845837 - protein, 207 aa, Homo sapiens
SGVCAGLGGACAGPVGSRREPVPRPEPRESSEDSAEAAVSPWASPAAAMGIKFLEVIKPFCAVLPEIQKPERKIQFREKVLWTAITLFIFLVCCQIPLFGIMSSDSADPFYWMRVILASNRGTLMELGISPIVTSGLIMQLLAGAKIIEVGDTPKDRALFNGAQKLFGMIITIGQAIVYVMTGMYGDPAEMGAGICLLIIIQDQHSP

SEQ ID NO: 845838 - protein, 515 aa, Homo sapiens
  misc_feature (7)..(8): Xaa can be any naturally occurring amino acid
  misc_feature (13)..(13): Xaa can be any naturally occurring amino acid
  misc_feature (16)..(17): Xaa can be any naturally occurring amino acid
SIYRYTXXWNTVXVLXXSSVPSDPDADRRARSPWGSQQQHGIKFLEVIKPFCAVLPEIQKPERKIQFREKVLWTAITLFIFLVCCQIPLFGIMSSDSADPFYWMRVILASNRGTLMELGISPIVTSGLIMQLLAGAKIIEVGDTPKDRALFNGAQKLFGMIITIGQAIVYVMTGMYGDPAEMGAGICLLIIIQLFVAGLIVLLLDELLQKGYGLGSGISLFIATNICETIVWKAFSPTTINTGRGTEFEGAVIALFHLLATRTDKVRALREAFYRQNLPNLMNLIATVFVFAVVIYFQGFRVDLPIKSARYRGQYSSYPIKLFYTSNIPIILQSALVSNLYVISQMLSVRFSGNFLVNLLGQWADVSGGGPARSYPVGGLCYYLSPPESMGAIFEDPVHVVVYIIFMLGSCAFFSKTWIEVSGSSAKDVAKQLKEQQMVMRGHRDTSMVHELNRYIPTAAAFGGLCIGALSVLADFLGAIGSGTGILLAVTIIYQYFEIFVKEQAEVGGMGALFF

SEQ ID NO: 845839 - protein, 75 aa, Homo sapiens
EYTSAEYTSAEYTSAEYSAEYTSPGPATGCLRVLGTYCLHCCHFSLGLITVVWVMPFLPPGLPASVSPLLLVLSP

SEQ ID NO: 845840 - protein, 234 aa, Homo sapiens
MAVMDLSSPWALTKQDSACFHLRNAEEERMIAVFLTTWLQEPMTFKDVAVEFTQEEWMMLDSAQRSLYRDVMLENYRNLTSVEYQLYRLTVISPLDQEEIRNMKKRIPQAICPDQKIQPKTKESTVQKILWEEPSNAVKMIKLTMHNWSSTLREDWECHKIRKQHKIPGGHWRQMIYAPKKTVPQELFRDYHELEENSKLGSKLIFSQSIFTSKHCQKCYSEIGCLKHNSIINN

SEQ ID NO: 845841 - protein, 133 aa, Homo sapiens
MAAVILESIFLKRSQQKKKTSPLNFKKRLFLLTVHKLSYYEYDFERGRRGSKKGSIDVEKITCVETVVPEKNPPPERQIPVRRDQCLRWGTADLKKFATFKFSVNRLVMLCNVEHGQVSFKNSSLYHIGYKES

SEQ ID NO: 845842 - protein, 541 aa, Homo sapiens
MSDVISLFFPATVIRYNSDLVQKYHPCFWIDGQYLCCSQTAKNAMGCQILENRNGSLKPGSSHRKTKKPLPPTPEEDQILKKPLPPEPAAAPVSTSELKKVVALYDYMPMNANDLQLRKGDEYFILEESNLPWWRARDKNGQEGYIPSNYVTEAEDSIEMYEWYSKHMTRSQAEQLLKQEGKEGGFIVRDSSKAGKYTVSVFAKSTGDPQGVIRHYVVCSTPQSQYYLAEKHLFSTIPELINYHQHNSAGLISRLKYPVSQQNKNAPSTAGLGYGSWEIDPKDLTFLKELGTGQFGVVKYGKWRGQYDVAIKMIKEGSMSEDEFIEEAKVMMNLSHEKLVQLYGVCTKQRPIFIITEYMANGCLLNYLREMRHRFQTQQLLEMCKDVCEAMEYLESKQFLHRDLAARNCLVNDQGVVKVSDFGLSRYVLDDEYTSSVGSKFPVRWSPPEVLMYSKFSSKSDIWAFGVLMWEIYSLGKMPYERFTNSETAEHIAQGLRLYRPHLASEKVYTIMYSCWHEKADERPTFKILLSNILDVMDEES

SEQ ID NO: 845843 - protein, 648 aa, Homo sapiens
MAAVILESIFLKRSQQKKKTSPLNFKKRLFLLTVHKLSYYEYDFERGRRGSKKGSIDVEKITCVETVVPEKNPPPERQIPRRGEESSEMEQISIIERFPYPFQVVYDEGPLYVFSPTEELRKRWIHQLKNVIRYNSDLVQKYHPCFWIDGQYLCCSQTAKNAMGCQILENRNGSLKPGSSHRKTKKPLPPTPEEDQILKKPLPPEPAAAPVSTSELKKVVALYDYMPMNANDLQLRKGDEYFILEESNLPWWRARDKNGQEGYIPSNYVTEAEDSIEMYEWYSKHMTRSQAEQLLKQEGKEGGFIVRDSSKAGKYTVSVFAKSTGDPQGVIRHYVVCSTPQSQYYLAEKHLFSTIPELINYHQHNSAGLISRLKYPVSQQNKNAPSTAGLGYGSWEIDPKDLTFLKELGTGQFGVVKYGKWRGQYDVAIKMIKEGSMSEDEFIEEAKVMMNLSHEKLVQLYGVCTKQRPIFIITEYMANGCLLNYLREMRHRFQTQQLLEMCKDVCEAMEYLESKQFLHRDLAARNCLVNDQGVVKVSDFGLSRYVLDDEYTSSVGSKFPVRWSPPEVLMYSKFSSKSDIWAFGVLMWEIYSLGKMPYERFTNSETAEHIAQGLRLYRPHLASEKVYTIMYSCWHEVSALLGSLKLFP

SEQ ID NO: 845844 - protein, 659 aa, Homo sapiens
MAAVILESIFLKRSQQKKKTSPLNFKKRLFLLTVHKLSYYEYDFERGRRGSKKGSIDVEKITCVETVVPEKNPPPERQIPRRGEESSEMEQISIIERFPYPFQVVYDEGPLYVFSPTEELRKRWIHQLKNVIRYNSDLVQKYHPCFWIDGQYLCCSQTAKNAMGCQILENRNGSLKPGSSHRKTKKPLPPTPEEDQILKKPLPPEPAAAPVSTSELKKVVALYDYMPMNANDLQLRKGDEYFILEESNLPWWRARDKNGQEGYIPSNYVTEAEDSIEMYEWYSKHMTRSQAEQLLKQEGKEGGFIVRDSSKAGKYTVSVFAKSTGDPQGVIRHYVVCSTPQSQYYLAEKHLFSTIPELINYHQHNSAGLISRLKYPVSQQNKNAPSTAGLGYGSWEIDPKDLTFLKELGTGQFGVVKYGKWRGQYDVAIKMIKEGSMSEDEFIEEAKVMMNLSHEKLVQLYGVCTKQRPIFIITEYMANGCLLNYLREMRHRFQTQQLLEMCKDVCEAMEYLESKQFLHRDLAARNCLVNDQGVVKVSDFGLSRYVLDDEYTSSVGSKFPVRWSPPEVLMYSKFSSKSDIWAFGVLMWEIYSLGKMPYERFTNSETAEHIAQGLRLYRPHLASEKVYTIMYSCWHEKADERPTFKILLSNILDVMDEES

SEQ ID NO: 845845 - protein, 112 aa, Homo sapiens
MASWSIQQMVIGCPLCGRHCSGGEHTGELQKEEAMAAVILESIFLKRSQQKKKTSPLNFKKRLFLLTVHKLSYYEYDFERGKRGNKKGSEMLKKSLCSNSESWNLLHKAIVW

SEQ ID NO: 845846 - protein, 525 aa, Homo sapiens [sequence omitted]

SEQ ID NO: 845847 - protein, 119 aa, Homo sapiens
MQHCPGPSSCSFRGLPPPPAREWGLTRAGGLTLSPPAPSKSTLTTWTLTKSMLLPYLLAVGLRAPPANISAPLKMDPTCPRQKPPAWFWSAPSQRAGSCYTLTDTRTPASLRKRSDNRA

SEQ ID NO: 845848 - protein, 523 aa, Homo sapiens
FCMHHGRRWSVREEGGELAGPRGGDGGGGGLRRPERRRWRRRPRRLGVFGRAAALFSQMSYEEMMTLTEQHLESQNVTKGARHKIALSIQKLRERQSVLKSLEKDVLEGGNLRNALQELQQIIITPIKAYSVLQATVAAATTTPTAKDGAPGEPPLPGAEPPLAHPGTDKGTEARAGTMWRRWPSPPPSPDPGPRPGTMMFRDQVGILAGWFKGWNECEQTVALLSLLKRVTRTQARFLQLCLEHSLADCNDIHLLESEANSAAIVSQWQQESKEKVVSLLLSHLPLLQPGNTEAKSEYMRLLQKVLAYSIESNAFIEESRQLLSYALIHPATTLEDRNALALWLSHLEERLASGFRSRPEPSYHSRQGSDEWGGPAELGPGEAGPGWQDKPPRENGHVPFHPSSSVPPAINSIGSNANTGLPCQIHPSPLKRSMSLIPTSPQVPGEWPSPEELGARAAFTTPDHAPLSPQSSVASSGSEQTEEQGSSRNTFQEDGSGMKDVPSWLKSLRLHKYAALFSQNQL

SEQ ID NO: 845849 - protein, 482 aa, Homo sapiens
PVLGLEHANTGLPCQIHPSPLKRSMSLIPTSPQVPGEWPSPEELGARAAFTTPDHAPLSPQSSVASSGSEQTEEQGSSRNTFQEDGSGMKDVPSWLKSLRLHKYAALFSQMSYEEMMTLTEQHLESQNVTKGARHKIALSIQKLRERQSVLKSLEKDVLEGGNLRNALQELQQIIITPIKAYSVLQATVAAATTTPTAKDGAPGEPPLPGAEPPLAHPGTDKGTEAKDPPAVENYPPPPAPAPTDGSEPAPAPVADGDIPSQFTRVMGKVCTQLLVSRPDEENITSYLQLIEKCLTHEAFTETQKKRLLSWKQQVLKLLRTFPRKAALEMQNYRQQKGWAFGSNSLPIAGSVGMGVARRTQRQFPMPPRALPPGRMGLLSPSGIGGVSPRHALTSPSLGGQGRQNLWFANPGGSNSMPSQSRSSVQRTHSLPVHSSPQAILMFPPDCPVPGPDLEINPTLESLCLSMTEHALGDGTDKTSTI

SEQ ID NO: 845850 - protein, 406 aa, Homo sapiens
FCMHHGRRWSVREEGGELAGPRGGDGGGGGLRRPERRRWRRRPRRLGVFGRAAALFSQMSYEEMMTLTEQHLESQNVTKGARHKIALSIQKLRERQSVLKSLEKDVLEGGNLRNALQELQQIIITPIKAYSVLQATVAAATTTPTAKDGAPGEPPLPGAEPPLAHPGTDKGTEARAGTMWRRWPSPPPSPDPGPRPGTMMFRDQVGILAGWFKGWNECEQTVALLSLLKRVTRTQARFLQLCLEHSLADCNDIHLLESEANSAAIVSQWQQESKEKVVSLLLSHLPLLQPGNTEAKSEYMRLLQKVLAYSIESNAFIEESRQLLSYALIHPATTLEDRNALALWLSHLEERLASGFRSRPEPSYHSRQGSDEWGGPAELGPGEAGPGWQDKPPRENGHVPFHPSNR

SEQ ID NO: 845851 - protein, 475 aa, Homo sapiens
PVLGLEHANTGLPCQIHPSPLKRSMSLIPTSPQVPGEWPSPEELGARAAFTTPDHAPLSPQSSVASSGSEQTEEQGSSRNTFQEDGSGMKDVPSWLKSLRLHKYAALFSQMSYEEMMTLTEQHLESQNVTKGARHKIALSIQKLRERQSVLKSLEKDVLEGGNLRNALQELQQIIITPIKAYSVLQATVAAATTTPTAKDGAPGEPPLPGAEPPLAHPGTDKGTEAKDPPAVENYPPPPAPAPTDGSEPAPAPVADGDIPSQFTRVMGKVCTQLLVSRPDEENITSYLQLIEKCLTHEAFTETQKKRLLSWKQQVLKLLRTFPRKAALEMQNYRQQKGWAFGSNSLPIAGSVGMGVARRTQRQFPMPPRALPPGRMGLLSPSGIGGVSPRHALTSPSLGGQGRQNLWFANPGGSNSMPSQSRSSVQRTHSLPVHSSPQAILMFPPGEVPHPWDSAWPTSSADLSFFSWVSCPLFF

SEQ ID NO: 845852 - protein, 37 aa, Homo sapiens
MRLLQKVLAYSIESNAFIEESRQLLSYALIHPATTLE

SEQ ID NO: 845853 - protein, 90 aa, Homo sapiens
MASELAMSNSDMPTSPLAMEYVNDFDLMKFEVNKEPVETVRIISQCGRLIAGGSLSSTPMSTPYRWVPPSPSFSAPSRVWGRQQTALLEE

SEQ ID NO: 845854 - protein, 458 aa, Homo sapiens
PVLGLEHANTGLPCQIHPSPLKRSMSLIPTSPQVPGEWPSPEELGARAAFTTPDHAPLSPQSSVASSGSEQTEEQGSSRNTFQEDGSGMKDVPSWLKSLRLHKYAALFSQMSYEEMMTLTEQHLESQNVTKGARHKIALSIQKLRERQSVLKSLEKDVLEGGNLRNALQELQQIIITPIKAYSVLQATVAAATTTPTAKDGAPGEPPLPGAEPPLAHPGTDKGTEASSRDHVTALALATAVPRPWPQARHHDVPDQVGILAGWFKGWNECEQTVALLSLLKRVTRTQARFLQLCLEHSLADCNDIHLLESEANSAAIVSQWQQESKEKVVSLLLSHLPLLQPGNTEAKSEYMRLLQKVLAYSIESNAFIEESRQLLSYALIHPATTLEDRNALALWLSHLEERLASGFRSRPEPSYHSRQGSDEWGGPAELGPGEAGPGWQDKPPRENGHVPFHPSNR

SEQ ID NO: 845855 - protein, 482 aa, Homo sapiens; identical to SEQ ID NO: 845849

SEQ ID NO: 845856 - protein, 480 aa, Homo sapiens
PVLGLEHANTGLPCQIHPSPLKRSMSLIPTSPQVPGEWPSPEELGARAAFTTPDHAPLSPQSSVASSGSEQTEEQGSSRNTFQEDGSGMKDVPSWLKSLRLHKYAALFSQMSYEEMMTLTEQHLESQNVTKGARHKIALSIQKLRERQSVLKSLEKDVLEGGNLRNALQELQQIIITPIKAYSVLQATVAAATTTPTAKDGAPGEPPLPGAEPPLAHPGTDKGTEAKDPPAVENYPPPPAPAPTDGSEPAPAPVADGDIPSQFTRVMGKVCTQLLVSRPDEENITSYLQLIEKCLTHEAFTETQKKRLLSWKQQVLKLLRTFPRKAALEMQNYRQQKGWAFGSNSLPIAGSVGMGVARRTQRQFPMPPRALPPGRMGLLSPSGIGGVSPRHALTSPSLGGQGRQNLWFANPGGSNSMPSQSRSSVQRTHSLPVHSSPQAILMFPPDCPVPGPDLEINPTLESLCLSMTEHALGGEHFLFP

SEQ ID NO: 845857 - protein, 78 aa, Homo sapiens
SAKRGGGRAKRTPGAQSSGRGSFLASARRVGSWLVSAEGVGGPAPSLLPRQTTVGAGAGGEPGNRGPKMGVLAYSLHL

SEQ ID NO: 845858 - protein, 106 aa, Homo sapiens
QPLPGGGGEPAVGAGAGREVFIYLFATASAKRGGGRAKRTPGAQSSGRGSFLASARRVGSWLVSAEGVGGPAPSLLPRQTTVGAGAGGEPGNRGPKMGVLAYSLHL

SEQ ID NO: 845859 - protein, 298 aa, Homo sapiens [sequence omitted]

SEQ ID NO: 845860 - protein, 191 aa, Homo sapiens
MEEKQILCVGLVVLDVISLVDKYPKEDSEIRCLSQRWQRGGNASNSCTILSLLGAPCAFMGSMAPGHVADFLVADFRRRGVDVSQVAWQSKGDTPSSCCIINNSNGNRTIVLHDTSLPDVSATDFEKVDLTQFKWIHIEGRNASEQVKMLQRIDAHNTRQPPEQKIRVSVEVEKPREELFQLFGYGDVQVQ

SEQ ID NO: 845861 - protein, 298 aa, Homo sapiens [sequence omitted]

SEQ ID NO: 845862 - protein, 298 aa, Homo sapiens [sequence omitted]

SEQ ID NO: 845863 - protein, 298 aa, Homo sapiens [sequence omitted]

SEQ ID NO: 845864 - protein, 343 aa, Homo sapiens [sequence omitted]

SEQ ID NO: 845865 - protein, 253 aa, Homo sapiens [sequence omitted]

SEQ ID NO: 845866 - protein, 214 aa, Homo sapiens
MEEKQILCVGLVVLDVISLVDKYPKEDSEIRSLPDVSATDFEKVDLTQFKWIHIEGRNASEQVKMLQRIDAHNTRQPPEQKIRVSVEVEKPREELFQLFGYGDVVFVSKDVAKHLGFQSAEEALRGLYGRVRKGAVLVCAWAEEGADALGPDGKLLHSDAFPPPRVVDTLGAGDTFNASVIFSLSQGRSVQEALRFGCQVAGKKCGLQGFDGIV

SEQ ID NO: 845867 - protein, 236 aa, Homo sapiens
MEEKQILCVGLVVLDVISLVDKYPKEDSEIRCLSQRWQRGGNASNSCTILSLLGAPCAFMGSMAPGHVADFVLDDLRRYSVDLRYTVFQTTGSVPIATVIINEASGSRTILYYDSFLVADFRRRGVDVSQVAWQSKGDTPSSCCIINNSNGNRTIVLHDTSLPDVSATDFEKVDLTQFKWIHIEGRNASEQVKMLQRIDAHNTRQPPEQKIRVSVEVEKPREELFQLFGYGDVQVQ

SEQ ID NO: 845868 - protein, 203 aa, Homo sapiens
  misc_feature (173)..(177): Xaa can be any naturally occurring amino acid
  misc_feature (179)..(179): Xaa can be any naturally occurring amino acid
  misc_feature (182)..(183): Xaa can be any naturally occurring amino acid
  misc_feature (186)..(187): Xaa can be any naturally occurring amino acid
  misc_feature (191)..(191): Xaa can be any naturally occurring amino acid
  misc_feature (194)..(195): Xaa can be any naturally occurring amino acid
  misc_feature (198)..(199): Xaa can be any naturally occurring amino acid
  misc_feature (201)..(201): Xaa can be any naturally occurring amino acid
MEEKQILCVGLVVLDVISLVDKYPKEDSEIRCLSQRWQRGGNASNSCTILSLLGAPCAFMGSMAPGHVADFVLDDLRRYSVDLRYTVFQTTGSVPIATVIINEASGSRTILYYDRSLPDVSATDFEKVDLTQFKWIHIEGRNASEQVKMLQRIDAHNTRQPPEQKIRVSVEVXXXXXLXCLXXSVXXKSAXLGXXKEXXAXCV

SEQ ID NO: 845869 - protein, 298 aa, Homo sapiens [sequence omitted]

SEQ ID NO: 845870 - protein, 298 aa, Homo sapiens [sequence omitted]

SEQ ID NO: 845871 - protein, 217 aa, Homo sapiens
MEEKQILCVGLVVLDVISLVDKYPKEDSEIRCLSQRWQRGGNASNSCTILSLLGAPCAFMGSMAPGHVADFVLDDLRRYSVDLRYTVFQTTGSVPIATVIINEASGSRTILYYDRSLPDVSATDFEKVDLTQFKWIHIEGRNASEQVKMLQRIDAHNTRQPPEQKIRVSVEVEKPREELFQLFGYGDVHKCDPGYRVLLSSGRSDLEHILELGPTPI

SEQ ID NO: 845872 - protein, 343 aa, Homo sapiens [sequence omitted]

SEQ ID NO: 845873 - protein, 343 aa, Homo sapiens [sequence omitted]

SEQ ID NO: 845874 - protein, 273 aa, Homo sapiens
QNRTLLLLEARVLQHPLPTPFGGPDHFQALICVSFPFPGPASTLSFLVADFRRRGVDVSQVAWQSKGDTPSSCCIINNSNGNRTIVLHDTSLPDVSATDFEKVDLTQFKWIHIEGRNASEQVKMLQRIDAHNTRQPPEQKIRVSVEVEKPREELFQLFGYGDVVFVSKDVAKHLGFQSAEEALRGLYGRVRKGAVLVCAWAEEGADALGPDGKLLHSDAFPPPRVVDTLGAGDTFNASVIFSLSQGRSVQEALRFGCQVAGKKCGLQGFDGIV

SEQ ID NO: 845875 - protein, 574 aa, Homo sapiens
LSTEGFGTSTPPRAVPLPKSSQAAHQRNCNSGWSPGPASLGVRGSVCPAICWWHLSLLPPPSVNPTLQKCSSPGAAQELSMRPPGFRNFLLLASSLLFAGLSAVPQSFSPSLRSWPGAACRLSRAESERRCRAPGQPPGAALCHGRGRCDCGVCICHVTEPGMFFGPLCECHEWVCETYDGSTCAGHGKCDCGKCKCDQGWYGDACQYPTNCDLTKKKSNQMCKNSQDIICSNAGTCHCGRCKCDNSDGSGLVYGKFCECDDRECIDDETEEICGGHGKCYCGNCYCKAGWHGDKCEFQCDITPWESKRRCTSPDGKICSNRGTCVCGECTCHDVDPTGDWGDIHGDTCECDERDCRAVYDRYSDDFCSGHGQCNCGRCDCKAGWYGKKCEHPQSCTLSAEESIRKCQGSSDLPCSGRGKCECGKCTCYPPGDRRVYGKTCECDDRRCEDLDGVVCGGHGTCSCGRCVCERGWFGKLCQHPRKCNMTEEQSKNLCESADGILCSGKGSCHCGKCICSAEEWYISGEFCDCDDRDCDKHDGLICTGNGICSCGNCECWDGWNGNACEIWLGSEYP

SEQ ID NO: 845876 - protein, 574 aa, Homo sapiens; identical to SEQ ID NO: 845875

SEQ ID NO: 845877 - protein, 480 aa, Homo sapiens
LSTEGFGTSTPPRAVPLPKSSQAAHQRNCNSGWSPGPASLGVRGSVCPAICWWHLSLLPPPSVNPTLQKCSSPGAAQELSMRPPGFRNFLLLASSLLFAGLSAVPQSFSPSLRSWPGAACRLSRAESERRCRAPGQPPGAALCHGRGRCDCGVCICHVTEPGMFFGPLCECHEWVCETYDGSTCAGHGKCDCGKCKCDQGWYGDACQYPTNCDLTKKKSNQMCKNSQDIICSNAGTCHCGRCKCDNSDGSGLVYGKFCECDDRECIDDETEEICGGHGKCYCGNCYCKAGWHGDKCEFQCDITPWESKRRCTSPDGKICSNRGTCVCGECTCHDVDPTGDWGDIHGDTCECDERDCRAVYDRYSDDFCSGHGQCNCGRCDCKAGWYGKKCEHPQSCTLSAEESIRKCQGSSDLPCSGRGKCECGKCTCYPPGDRRVYGKTCECDDRRCEDLDGVVCGGSNLSHSCMLPACNLLYLPLLFY

SEQ ID NO: 845878 - protein, 412 aa, Homo sapiens
MFFGPLCECHEWVCETYDGSTCAGHGKCDCGKCKCDQGWYGDACQYPTNCDLTKKKSNQMCKNSQDIICSNAGTCHCGRCKCDNSDGSGLVYGKFCECDDRECIDDETEEICGGHGKCYCGNCYCKAGWHGDKCEFQCDITPWESKRRCTSPDGKICSNRGTCVCGECTCHDVDPTGDWGDIHGDTCECDERDCRAVYDRYSDDFCSGHGQCNCGRCDCKAGWYGKKCEHPQSCTLSAEESIRKCQGSSDLPCSGRGKCECGKCTCYPPGDRRVYGKTCECDDRRCEDLDGVVCGGHGTCSCGRCVCERGWFGKLCQHPRKCNMTEEQSKNLCESADGILCSGKGSCHCGKCICSAEEWYISGEFCDCDDRDCDKHDGLICTGNGICSCGNCECWDGWNGNACEIWLGSEYP

SEQ ID NO: 845879 - protein, 574 aa, Homo sapiens; identical to SEQ ID NO: 845875

SEQ ID NO: 845880 - protein, 122 aa, Homo sapiens
MHPEPLLNSTQSAPHHFPDSFQATPFCFNQSLIPGSPSNSSILSGSLDYSYSPVQLPSYAPENYNSPASLDTRTCGYPPEDHSYQHLSSHATHELPRTTPLGVLEDRKGDPQRIIPPGCATA

SEQ ID NO: 845881 - protein, 346 aa, Homo sapiens
RERGEEGESRSGGEGGRRARWSAEKAEKRDEGERAEGKDRRERGREFLGPGPFTRSVWQVPRRPRTGLAKPHRLLPGWLPDQGHAEVGACPEATPGQKNQKVYQGVRVKITVKELLQQRRAHQAASGGTRSGGSSVHLSDPVAPSSAGLYFEPEPISSTPNYLQRGEFSSCVSCEENSSCLDQIFDSYLQTEMHPEPLLNSTQSAPHHFPDSFQATPFCFNQSLIPGSPSNSSILSGSLDYSYSPVQLPSYAPENYNSPASLDTRTCGYPPEDHSYQHLSSHAQYSCFSSATTSICYCASCEAEDLDALQAAEYFYPSTDCVDFAPSAAATSDFYKRETNCDICYS

SEQ ID NO: 845882 - protein, 105 aa, Homo sapiens
MREYKVVVLGSGGVGKSALTVQFVTGTFIEKYDPTIEDFYRKEIEVDSSPSVLEILDTAGTEQFASMRDLYIKNGQGFILVYSLVNQQSFQDIKPMRDQIIRVKR

SEQ ID NO: 845883 - protein, 183 aa, Homo sapiens
MREYKVVVLGSGGVGKSALTVQFVTGTFIEKYDPTIEDFYRKEIEVDSSPSVLEILDTAGTEQFASMRDLYIKNGQGFILVYSLVNQQSFQDIKPMRDQIIRVKRYEKVPVILVGNKVDLESEREVSSSEGRALAEEWGCPFMETSAKSKTMVDELFAEIVRQMNYAAQPDKDDPCCSACNIQ

SEQ ID NO: 845884 - protein, 183 aa, Homo sapiens; identical to SEQ ID NO: 845883

SEQ ID NO: 845885 - protein, 70 aa, Homo sapiens
  misc_feature (5)..(5): Xaa can be any naturally occurring amino acid
  misc_feature (11)..(11): Xaa can be any naturally occurring amino acid
  misc_feature (13)..(13): Xaa can be any naturally occurring amino acid
GGGCXGILTLXPXLRDHRVLLPGISAIMAGACKEDEAMLHPHVPVCRNLTGQYEYLAFLSSLKQQIPSRL

SEQ ID NO: 845886 - protein, 82 aa, Homo sapiens
RAKHATRTGIEAIPLVKPLSQGGRPLQARASWWALPAKDAINGVQTCRKGSWDANAPPMLSSSNSSSPWSSCRIRHELSVYV

SEQ ID NO: 845887 - protein, 183 aa, Homo sapiens; identical to SEQ ID NO: 845883

SEQ ID NO: 845888 - protein, 183 aa, Homo sapiens; identical to SEQ ID NO: 845883

SEQ ID NO: 845889 - protein, 326 aa, Homo sapiens
FPFFVLVLPAAFSMRFPLSAVCQTPKLMIHTSSPADHPDSPYAGANAGGKMAAGFKTVEPLEYYRRFLKENCRPDGRELGEFRTTTVNIGSISTADGSALVKLGNTTVICGVKAEFAAPSTDAPDKGYVVPNVDLPPLCSSRFRSGPPGEEAQVASQFIADVIENSQIIQKEDLCISPGKLVWVLYCDLICLDYDGNILDACTFALLAALKNVQLPEVTINEETALAEVNLKKKSYLNIRTHPVATSFAVFDDTLLIVDPTGEEEHLATGTLTIVMDEEGKLCCLHKPGGSGLTGAKLQDCMSRAVTRHKEVKKLMDEVIKSMKPK

SEQ ID NO: 845890 - protein, 325 aa, Homo sapiens
MRGRARDLSSRPHLGISRGVSGPGIRVESAAAEQARRRGAGRRRRAGGKMAAGFKTVEPLEYYRRFLKENCRPDGRELGEFRTTTVNIGSISTADGSALVKLGNTTVICGVKAEFAAPSTDAPDKGYVVPNVDLPPLCSSRFRSGPPGEEAQVASQFIADVIENSQIIQKEDLCISPGKLVWVLYCDLICLDYDGNILDACTFALLAALKNVQLPEVTINEETALAEVNLKKKSYLNIRTHPVATSFAVFDDTLLIVDPTGEEEHLATGTLTIVMDEEGKLCCLHKPGGSGLTGAKLQDCMSRAVTRHKEVKKLMDEVIKSMKPK

SEQ ID NO: 845891 - protein, 325 aa, Homo sapiens; identical to SEQ ID NO: 845890

SEQ ID NO: 845892 - protein, 300 aa, Homo sapiens
MRGRARDLSSRPHLGISRGVSGPGIRVESAAAEQARRRGAGRRRRAGGKMAAGFKTVEPLEYYRRFLKENCRPDGRELGEFRTTTVNIGSISTADGSALVKLGNTTVICGVKAEFAAPSTDAPDKGYVVPNVDLPPLCSSRFRSGPPGEEAQVASQFIADVIENSQIIQKEDLCISPGKLVWVLYCDLICLDYDGNILDACTFALLAALKNVQLPEVTINEETALAEVNLKKKSYLNIRTHPVATSFAVFDDTLLIVDPTGEEEHLATGTLTIVMDEEGKLCCLHKPDQACSRHFSPKHM

SEQ ID NO: 845893 - protein, 347 aa, Homo sapiens
MMPGRVGALQCEKTYKSLSTQRDKIPRENERTEEKESETPGNSEVRNLGESRGKGTSPRTGSAEEGTPEEPQSPGERTVEPLEYYRRFLKENCRPDGRELGEFRTTTVNIGSISTADGSALVKLGNTTVICGVKAEFAAPSTDAPDKGYVVPNVDLPPLCSSRFRSGPPGEEAQVASQFIADVIENSQIIQKEDLCISPGKLVWVLYCDLICLDYDGNILDACTFALLAALKNVQLPEVTINEETALAEVNLKKKSYLNIRTHPVATSFAVFDDTLLIVDPTGEEEHLATGTLTIVMDEEGKLCCLHKPGGSGLTGAKLQDCMSRAVTRHKEVKKLMDEVIKSMKPK

SEQ ID NO: 845894 - protein, 120 aa, Homo sapiens
MRGRARDLSSRPHLGISRGVSGPGIRVESAAAEQARRRGAGRRRRAGGKMAAGFKTVEPLEYYRRFLKENCRPDGRELGEFRTTTVNIGSISTADGSALVKLGNTTVICGVKAVSLNMSY

SEQ ID NO: 845895 - protein, 120 aa, Homo sapiens; identical to SEQ ID NO: 845894

SEQ ID NO: 845896 - protein, 227 aa, Homo sapiens
MEENLVNSEPQLSTSEFAAPSTDAPDKGYVVPNVDLPPLCSSRFRSGPPGEEAQVASQFIADVIENSQIIQKEDLCISPGKLVWVLYCDLICLDYDGNILDACTFALLAALKNVQLPEVTINEETALAEVNLKKKSYLNIRTHPVATSFAVFDDTLLIVDPTGEEEHLATGTLTIVMDEEGKLCCLHKPGGSGLTGAKLQDCMSRAVTRHKEVKKLMDEVIKSMKPK

SEQ ID NO: 845897 - protein, 259 aa, Homo sapiens
MRGRARDLSSRPHLGISRGVSGPGIRVESAAAEQARRRGAGRRRRAGGKMAAGFKTVEPLEYYRRFLKENCRPDGRELGEFRTTTVNIGSISTADGSALVKLGNTTVICGVKAEFAAPSTDAPDKGYVVPNVDLPPLCSSRFRSGPPGEEAQVASQFIADVIENSQIIQKEDLCISPGKLVWVLYCDLICLDYDGNILDACTFALLAALKNVQLPEVTINEETALAEVNLKKKSYLNIRTHPVATSFAVFDEWKWANWS

SEQ ID NO: 845898 - protein, 249 aa, Homo sapiens
MRGRARDLSSRPHLGISRGVSGPGIRVESAAAEQARRRGAGRRRRAGGKMAAGFKTVEPLEYYRRFLKENCRPDGRELGEFRTTTVNIGSISTADGSALVKLGNTTVICGVKAEFAAPSTDAPDKGYVVPNVDLPPLCSSRFRSGPPGEEAQVASQFIADVIENSQIIQKEDLCISPGKLVWVLYCDLICLDYDGNILDACTFALLAALKNGGSGLTGAKLQDCMSRAVTRHKEVKKLMDEVIKSMKPK

SEQ ID NO: 845899 - protein, 154 aa, Homo sapiens
MRGRARDLSSRPHLGISRGVSGPGIRVESAAAEQARRRGAGRRRRAGGKMAAGFKTVEPLEYYRRFLKENCRPDGRELGEFRTTTVNIGSISTADGSALVKLGNTTVICGVKAEFAAPSTDAPDKGYVDSGLDLLEKRPKWLASSLQMSLKIHR

SEQ ID NO: 845900 - protein, 325 aa, Homo sapiens; identical to SEQ ID NO: 845890

SEQ ID NO: 845901 - protein, 325 aa, Homo sapiens; identical to SEQ ID NO: 845890

SEQ ID NO: 845902 - protein, 300 aa, Homo sapiens; identical to SEQ ID NO: 845892

SEQ ID NO: 845903 - protein, 276 aa, Homo sapiens
MGAGFKTVEPLEYYRRFLKENCRPDGRELGEFRTTTVNIGSISTADGSALVKLGNTTVICGVKAEFAAPSTDAPDKGYVVPNVDLPPLCSSRFRSGPPGEEAQVASQFIADVIENSQIIQKEDLCISPGKLVWVLYCDLICLDYDGNILDACTFALLAALKNVQLPEVTINEETALAEVNLKKKSYLNIRTHPVATSFAVFDDTLLIVDPTGEEEHLATGTLTIVMDEEGKLCCLHKPGGSGLTGAKLQDCMSRAVTRHKEVKKLMDEVIKSMKPK

SEQ ID NO: 845904 - protein, 313 aa, Homo sapiens
MRGRARDLSFASPPWHFPWRERPRHPCRKCGGGTGAQERSGQAQTRGREDGGWVQKENCRPDGRELGEFRTTTVNIGSISTADGSALVKLGNTTVICGVKAEFAAPSTDAPDKGYVVPNVDLPPLCSSRFRSGPPGEEAQVASQFIADVIENSQIIQKEDLCISPGKLVWVLYCDLICLDYDGNILDACTFALLAALKNVQLPEVTINEETALAEVNLKKKSYLNIRTHPVATSFAVFDDTLLIVDPTGEEEHLATGTLTIVMDEEGKLCCLHKPGGSGLTGAKLQDCMSRAVTRHKEVKKLMDEVIKSMKPK

SEQ ID NO: 845905 - protein, 113 aa, Homo sapiens
MRGRARDLSSRPHLGISRGVSGPGIRVESAAAEQARRRGAGRRRRAGGKMAAGFKTVEPLEYYRRFLKENCRPDGRELGEFRTTTVNIGSISTADGSALVKLGNTTVICGVKA

SEQ ID NO: 845906 - protein, 120 aa, Homo sapiens; identical to SEQ ID NO: 845894

SEQ ID NO: 845907 - protein, 188 aa, Homo sapiens
MGAGFKTVEPLEYYRRFLKENCRPDGRELGEFRTTTVNIGSISTADGSALVKLGNTTVICGVKAEFAAPSTDAPDKGYVVPNVDLPPLCSSRFRSGPPGEEAQVASQFIADVIENSQIIQKEDLCISPGKLVWVLYCDLICLDYDGNILDACTFALLAALKNVQLPEVTINEETALAEVNLKKKTLCL

SEQ ID NO: 845908 - protein, 159 aa, Homo sapiens
AGFQEGAAFAQRETAGRRVGQRWCGDCFRTPGTALGGSWPQTSVFSAAVKARGCRIATLPMDLIGFGYAALVTFGSIFGYKRRGGVPSLIAGLFVGCLAGYGAYRVSNDKRDVKVSLFTAFFLATIMGVRFKRSKKIMPAGLVAGLSLMMILRLVLLLL

SEQ ID NO: 845909 - protein, 93 aa, Homo sapiens
LPDSRYRAWATAPQTSVFSAAVKARGCRLECSGTALVRRLLPDSRYRAWRQLAPDFCLFSCSEGSGLQNCNLANGPDRFWLCSPRDIWKHFWI

SEQ ID NO: 845910 - protein, 159 aa, Homo sapiens; identical to SEQ ID NO: 845908

SEQ ID NO: 845911 - protein, 159 aa, Homo sapiens; identical to SEQ ID NO: 845908

SEQ ID NO: 845912 - protein, 112 aa, Homo sapiens [sequence omitted]

SEQ ID NO: 845913 - protein, 159 aa, Homo sapiens; identical to SEQ ID NO: 845908

SEQ ID NO: 845914 - protein, 200 aa, Homo sapiens
AGFQEGAAFAQRETAGRRVGQRWCGDCFRTPGTALGGSWPQTSVFSAAVKARGCRIATLPMDLIGFGYAALVTFGSIFGYKRRGGVPSLIAGLFVGCLAGYGAYRVSNDKRDVKVSLFTAFFLATIMGVRFKRSTLVLLLLLTILRTSLLTLSYPSSPVLSILLSAFFTSPLNLFSLLTHFQLFTFNYDPLSSRHPSLPS

SEQ ID NO: 845915 - protein, 93 aa, Homo sapiens; identical to SEQ ID NO: 845909

SEQ ID NO: 845916 - protein, 159 aa, Homo sapiens; identical to SEQ ID NO: 845908

SEQ ID NO: 845917 - protein, 136 aa, Homo sapiens
SGFPGGSGLCSARDGWAPSGTALVRRLLPDSRIATLPMDLIGFGYAALVTFGSIFGYKRRGGVPSLIAGLFVGCLAGYGAYRVSNDKRDVKVSLFTAFFLATIMGVRFKRSKKIMPAGLVAGLSLMMILRLVLLLL

SEQ ID NO: 845918 - protein, 180 aa, Homo sapiens
  misc_feature (63)..(63): Xaa can be any naturally occurring amino acid
  misc_feature (68)..(68): Xaa can be any naturally occurring amino acid
  misc_feature (70)..(70): Xaa can be any naturally occurring amino acid
SGLQVPRLGDCAPDFCLFSCSEGSGLQAGVQWDSAGAETASGLQVPRLAAAGPRLLSFPGPPXFGGPXGXKARGCRIATLPMDLIGFGYAALVTFGSIFGYKRRGGVPSLIAGLFVGCLAGYGAYRVSNDKRDVKVSLFTAFFLATIMGVRFKRSKKIMPAGLVAGLSLMMILRLVLLLL

SEQ ID NO: 845919 - protein, 147 aa, Homo sapiens
AGFQEGAAFAQRETAGRRVGQRWCGDCFRTPGTALGGSWPQTSVFSAAVKARGCRIATLPMDLIGFGYAALVTFGSIFGYKRRGGVPSLIAGLFVGCLAGYGAYRVSNDKRDVKVSLFTAFFLATIMGVRFKRSKKIMPAGLVAGLR

SEQ ID NO: 845920 - protein, 256 aa, Homo sapiens [sequence omitted]

SEQ ID NO: 845921 - protein, 141 aa, Homo sapiens
MAGAVSLLGVVGLLLVSALSGVLGDRANPDLRAHPGNAAHPGSGATEPRRRPPLKDQRERTRAGSLPLGALYTAAVAAFVLYKCLQGKDETAVLHEEASKQQPLQSEQQLAQLTQQLAQTEQHLNNLMAQLDPLFERSRSF

SEQ ID NO: 845922 - protein, 141 aa, Homo sapiens; identical to SEQ ID NO: 845921

SEQ ID NO: 845923 - protein, 133 aa, Homo sapiens [sequence omitted]

SEQ ID NO: 845924 - protein, 283 aa, Homo sapiens
MAGAVSLLGVVGLLLVSALSGVLGDRANPDLRAHPGNAAHPGSGATEPRRRPPLKDQRERTRAGSLPLGALYTAAVAAFVLYKCLQGKDETAVLHEEASKQQPLQSEQQLAQLTQQLAQTEQHLNNLMAQLDPLFERVTTLAGAQQELLNMKLWTIHELLQDSKPDKDMEASEPGEGSGGESAGGGDKVSETGTFLISPHTEASRPLPEDFCLKEDEEEVGDSQAWEEPTNWSTETWNLATSWEVGRGLRRRCSQAVAKGPSHSLGWEGGTTAEGRLKQSLFS

SEQ ID NO: 845925 - protein, 190 aa, Homo sapiens
MPLNRTLSMSSLPGLEDWEDEFDLENAVLFEVAWEVANKVGGIYTVLQTKAKVTGDEWGDNYFLVGPYTEQGVRTQVELLEAPTPALKRTLDSMNSKGCKVYFGRWLIEGGPLVVLLDVGASAWALERWKGELWDTCNIGVPWYDREANDAVLFGFLTTWFLGEFLARVREPMWLPLLMLEVACCLPGAG

SEQ ID NO: 845926 - protein, 737 aa, Homo sapiens
MPLNRTLSMSSLPGLEDWEDEFDLENAVLFEVAWEVANKVGGIYTVLQTKAKVTGDEWGDNYFLVGPYTEQGVRTQVELLEAPTPALKRTLDSMNSKGCKVYFGRWLIEGGPLVVLLDVGASAWALERWKGELWDTCNIGVPWYDREANDAVLFGFLTTWFLGEFLAQSEEKPHVVAHFHEWLAGVGLCLCRARRLPVATIFTTHATLLGRYLCAGAVDFYNNLENFNVDKEAGERQIYHRYCMERAAAHCAHVFTTVSQITAIEAQHLLKRKPDIVTPNGLNVKKFSAMHEFQNLHAQSKARIQEFVRGHFYGHLDFNLDKTLYFFIAGRYEFSNKGADVFLEALARLNYLLRVNGSEQTVVAFFIMPARTNNFNVETLKGQAVRKQLWDTANTVKEKFGRKLYESLLVGSLPDMNKMLDKEDFTMMKRAIFATQRQSFPPVCTHNMLDDSSDPILTTIRRIGLFNSSADRVKVIFHPEFLSSTSPLLPVDYEEFVRGCHLGVFPSYYEPWGYTPAECTVMGIPSISTNLSGFGCFMEEHIADPSAYGIYILDRRFRSLDDSCSQLTSFLYSFCQQSRRQRIIQRNRTERLSDLLDWKYLGRYYMSARHMALSKAFPEHFTYEPNEADAAQGYRYPRPASVPPSPSLSRHSSPHQSEDEEDPRNGPLEEDGERYDEDEEAAKDRRNIRAPEWPRRASCTSSTSGSKRNSVDTATSSSLSTPSEPLSPTSSLGEERN

SEQ ID NO: 845927 - protein, 809 aa, Homo sapiens
RARKGLVLIRRGLLPRSQRFGAGVRSCNRKPSVLQASRRAPATRPRTLPGAFPRHLRGPYLEIPGAPLPAPAMPLNRTLSMSSLPGLEDWEDEFDLENAVLFEVAWEVANKVGGIYTVLQTKAKVTGDEWGDNYFLVGPYTEQGVRTQVELLEAPTPALKRTLDSMNSKGCKVYFGRWLIEGGPLVVLLDVGASAWALERWKGELWDTCNIGVPWYDREANDAVLFGFLTTWFLGEFLAQSEEKPHVVAHFHEWLAGVGLCLCRARRLPVATIFTTHATLLGRYLCAGAVDFYNNLENFNVDKEAGERQIYHRYCMERAAAHCAHVFTTVSQITAIEAQHLLKRKPDIVTPNGLNVKKFSAMHEFQNLHAQSKARIQEFVRGHFYGHLDFNLDKTLYFFIAGRYEFSNKGADVFLEALARLNYLLRVNGSEQTVVAFFIMPARTNNFNVETLKGQAVRKQLWDTANTVKEKFGRKLYESLLVGSLPDMNKMLDKEDFTMMKRAIFATQRQSFPPVCTHNMLDDSSDPILTTIRRIGLFNSSADRVKVIFHPEFLSSTSPLLPVDYEEFVRGCHLGVFPSYYEPWGYTPAECTVMGIPSISTNLSGFGCFMEEHIADPSAYGIYILDRRFRSLDDSCSQLTSFLYSFCQQSRRQRIIQRNRTERLSDLLDWKYLGRYYMSARHMALSKAFPEHFTYEPNEADAAQGYRYPRPASVPPSPSLSRHSSPHQSEDEEDPRNGPLEEDGERYDEDEEAAKDRRNIRAPEWPRRASCTSSTSGSKRNSVDTATSSSLSTPSEPLSPTSSLGEERN

SEQ ID NO: 845928 - protein, 737 aa, Homo sapiens; identical to SEQ ID NO: 845926

SEQ ID NO: 845929 - protein, 675 aa, Homo sapiens
MPLNRTLSMSSLPGLEDWEDEFDLENAVLFEVAWEVANKVGGIYTVLQTKAKVTGDEWGDNYFLVGPYTEQGVRTQVELLEAPTPALKRTLDSMNSKGCKVEFLAQSEEKPHVVAHFHEWLAGVGLCLCRARRLPVATIFTTHATLLGRYLCAGAVDFYNNLENFNVDKEAGERQIYHRYCMERAAAHCAHVFTTVSQITAIEAQHLLKRKPDIVTPNGLNVKKFSAMHEFQNLHAQSKARIQEFVRGHFYGHLDFNLDKTLYFFIAGRYEFSNKGADVFLEALARLNYLLRVNGSEQTVVAFFIMPARTNNFNVETLKGQAVRKQLWDTANTVKEKFGRKLYESLLVGSLPDMNKMLDKEDFTMMKRAIFATQRQSFPPVCTHNMLDDSSDPILTTIRRIGLFNSSADRVKVIFHPEFLSSTSPLLPVDYEEFVRGCHLGVFPSYYEPWGYTPAECTVMGIPSISTNLSGFGCFMEEHIADPSAYGIYILDRRFRSLDDSCSQLTSFLYSFCQQSRRQRIIQRNRTERLSDLLDWKYLGRYYMSARHMALSKAFPEHFTYEPNEADAAQGYRYPRPASVPPSPSLSRHSSPHQSEDEEDPRNGPLEEDGERYDEDEEAAKDRRNIRAPEWPRRASCTSSTSGSKRNSVDTATSSSLSTPSEPLSPTSSLGEERN

SEQ ID NO: 845930 - protein, 737 aa, Homo sapiens; identical to SEQ ID NO: 845926

SEQ ID NO: 845931 - protein, 737 aa, Homo sapiens; identical to SEQ ID NO: 845926

SEQ ID NO: 845932 - protein, 755 aa, Homo sapiens
MPLNRTLSMSSLPGLEDWEDEFDLENAVLFEVAWEVANKGPRTMDLGRGLPYTLGPTVGGIYTVLQTKAKVTGDEWGDNYFLVGPYTEQGVRTQVELLEAPTPALKRTLDSMNSKGCKVYFGRWLIEGGPLVVLLDVGASAWALERWKGELWDTCNIGVPWYDREANDAVLFGFLTTWFLGEFLAQSEEKPHVVAHFHEWLAGVGLCLCRARRLPVATIFTTHATLLGRYLCAGAVDFYNNLENFNVDKEAGERQIYHRYCMERAAAHCAHVFTTVSQITAIEAQHLLKRKPDIVTPNGLNVKKFSAMHEFQNLHAQSKARIQEFVRGHFYGHLDFNLDKTLYFFIAGRYEFSNKGADVFLEALARLNYLLRVNGSEQTVVAFFIMPARTNNFNVETLKGQAVRKQLWDTANTVKEKFGRKLYESLLVGSLPDMNKMLDKEDFTMMKRAIFATQRQSFPPVCTHNMLDDSSDPILTTIRRIGLFNSSADRVKVIFHPEFLSSTSPLLPVDYEEFVRGCHLGVFPSYYEPWGYTPAECTVMGIPSISTNLSGFGCFMEEHIADPSAYGIYILDRRFRSLDDSCSQLTSFLYSFCQQSRRQRIIQRNRTERLSDLLDWKYLGRYYMSARHMALSKAFPEHFTYEPNEADAAQGYRYPRPASVPPSPSLSRHSSPHQSEDEEDPRNGPLEEDGERYDEDEEAAKDRRNIRAPEWPRRASCTSSTSGSKRNSVDTATSSSLSTPSEPLSPTSSLGEERN

SEQ ID NO: 845933 - protein, 737 aa, Homo sapiens; identical to SEQ ID NO: 845926

SEQ ID NO: 845934 - protein, 740 aa, Homo sapiens
MPLNRTLSMSSLPGLEDWEDEFDLENAVLFEVAWEVANKVGGIYTVLQTKAKVTGDEWGDNYFLVGPYTEQGVRTQVELLEAPTPALKRTLDSMNSKGCKVYFGRWLIEGGPLVVLLDVGASAWALERWKGELWDTCNIGVPWYDREANDAVLFGFLTTWFLGEFLAFLAQSEEKPHVVAHFHEWLAGVGLCLCRARRLPVATIFTTHATLLGRYLCAGAVDFYNNLENFNVDKEAGERQIYHRYCMERAAAHCAHVFTTVSQITAIEAQHLLKRKPDIVTPNGLNVKKFSAMHEFQNLHAQSKARIQEFVRGHFYGHLDFNLDKTLYFFIAGRYEFSNKGADVFLEALARLNYLLRVNGSEQTVVAFFIMPARTNNFNVETLKGQAVRKQLWDTANTVKEKFGRKLYESLLVGSLPDMNKMLDKEDFTMMKRAIFATQRQSFPPVCTHNMLDDSSDPILTTIRRIGLFNSSADRVKVIFHPEFLSSTSPLLPVDYEEFVRGCHLGVFPSYYEPWGYTPAECTVMGIPSISTNLSGFGCFMEEHIADPSAYGIYILDRRFRSLDDSCSQLTSFLYSFCQQSRRQRIIQRNRTERLSDLLDWKYLGRYYMSARHMALSKAFPEHFTYEPNEADAAQGYRYPRPASVPPSPSLSRHSSPHQSEDEEDPRNGPLEEDGERYDEDEEAAKDRRNIRAPEWPRRASCTSSTSGSKRNSVDTATSSSLSTPSEPLSPTSSLGEERN

SEQ ID NO: 845935 - protein, 737 aa, Homo sapiens; identical to SEQ ID NO: 845926

SEQ ID NO: 845936 - protein, 661 aa, Homo sapiens
MPLNRTLSMSSLPGLEDWEDEFDLENAVLFEVAWEVANKVGGIYTVLQTKAKVTGDEWGDNYFLVGPYTEQGVRTQVELLEAPTPALKRTLDSMNSKGCKVYFGRWLIEGGPLVVLLDVGASAWALERWKGELWDTCNIGVPWYDREANDAVLFGFLTTWFLGEFLAQSEEKPHVVAHFHEWLAGVGLCLCRARRLPVATIFTTHATLLGRYLCAGAVDFYNNLENFNVDKEAGERQIYHRYCMERAAAHCAHVFTTVSQITAIEAQHLLKRKPDIVTPNGLNVKKFSAMHEFQNLHAQSKARIQEFVRGHFYGHLDFNLDKTLYFFIAGRYEFSNKGADVFLEALARLNYLLRVNGSEQTVVAFFIMPARTNNFNVETLKGQAVRKQLWDTANTVKEKFGRKLYESLLVGSLPDMNKMLDKEDFTMMKRAIFATQRQSFPPVCTHNMLDDSSDPILTTIRRIGLFNSSADRVKVIFHPEFLSSTSPLLPVDYEEFVRGCHLGVFPSYYEPWGYTPAECTVMGIPSISTNLSGFGCFMEEHIADPSAYGIYILDRRFRSLDDSCSQLTSFLYSFCQQSRRQRIIQRNRTERLSDLLDWKYLGRVGPPLSYPLLANQQLLARGLWCRVQGLILLVTVAVPLSNEPGRSRWWLMVVIPALWEA

SEQ ID NO: 845937 - protein, 624 aa, Homo sapiens
MPLNRTLSMSSLPGLEDWEDEFDLENAVLFEVAWEVANKVGGIYTVLQTKAKVTGDEWGDNYFLVGPYTEQGVRTQVELLEAPTPALKRTLDSMNSKGCKVYFGRWLIEGGPLVVLLDVGASAWALERWKGELWDTCNIGVPWYDREANDAVLFGFLTTWFLGEFLAQSEEKPHVVAHFHEWLAGVGLCLCRARRLPVATIFTTHATLLGRYLCAGAVDFYNNLENFNVDKEAGERQIYHRYCMERAAAHCAHVFTTVSQITAIEAQHLLKRKPDIVTPNGLNVKKFSAMHEFQNLHAQSKARIQEFVRGHFYGHLDFNLDKTLYFFIAGRYEFSNKGADVFLEALARLNYLLRVNGSEQTVVAFFIMPARTNNFNVETLKGQAVRKQLWDTANTVKEKFGRKLYESLLVGSLPDMNKMLDKEDFTMMKRAIFATQRQSFPPVCTHNMLDDSSDPILTTIRRIGLFNSSADRVKVIFHPEFLSSTSPLLPVDYEEFVRGCHLGVFPSYYEPWGYTPAECTVMGIPSISTNLSGFGCFMEEHIADPSAYAYHPAEPHGAPLRPSGLEIPRPVLYVCAPHGAVQGLSRALHLRAQRGGCGPGVPLPTASLGATVALAVTTLQPAPE

SEQ ID NO: 845938 - protein, 77 aa, Homo sapiens
LVPQSPGDHEDLPRMFSEPGSWPPQVSTFLTGGSAAWMIPARSSPPSSTVSVSRAGGSVSSSGTARSASPTFWTGNT

SEQ ID NO: 845939 - protein, 110 aa, Homo sapiens
CGDLEDPSTARTLPGAFPRHLRGPYLEIPGAPLPAPAMPLNRTLSMSSLPGLEDWEDEFDLENAVLFEVAWEVANKVGGIYTVLQTKAKVTGDEWGDNYFLVGPWIRQIL

SEQ ID NO: 845940 - protein, 675 aa, Homo sapiens; identical to SEQ ID NO: 845929

SEQ ID NO: 845941 - protein, 737 aa, Homo sapiens; identical to SEQ ID NO: 845926

SEQ ID NO: 845942 - protein, 737 aa, Homo sapiens; identical to SEQ ID NO: 845926

SEQ ID NO: 845943 - protein, 740 aa, Homo sapiens; identical to SEQ ID NO: 845934

SEQ ID NO: 845944 - protein, 723 aa, Homo sapiens
  misc_feature (5)..(6): Xaa can be any naturally occurring amino acid
GTRDXXRFKGMAGAEKGGSGEVANKVGGIYTVLQTKAKVTGDEWGDNYFLVGPYTEQGVRTQVELLEAPTPALKRTLDSMNSKGCKVYFGRWLIEGGPLVVLLDVGASAWALERWKGELWDTCNIGVPWYDREANDAVLFGFLTTWFLGEFLAQSEEKPHVVAHFHEWLAGVGLCLCRARRLPVATIFTTHATLLGRYLCAGAVDFYNNLENFNVDKEAGERQIYHRYCMERAAAHCAHVFTTVSQITAIEAQHLLKRKPDIVTPNGLNVKKFSAMHEFQNLHAQSKARIQEFVRGHFYGHLDFNLDKTLYFFIAGRYEFSNKGADVFLEALARLNYLLRVNGSEQTVVAFFIMPARTNNFNVETLKGQAVRKQLWDTANTVKEKFGRKLYESLLVGSLPDMNKMLDKEDFTMMKRAIFATQRQSFPPVCTHNMLDDSSDPILTTIRRIGLFNSSADRVKVIFHPEFLSSTSPLLPVDYEEFVRGCHLGVFPSYYEPWGYTPAECTVMGIPSISTNLSGFGCFMEEHIADPSAYGIYILDRRFRSLDDSCSQLTSFLYSFCQQSRRQRIIQRNRTERLSDLLDWKYLGRYYMSARHMALSKAFPEHFTYEPNEADAAQGYRYPRPASVPPSPSLSRHSSPHQSEDEEDPRNGPLEEDGERYDEDEEAAKDRRNIRAPEWPRRASCTSSTSGSKRNSVDTATSSSLSTPSEPLSPTSSLGEERN

SEQ ID NO: 845945 - protein, 495 aa, Homo sapiens
MVRGWVLNRPRVFTTVSQITAIEAQHLLKRKPDIVTPNGLNVKKFSAMHEFQNLHAQSKARIQEFVRGHFYGHLDFNLDKTLYFFIAGRYEFSNKGADVFLEALARLNYLLRVNGSEQTVVAFFIMPARTNNFNVETLKGQAVRKQLWDTANTVKEKFGRKLYESLLVGSLPDMNKMLDKEDFTMMKRAIFATQRQSFPPVCTHNMLDDSSDPILTTIRRIGLFNSSADRVKVIFHPEFLSSTSPLLPVDYEEFVRGCHLGVFPSYYEPWGYTPAECTVMGIPSISTNLSGFGCFMEEHIADPSAYGIYILDRRFRSLDDSCSQLTSFLYSFCQQSRRQRIIQRNRTERLSDLLDWKYLGRYYMSARHMALSKAFPEHFTYEPNEADAAQGYRYPRPASVPPSPSLSRHSSPHQSEDEEDPRNGPLEEDGERYDEDEEAAKDRRNIRAPEWPRRASCTSSTSGSKRNSVDTATSSSLSTPSEPLSPTSSLGEERN

SEQ ID NO: 845946 - protein, 322 aa, Homo sapiens [sequence omitted]

SEQ ID NO: 845947 - protein, 144 aa, Homo sapiens
ISSVPLFSRVGRTVDSLISPGFVRMLCRSCEPNEADAAQGYRYPRPASVPPSPSLSRHSSPHQSEDEEDPRNGPLEEDGERYDEDEEAAKDRRNIRAPEWPRRASCTSSTSGSKRNSVDTATSSSLSTPSEPLSPTSSLGEERN

SEQ ID NO: 845948 - protein, 377 aa, Homo sapiens
MPLNRTLSMSSLPGLEDWEDEFDLENAVLFEVAWEVANKVGGIYTVLQTKAKVTGDEWGDNYFLVGPYTEQGVRTQVELLEAPTPALKRTLDSMNSKGCKVYFGRWLIEGGPLVVLLDVGASAWALERWKGELWDTCNIGVPWYDREANDAVLFGFLTTWFLGEFLAQSEEKPHVVAHFHEWLAGVGLCLCRARRLPVATIFTTHATLLGRYLCAGAVDFYNNLENFNVDKEAGERQIYHRYCMERAAAHCAHVFTTVSQITAIEAQHLLKRKPDIVTPNGLNVKKFSAMHEFQNLHAQSKARIQEFVRGHFYGHLDFNLDKTLYFFIAGRYEFSNKGADVFLEALARLNYLLRVNAASRRCCLLHHACEPMRDPLD

SEQ ID NO: 845949 - protein, 132 aa, Homo sapiens
PGVGVGPGGRRPTLRVRIRALAPLDARPAPVAVMAATICRALAKSRAARHRRPVSLRQQPGVTGRIRNPILQNRISGPKELCPRSHSSREPEAGFKTASPYSRYCSLTRCPRLPHVGSLTKLRGPRFPQEGY

SEQ ID NO: 845950 - protein, 1226 aa, Homo sapiens
MSRLLWRKVAGATVGPGPVPAPGRWVSSSVPASDPSDGQRRRQQQQQQQQQQQQQPQQPQVLSSEGGQLRHNPLDIQMLSRGLHEQIFGQGGEMPGEAAVRRSVEHLQKHGLWGQPAVPLPDVELRLPPLYGDNLDQHFRLLAQKQSLPYLEAANLLLQAQLPPKPPAWAWAEGWTRYGPEGEAVPVAIPEERALVFDVEVCLAEGTCPTLAVAISPSAWYSWCSQRLVEERYSWTSQLSPADLIPLEVPTGASSPTQRDWQEQLVVGHNVSFDRAHIREQYLIQGSRMRFLDTMSMHMAISGLSSFQRSLWIAAKQGKHKVQPPTKQGQKSQRKARRGPAISSWDWLDISSVNSLAEVHRLYVGGPPLEKEPRELFVKGTMKDIRENFQDLMQYCAQDVWATHEVFQQQLPLFLERCPHPVTLAGMLEMGVSYLPVNQNWERYLAEAQGTYEELQREMKKSLMDLANDACQLLSGERYKEDPWLWDLEWDLQEFKQKKAKKVKKEPATASKLPIEGAGAPGDPMDQEDLGPCSEEEEFQQDVMARACLQKLKGTTELLPKRPQHLPGHPGWYRKLCPRLDDPAWTPGPSLLSLQMRVTPKLMDTYLGWLPSALLRASWLGLLGAWAAGQPGQAADRYHPGVSWGGLPLQGKQQLMPQEAGLAEEFLLTDNSAIWQTVEELDYLEVEAEAKMENLRAAVPGQPLALTARGGPKDTQPSYHHGNGPYNDVDIPGCWFFKLPHKDGNSCNVGSPFAKDFLPKMEDGTLQAGPGGASGPRALEINKMISFWRNAHKRISSQMVVWLPRSALPRAVIRHPDYDEEGLYGAILPQVVTAGTITRRAVEPTWLTASNARPDRVGSELKAMVQAPPGYTLVGADVDSQELWIAAVLGDAHFAGMHGCTAFGWMTLQGRKSRGTDLHSKTATTVGISREHAKIFNYGRIYGAGQPFAERLLMQFNHRLTQQEAAEKAQQMYAATKGLRWYRLSDEGEWLVRELNLPVDRTEGGWISLQDLRKVQRETARKSQWKKWEVVAERAWKGGTESEMFNKLESIATSDIPRTPVLGCCISRALEPSAVQEEFMTSRVNWVVQSSAVDYLHLMLVAMKWLFEEFAIDGRFCISIHDEVRYLVREEDRYRAALALQITNLLTRCMFAYKLGLNDLPQSVAFFSAVDIDRCLRKEVTMDCKTPSNPTGMERRYGIPQGEALDIYQIIELTKGSLEKRSQPGP

SEQ ID NO: 845951 - protein, 1168 aa, Homo sapiens [sequence omitted]

SEQ ID NO: 845952 - protein, 1168 aa, Homo sapiens [sequence omitted]

SEQ ID NO: 845953 - protein, 1168 aa, Homo sapiens [sequence omitted]

SEQ ID NO: 845954 - protein, 1035 aa, Homo sapiens
MSRLLWRKVAGATVGPGPVPAPGRWVSSSVPASDPSDGQRRRQQQQQQQQQQQQQPQQPQVLSSEGGQLRHNPLDIQMLSRGLHEQIFGQGGEMPGEAAVRRSVEHLQKHGLWGQPAVPLPDVELRLPPLYGDNLDQHFRLLAQKQSLPYLEAANLLLQAQLPPKPPAWAWAEGWTRYGPEGEAVPVAIPEERALVFDVEVCLAEGTCPTLAVAISPSAWYSWCSQRLVEERYSWTSQLSPADLIPLEVPTGASSPTQRDWQEQLVVGHNVSFDRAHIREQYLIQGSRMRFLDTMSMHMAISGLSSFQRSLWIAAKQGKHKVQPPTKQGQKSQRKARRGPAISSWDWLDISSVNSLAEVHRLYVGGPPLEKEPRELFVKGTMKDIRENFQDLMQYCAQDVWATHEVFQQQLPLFLERCPHPVTLAGMLEMGVSYLPVNQNWERYLAEAQGTYEELQREMKKSLMDLANDACQLLSGERYKEDPWLWDLEWDLQEFKQKKAKKVKKEPATASKLPIEGAGAPGDPMDQEDLGPCSEEEEFQQDVMARACLQKLKGTTELLPKRPQHLPGHPGWYRKLCPRLDDPAWTPGPSLLSLQMRVTPKLMALTWDGFPLHYSERHGWGYLVPGRRDNLAKLPTGTTLESAGVVCPYRAIESLYRKHCLEQGKQQLMPQEAGLAEEFLLTDNSAIWQTVEELDYLEVEAEAKMENLRAAVPGQPLALTARGGPKDTQPSYHHGNGPYNDVDIPGCWFFKLPHKDGNSCNVGSPFAKDFLPKMEDGTLQAGPGGASGPRALEINKMISFWRNAHKRISSQMVVWLPRSALPRAVIRHPDYDEEGLYGAILPQVVTAGTITRRAVEPTWLTASNARPDRVGSELKAMVQAPPGYTLVGADVDSQELWIAAVLGDAHFAGMHGCTAFGWMTLQGRKSRGTDLHSKTATTVGISREHAKIFNYGRIYGAGQPFAERLLMQFNHRLTQQEAAEKAQQMYAATKGLRWYRLSDEGEWLVRELNLPVDRTEGGWISLQDLRKVQRETARK

SEQ ID NO: 845955 - protein, 1239 aa, Homo sapiens
MSRLLWRKVAGATVGPGPVPAPGRWVSSSVPASDPSDGQRRRQQQQQQQQQQQQQPQQPQVLSSEGGQLRHNPLDIQMLSRGLHEQIFGQGGEMPGEAAVRRSVEHLQKHGLWGQPAVPLPDVELRLPPLYGDNLDQHFRLLAQKQSLPYLEAANLLLQAQLPPKPPAWAWAEGWTRYGPEGEAVPVAIPEERALVFDVEVCLAEGTCPTLAVAISPSAWYSWCSQRLVEERYSWTSQLSPADLIPLEVPTGASSPTQRDWQEQLVVGHNVSFDRAHIREQYLIQGSRMRFLDTMSMHMAISGLSSFQRSLWIAAKQGKHKVQPPTKQGQKSQRKARRGPAISSWDWLDISSVNSLAEVHRLYVGGPPLEKEPRELFVKGTMKDIRENFQDLMQYCAQDVWATHEVFQQQLPLFLERCPHPVTLAGMLEMGVSYLPVNQNWERYLAEAQGTYEELQREMKKSLMDLANDACQLLSGERYKEDPWLWDLEWDLQEFKQKKAKKVKKEPATASKLPIEGAGAPGDPMDQEDLGPCSEEEEFQQDVMARACLQKLKGTTELLPKRPQHLPGHPGWYRKLCPRLDDPAWTPGPSLLSLQMRVTPKLMALTWDGFPLHYSERHGWGYLVPGRRDNLAKLPTGTTLESAGVVCPYRAIESLYRKHCLEQGKQQLMPQEAGLAEEFLLTDNSAIWQTVEELDYLEVEAEAKMENLRAAVPGQPLALTARGGPKDTQPSYHHGNGPYNDVDIPGCWFFKLPHKDGNSCNVGSPFAKDFLPKMEDGTLQAGPGGASGPRALEINKMISFWRNAHKRISSQMVVWLPRSALPRAVIRHPDYDEEGLYGAILPQVVTAGTITRRAVEPTWLTASNARPDRVGSELKAMVQAPPGYTLVGADVDSQELWIAAVLGDAHFAGMHGCTAFGWMTLQGRKSRGTDLHSKTATTVGISREHAKIFNYGRIYGAGQPFAERLLMQFNHRLTQQEAAEKAQQMYAATKGLRWYRLSDEGEWLVRELNLPVDRTEGGWISLQDLRKVQRETARKSQWKKWEVVAERAWKGGTESEMFNKLESIATSDIPRTPVLGCCISRALEPSAVQEEFMTSRVNWVVQSSAVDYLHLMLVAMKWLFEEFAIDGRFCISIHDEVRYLVREEDRYRAALALQITNLLTRCMFAYKLGLNDLPQSVAFFSAVDIDRCLRKEVTMDCKTPSNPTGMERRYGIPQGEALDIYQIIELTKGSLEKRSQPGP

SEQ ID NO: 845956 - protein, 111 aa, Homo sapiens
IRLCSHACRQVGVSKHSCNPQLLGVHISTHKGVARVGLQGRKSRGTDLHSKTATTVGISREHAKIFNYGRIYGAGQPFAERLLMQFNHRLTQQEAAEKAQQMYAATKGLRW

SEQ ID NO: 845957 - protein, 1233 aa, Homo sapiens
MSRLLWRKVAGATVGPGPVPAPGRWVSSSVPASDPSDGQRRRQQQQQQQQQQQQQPQQPQVLSSEGGQLRHNPLDIQMLSRGLHEQIFGQGGEMPGEAAVRRSVEHLQKHGLWGQPAVPLPDVELRLPPLYGDNLDQHFRLLAQKQSLPYLEAANLLLQAQLPPKPPAWAWAEGWTRYGPEGEAVPVAIPEERALVFDVEVCLAEGTCPTLAVAISPSAWYSWCSQRLVEERYSWTSQLSPADLIPLEVPTGASSPTQRDWQEQLVVGHNVSFDRAHIREQYLIQGSRMRFLDTMSMHMAISGLSSFQRSLWIAAKQGKHKVQPPTKQGQKSQRKARRGPAISSWDWLDISSVNSLAEVHRLYVGGPPLEKEPRELFVKGTMKDIRENFQDLMQYCAQDVWATHEVFQQQLPLFLERCPHPVTLAGMLEMGVSYLPVNQNWERYLAEAQGTYEELQREMKKSLMDLANDACQLLSGERYKEDPWLWDLEWDLQEFKQKKAKKVKKEPATASKLPIEGAGAPGDPMDQEDLGPCSEEEEFQQDVMARACLQKLKGTTELLPKRPQHLPGHPGWYRKLCPRLDDPAWTPGPSLLSLQMRVTPKLMALTWDGFPLHYSERHGWGYLVPGRRDNLAKLPTGTTLESAGVVCPYRAIESLYRKHCLEQGKQQLMPQEAGLAEEFLLTDNSAIWQTVEELDYLEVEAEAKMENLRAAVPGQPLALTARGGPKDTQPSYHHGNGPYNDVDIPGCWFFKLPHKDGNSCNVGSPFAKDFLPKMEDGTLQAGPGGASGPRALEINKMISFWRNAHKRISSQMVVWLPRSALPRAVIRHPDYDEEGLYGAILPQVVTAGTITRRAVEPTWLTASNARPDRVGSELKAMVQAPPGYTLVGADVDSQELWIAAVLGDAHFAGMHGCTAFGWMTLQGRKSRGTDLHSKTATTVGISREHAKIFNYGRIYGAGQPFAERLLMQFNHRLTQQEAAEKAQQMYAATKGLRWYRLSDEGEWLVRELNLPVDRTEGGWISLQDLRKVQRETARKSQWKKWEVVAERAWKGGTESEMFNKLESIATSDIPRTPVLGCCISRALEPSAVQEEFMTSRVNWVVQSSAVDYLHLMLVAMKWLFEEFAISIHDEVRYLVREEDRYRAALALQITNLLTRCMFAYKLGLNDLPQSVAFFSAVDIDRCLRKEVTMDCKTPSNPTGMERRYGIPQGEALDIYQIIELTKGSLEKRSQPGP

SEQ ID NO: 845958 - protein, 815 aa, Homo sapiens
MSRLLWRKVAGATVGPGPVPAPGRWVSSSVPASDPSDGQRRRQQQQQQQQQQQQQPQQPQVLSSEGGQLRHNPLDIQMLSRGLHEQIFGQGGEMPGEAAVRRSVEHLQKHGLWGQPAVPLPDVELRLPPLYGDNLDQHFRLLAQKQSLPYLEAANLLLQAQLPPKPPAWAWAEGWTRYGPEGEAVPVAIPEERALVFDVEVCLAEGTCPTLAVAISPSAWYSWCSQRLVEERYSWTSQLSPADLIPLEVPTGASSPTQRDWQEQLVVGHNVSFDRAHIREQYLIQGSRMRFLDTMSMHMAISGLSSFQRSLWIAAKQGKHKVQPPTKQGQKSQRKARRGPAISSWDWLDISSVNSLAEVHRLYVGGPPLEKEPRELFVKGTMKDIRENFQDLMQYCAQDVWATHEVFQQQLPLFLERCPHPVTLAGMLEMGVSYLPVNQNWERYLAEAQGTYEELQREMKKSLMDLANDACQLLSGERYKEDPWLWDLEWDLQEFKQKKAKKVKKEPATASKLPIEGAGAPGDPMDQEDLGPCSEEEEFQQDVMARACLQKLKGTTELLPKRPQHLPGHPGWYRKLCPRLDDPAWTPGPSLLSLQMRVTPKLMALTWDGFPLHYSERHGWGYLVPGRRDNLAKLPTGTTLESAGVVCPYRAIESLYRKHCLEQGKQQLMPQEAGLAEEFLLTDNSAIWQTVEELDYLEVEAEAKMENLRAAVPGQPLALTARGGPKDTQPSYHHGNGPYNDVDIPGCWFFKLPHKDGNSCNVGSPFAKDFLPKMEDGTLQAGPGGASGPRALEINKMISFWRNAHKRISPLLSAY

SEQ ID NO: 845959 - protein, 1080 aa, Homo sapiens
MSRLLWRKVAGATVGPGPVPAPGRWVSSSVPASDPSDGQRRRQQQQQQQQQQQQQPQQPQVLSSEGGQLRHNPLDIQMLSRGLHEQIFGQGGEMPGEAAVRRSVEHLQKHGLWGQPAVPLPDVELRLPPLYGDNLDQHFRLLAQKQSLPYLEAANLLLQAQLPPKPPAWAWAEGWTRYGPEGEAVPVAIPEERALVFDVEVCLAEGTCPTLAVAISPSAWYSWCSQRLVEERYSWTSQLSPADLIPLEVPTGASSPTQRDWQEQLVVGHNVSFDRAHIREQYLIQGSRMRFLDTMSMHMAISGLSSFQRSLWIAAKQGKHKVQPPTKQGQKSQRKARRGPAISSWDWLDISSVNSLAEVHRLYVGGPPLEKEPRELFVKGTMKDIRENFQDLMQYCAQDVWATHEVFQQQLPLFLERCPHPVTLAGMLEMGVSYLPVNQNWERYLAEAQGTYEELQREMKKSLMDLANDACQLLSGERYKEDPWLWDLEWDLQEFKQKKAKKVKKEPATASKLPIEGAGAPGDPMDQEDLGPCSEEEEFQQDVMARACLQKLKGTTELLPKRPQHLPGHPGWYRKLCPRLDDPAWTPGPSLLSLQMRVTPKLMALTWDGFPLHYSERHGWGYLVPGRRDNLAKLPTGTTLESAGVVCPYRAIESLYRKHCLEQGKQQLMPQEAGLAEEFLLTDNSAIWQTVEELDYLEVEAEAKMENLRAAVPGQPLALTARGGPKDTQPSYHHGNGPYNDVDIPGCWFFKLPHKDGNSCNVGSPFAKDFLPKMEDGTLQAGPGGASGPRALEINKMISFWRNAHKRISSQMVVWLPRSALPRAVIRHPDYDEEGLYGAILPQVVTAGTITRRAVEPTWLTASNARPDRVGSELKAMVQAPPGYTLVGADVDSQELWIAAVLGDAHFAGMHGCTAFGWMTLQGRKSRGTDLHSKTATTVGISREHAKIFNYGRIYGAGQPFAERLLMQFNHRLTQQEAAEKAQQMYAATKGLRWYRLSDEGEWLVRELNLPVDRTEGGWISLQDLRKVQRETARKSQWKKWEVVAERAWKGGTESEMFNKLESIATSDIPRTPCPRRGKN

SEQ ID NO: 845960 - protein, 58 aa, Homo sapiens [sequence omitted]

SEQ ID NO: 845961 - protein, 101 aa, Homo sapiens
ILGPPSALQTCTFPVRAPAVLGPLTSPGLPLHPCFSPSSGSTFHMPLPSFPYDSLAAGSRVFWAYSLPALGEFRPLLSNHPLYPPALSPEDPSPRPAPGRR

SEQ ID NO: 845962 - protein, 122 aa, Homo sapiens
RARGHPSPGGDEAVPPGVSRRRVRLFSSRLRLPRLSFQVWFQNCRARHKKHTPQHPVPPSGAPPSRLPSALSDDIHYTPFSSPERARMVTLHGYIESHPFSVLTLPALPHLPVGAPQLPLSR

SEQ ID NO: 845963 - protein, 365 aa, Homo sapiens
PEGCRLPAEGGPATDQVMAQPGSGCKATTRCLEGTAPPAMAQSDAEALAGALDKDEGQASPCTPSTPSVCSPPSAASSVPSAGKNICSSCGLEILDRYLLKVNNLIWHVRCLECSVCRTSLRQQNSCYIKNKEIFCKMDYFSRFGTKCARCGRQIYASDWVRRARGNAYHLACFACFSCKRQLSTGEEFGLVEEKVLCRIHYDTMIENLKRAAENGNGLTLEGAVPSEQDSQPKPAKRARTSFTAEQLQVMQAQFAQDNNPDAQTLQKLADMTGLSRRVIQVWFQNCRARHKKHTPQHPVPPSGAPPSRLPSALSDDIHYTPFSSPERARMVTLHGYIESHPFSVLTLPALPHLPVGAPQLPLSR

SEQ ID NO: 845964 - protein, 380 aa, Homo sapiens
PEGCRLPAEGGPATDQVMAQPGSGCKATTRCLEGTAPPAMAQSDAEALAGALDKDEGQASPCTPSTPSVCSPPSAASSVPSAGKNICSSCGLEILDRYLLKVNNLIWHVRCLECSVCRTSLRQQNSCYIKNKEIFCKMDYFSRFGTKCARCGRQIYASDWVRRARGNAYHLACFACFSCKRQLSTGEEFGLVEEKVLCRIHYDTMIENLKRAAENGNGLTLEGAVPSEQDSQPKPAKRARTSFTAEQLQVMQAQFAQDNNPDAQTLQKLADMTGLSRRVIQVWFQNCRARHKKHTPQHPVPPSGAPPSRLPSALSDDIHYTPFSSPERARMVTLHGYIESQVQCGQVHCRLPYTAPPVHLKADMDGPLSNRGEKVILFQY

SEQ ID NO: 845965 - protein, 137 aa, Homo sapiens
RARGHPSPGGDEAVPPGVSRRRVRLFSSRLRLPRLSFQVWFQNCRARHKKHTPQHPVPPSGAPPSRLPSALSDDIHYTPFSSPERARMVTLHGYIESQVQCGQVHCRLPYTAPPVHLKADMDGPLSNRGEKVILFQY

SEQ ID NO: 845966 - protein, 286 aa, Homo sapiens
MRLLPRLLLLLLLVFPATVLFRGGPRGLLAVAQDLTEDEETVEDSIIEDEDDEAEVEEDEPTDLVEDKEEEDVSGEPEASPSADTTILFVKGEDFPANNIVKFLVGFTNKGTEDFIVESLDASFRYPQDYQFYIQNFTALPLNTVVPPQRQATFEYSFIPAEPMGGRPFGLVINLNYKDLNGNVFQDAVFNQTVTVIEREDGLDGETIFMYMFLAGLGLLVIVGLHQLLESRKRKRPIQKVEMGTSSQNDVDMSWIPQETLNQINKASPRRLPRKRAQKRSVGSDE

SEQ ID NO: 845967 - protein, 286 aa, Homo sapiens; identical to SEQ ID NO: 845966

SEQ ID NO: 845968 - protein, 286 aa, Homo sapiens; identical to SEQ ID NO: 845966

SEQ ID NO: 845969 - protein, 286 aa, Homo sapiens; identical to SEQ ID NO: 845966

SEQ ID NO: 845970 - protein, 286 aa, Homo sapiens; identical to SEQ ID NO: 845966

SEQ ID NO: 845971 - protein, 290 aa, Homo sapiens
  misc_feature (12)..(12): Xaa can be any naturally occurring amino acid
  misc_feature (21)..(21): Xaa can be any naturally occurring amino acid
  misc_feature (24)..(26): Xaa can be any naturally occurring amino acid
LARTEDDRTHKXPRCCAFYSXLPXXXRAPQSLLAVAQDLTEDEETVEDSIIEDEDDEAEVEEDEPTDLVEDKEEEDVSGEPEASPSADTTILFVKGEDFPANNIVKFLVGFTNKGTEDFIVESLDASFRYPQDYQFYIQNFTALPLNTVVPPQRQATFEYSFIPAEPMGGRPFGLVINLNYKDLNGNVFQDAVFNQTVTVIEREDGLDGETIFMYMFLAGLGLLVIVGLHQLLESRKRKRPIQKVEMGTSSQNDVDMSWIPQETLNQINKASPRRLPRKRAQKRSVGSDE

SEQ ID NO: 845972 - protein, 218 aa, Homo sapiens
MRLLPRLLLLLLLVFPATVLFRGGPRGLLAVAQDLTEDEETVEDSIIEDEDDEAEVEEDEPTDLVEDKEEEDVSGEPEASPSADTTILFVKGEEPMGGRPFGLVINLNYKDLNGNVFQDAVFNQTVTVIEREDGLDGETIFMYMFLAGLGLLVIVGLHQLLESRKRKRPIQKVEMGTSSQNDVDMSWIPQETLNQINKASPRRLPRKRAQKRSVGSDE

SEQ ID NO: 845973 - protein, 286 aa, Homo sapiens; identical to SEQ ID NO: 845966

SEQ ID NO: 845974 - protein, 286 aa, Homo sapiens; identical to SEQ ID NO: 845966

SEQ ID NO: 845975 - protein, 286 aa, Homo sapiens; identical to SEQ ID NO: 845966

SEQ ID NO: 845976 - protein, 192 aa, Homo sapiens
MRLLPRLLLLLLLVFPATVLFRGGPRGLLAVAQDLTEDEETVEDSIIEDEDDEAEVEEDEPTDLVEDKEEEDVSGEPEASPSADTTILFVKGEDFPANNIVKFLVGFTNKGTEDFIVESLDASFRYPQDYQFYIQNFTALPLNTVVPPQRQATFEYSFIPAEPMGGRPFGLVINLNYKDLNVRSSKPSFCLS

SEQ ID NO: 845977 - protein, 286 aa, Homo sapiens; identical to SEQ ID NO: 845966

SEQ ID NO: 845978 - protein, 286 aa, Homo sapiens; identical to SEQ ID NO: 845966

SEQ ID NO: 845979 - protein, 286 aa, Homo sapiens; identical to SEQ ID NO: 845966

SEQ ID NO: 845980 - protein, 105 aa, Homo sapiens
MRLLPRLLLLLLLVFPATVLFRGGPRGLLAVAQDLTEDEETVEDSIIEDEDDEAEVEEDEPTDLVEDKEEEDVSGEPEASPSADTTILFVKGEATRVQKILLLNP

SEQ ID NO: 845981 - protein, 286 aa, Homo sapiens; identical to SEQ ID NO: 845966

SEQ ID NO: 845982 - protein, 286 aa, Homo sapiens; identical to SEQ ID NO: 845966

SEQ ID NO: 845983 - protein, 278 aa, Homo sapiens
MRLLPRLLLLLLLVFPATVLFRGGPRGLLAVAQDLTEDEETVEDSIIEDEDDEAEVEEDEPTDLVEDKEEEDVSGEPEASPSADTTILFVKGEDFPANNIVKFLVGFTNKGTEDFIVESLDASFRYPQDYQFYIQNFTALPLNTVVPPQRQATFEYSFIPAEPMGGRPFGLVINLNYKDLNGNVFQDAVFNQTVTVIEREDGLDGETIFMYMFLAGLGLLVIVGLHQLLESRKIKLHQEGCPGNGHRRDQWDLMSKCSFVQQFGLYLTCPNIFRPDGN

SEQ ID NO: 845984 - protein, 218 aa, Homo sapiens; identical to SEQ ID NO: 845972

SEQ ID NO: 845985 - protein, 305 aa, Homo sapiens
SSGAARGGVVWTEKVKGEARPCRFSSGSPGGLMSRSGTDPQQRQQASEADAAAATFRANDHQHIRYNPLQDEWVLVSAHRMKRPWQGQVEPQLLKTVPRHDPLNPLCPGAIRANGEIFENKGAMMGCSNPHPHCQVWASSFLPDIAQREERSQQAYKSQHGEPLLMEYSRQELLRKMSSSCSGLSRVLVAVATALVSASSPCPQAWGPPGVQYGQPGRSVKLCCPGVTAGDPVSWFRDGEPKLLQGPDSGLGHELVLAQADSTDEGTYICQTLDGALGGTVTLQLGYPPARPVVSCQAADYENFS

SEQ ID NO: 845986 - protein, 86 aa, Homo sapiens
ILGLGTGWRLLPVGSASGPQAESQALIPDLASIMKKLLTKYDNLFETSFPQAQRDLTPEQAAERLRALPEVHYHLGQKDRETATIA

SEQ ID NO: 845987 - protein, 423 aa, Homo sapiens
MPAHRDQPLEQRPPRRDSLGSSGAYNSFSVLRHKIFSSGSPGGLMSRSGTDPQQRQQASEADAAAATFRANDHQHIRYNPLQDEWVLVSAHRMKRPWQGQVEPQLLKTVPRHDPLNPLCPGAIRANGEVNPQYDSTFLFDNDFPALQPDAPSPGPSDHPLFQAKSARGVCKVMCFHPWSDVTLPLMSVPEIRAVVDAWASVTEELGAQYPWVQIFENKGAMMGCSNPHPHCQVWASSFLPDIAQREERSQQAYKSQHGEPLLMEYSRQELLRKERLVLTSEHWLVLVPFWATWPYQTLLLPRRHVRRLPELTPAERDDLASIMKKLLTKYDNLFETSFPYSMGWHGAPTGSEAGANWNHWQLHAHYYPPLLRSATVRKFMVGYEMLAQAQRDLTPEQAAERLRALPEVHYHLGQKDRETATIA

SEQ ID NO: 845988 - protein, 331 aa, Homo sapiens
MKRPWQGQVEPQLLKTVPRHDPLNPLCPGAIRANGEVNPQYDSTFLFDNDFPALQPDAPSPGPSDHPLFQAKSARGVCKVMCFHPWSDVTLPLMSVPEIRAVVDAWASVTEELGAQYPWVQIFENKGAMMGCSNPHPHCQVWASSFLPDIAQREERSQQAYKSQHGEPLLMEYSRQELLRKERLVLTSEHWLVLVPFWATWPYQTLLLPRRHVRRLPELTPAERDDLASIMKKLLTKYDNLFETSFPYSMGWHGAPTGSEAGANWNHWQLHAHYYPPLLRSATVRKFMVGYEMLAQAQRDLTPEQAAERLRALPEVHYHLGQKDRETATIA

SEQ ID NO: 845989 - protein, 408 aa, Homo sapiens
MPAHRDQPLEQRPPRRDSLGSSGAYNSFSVLRHKIFSSGSPGGLMSRSGTDPQQRQQASEADAAAATFRANDHQHIRYNPLQDEWVLVSAHRMKRPWQGQVEPQLLKTVPRHDPLNPLCPGAIRANGEVNPQYDSTFLFDNDFPALQPDAPSPGPSDHPLFQAKSARGVCKVMCFHPWSDVTLPLMSVPEIRAVVDAWASVTEELGAQYPWVQIFENKGAMMGCSNPHPHCQVWASSFLPDIAQREERSQQAYKSQHGEPLLMEYSRQELLRKERLVLTSEHWLVLVPFWATWPYQTLLLPRRHVRRLPELTPAERDDLASIMKKLLTKYDNLFETSFPYSMGWHGEAFQVPIFSPNTISGLLGLSLVNCNLKGASLETVAGGSGQSRDAGTEGGAANLVKLHLQCAF

SEQ ID NO: 845990 - protein, 395 aa, Homo sapiens
MPAHRDQPLEQRPPRRDSLGSSGAYNSFSVLRHKIFSSGSPGGLMSRSGTDPQQRQQASEADAAAATFRANDHQHIRYNPLQDEWVLVSAHRMKRPWQGQVEPQLLKTVPRHDPLNPLCPGAIRANGEVNPQYDSTFLFDNDFPALQPDAPSPGPSDHPLFQAKSARGVCKVMCFHPWSDVTLPLMSVPEIRAVVDAWASVTEELGAQYPWVQIFENKGAMMGCSNPHPHCQVWASSFLPDIAQREERSQQAYKSQHGEPLLMEYSRQELLRKERLVLTSEHWLVLVPFWATWPYQTLLLPRRHVRRLPELTPAERDGAPTGSEAGANWNHWQLHAHYYPPLLRSATVRKFMVGYEMLAQAQRDLTPEQAAERLRALPEVHYHLGQKDRETATIA

SEQ ID NO: 845991 - protein, 251 aa, Homo sapiens [sequence omitted]

SEQ ID NO: 845992 - protein, 251 aa, Homo sapiens [sequence omitted]

SEQ ID NO: 845993 - protein, 407 aa, Homo sapiens
MPAHRDQPLEQRPPRRDSLGSSGAYNSFSVLRHKIFSSGSPGGLMSRSGTDPQQRQQASEADAAAATFRANDHQHIRYNPLQDEWVLVSAHRMKRPWQGQVEPQLLKTVPRHDPLNPLCPGAIRANGEVNPQYDSTFLFDNDFPALQPDAPSPGPSDHPLFQAKSARGVCKVMCFHPWSDVTLPLMSVPEIRAVVDAWASVTEELGAQYPWVQIFENKGAMMGCSNPHPHCQVWASSFLPDIAQREERSQQAYKSQHGEPLLMEYSRQELLRKERLVLTSEHWLVLVPFWATWPYQTLLLPRRHVRRLPELTPAERDDLASIMKKLLTKYDNLFETSFPYSMGWHGAPTGSEAGANWNHWQLHAHYYPPLLRSATVRKFMVGYEMLAQAQRDLTPEQVRTQNSLASP

SEQ ID NO: 845994 - protein, 203 aa, Homo sapiens
MMGCSNPHPHCQVWASSFLPDIAQREERSQQAYKSQHGEPLLMEYSRQELLRKERLVLTSEHWLVLVPFWATWPYQTLLLPRRHVRRLPELTPAERDDLASIMKKLLTKYDNLFETSFPYSMGWHGAPTGSEAGANWNHWQLHAHYYPPLLRSATVRKFMVGYEMLAQAQRDLTPEQAAERLRALPEVHYHLGQKDRETATIA

SEQ ID NO: 845995 - protein, 272 aa, Homo sapiens
MPAHRDQPLEQRPPRRDSLGSSGAYNSFSVLRHKIFSSGSPGGLMSRSGTDPQQRQQASEADAAAATFRANDHQHIRYNPLQDEWVLVSAHRMKRPWQGQVEPQLLKTVPRHDPLNPLCPGAIRANGEVNPQYDSTFLFDNDFPALQPDAPSPGPSDHPLFQAKSARGVCKVMCFHPWSDVTLPLMSVPEIRAVVDAWASVTEELGAQYPWVQVWASSFLPDIAQREERSQQAYKSQHGEPLLMEYSRQELLRKVGESQALCPQGVPNFLIP

SEQ ID NO: 845996 - protein, 166 aa, Homo sapiens
MPAHRDQPLEQRPPRRDSLGSSGAYNSFSVLRHKIFSSGSPGGLMSRSGTDPQQRQQASEADAAAATFRANDHQHIRYNPLQDEWVLVSAHRMKRPWQGQVEPQLLKTVPRHDPLNPLCPGAIRANGEVNPQYDSTFLFDNDFPALQPDAPSPGNLAPTAAGEEGG

SEQ ID NO: 845997 - protein, 412 aa, Homo sapiens
MPAHRDQPLEQRPPRRDSLGSSGAYNSFSVLRHKIFSSGSPGGLMSRSGTDPQQRQQASEADAAAATFRANDHQHIRYNPLQDEWVLVSAHRMKRPWQGQVEPQLLKTVPRHDPLNPLCPGAIRANGEVNPQYDSTFLFDNDFPALQPDAPSPGPSDHPLFQAKSARGVWELWISPLTTFKPELETQHWGSALPVAQPSPTSRLSFLPSPPSKVMCFHPWSDVTLPLMSVPEIRAVVDAWASVTEELGAQYPWVQIFENKGAMMGCSNPHPHCQVWASSFLPDIAQREERSQQAYKSQHGEPLLMEYSRQELLRKKGATRSLEDGALRGHGRTTNSCVPGACGGEAERNRGREIYTPQGKTVTEYAHCKSVSYPGARCHDRGARDAKWPQHRNGEVITSRTDQAPQKERTSS

SEQ ID NO: 845998 - protein, 411 aa, Homo sapiens
SSGAARGGVVWTEKVKGEARPCRFSSGSPGGLMSRSGTDPQQRQQASEADAAAATFRANDHQHIRYNPLQDEWVLVSAHRMKRPWQGQVEPQLLKTVPRHDPLNPLCPGAIRANGEVNPQYDSTFLFDNDFPALQPDAPSPGPSDHPLFQAKSARGVCKVMCFHPWSDVTLPLMSVPEIRAVVDAWASVTEELGAQYPWVQIFENKGAMMGCSNPHPHCQVWASSFLPDIAQREERSQQAYKSQHGEPLLMEYSRQELLRKERLVLTSEHWLVLVPFWATWPYQTLLLPRRHVRRLPELTPAERDDLASIMKKLLTKYDNLFETSFPYSMGWHGAPTGSEAGANWNHWQLHAHYYPPLLRSATVRKFMVGYEMLAQAQRDLTPEQAAERLRALPEVHYHLGQKDRETATIA

SEQ ID NO: 845999 - protein, 423 aa, Homo sapiens; identical to SEQ ID NO: 845987

SEQ ID NO: 846000 - protein, 408 aa, Homo sapiens; identical to SEQ ID NO: 845989

SEQ ID NO: 846001 - protein, 423 aa, Homo sapiens; identical to SEQ ID NO: 845987

SEQ ID NO: 846002 - protein, 423 aa, Homo sapiens; identical to SEQ ID NO: 845987

SEQ ID NO: 846003 - protein, 465 aa, Homo sapiens
MPAHRDQPLEQRPPRRDSLGSSGAYNSFSVLRHKIFSSGSPGGLMSRSGTDPQQRQQASEADAAAATFRANDHQHIRYNPLQDEWVLVSAHRMKRPWQGQVEPQLLKTVPRHDPLNPLCPGAIRANGEVNPQYDSTFLFDNDFPALQPDAPSPGPSDHPLFQAKSARGVWELWISPLTTFKPELETQHWGSALPVAQPSPTSRLSFLPSPPSKVMCFHPWSDVTLPLMSVPEIRAVVDAWASVTEELGAQYPWVQIFENKGAMMGCSNPHPHCQVWASSFLPDIAQREERSQQAYKSQHGEPLLMEYSRQELLRKERLVLTSEHWLVLVPFWATWPYQTLLLPRRHVRRLPELTPAERDDLASIMKKLLTKYDNLFETSFPYSMGWHGAPTGSEAGANWNHWQLHAHYYPPLLRSATVRKFMVGYEMLAQAQRDLTPEQAAERLRALPEVHYHLGQKDRETATIA

SEQ ID NO: 846004 - protein, 251 aa, Homo sapiens [sequence omitted]

SEQ ID NO: 846005 - protein, 270 aa, Homo sapiens
MTLSTLCVLGPSEPTESKVMCFHPWSDVTLPLMSVPEIRAVVDAWASVTEELGAQYPWVQIFENKGAMMGCSNPHPHCQVWASSFLPDIAQREERSQQAYKSQHGEPLLMEYSRQELLRKERLVLTSEHWLVLVPFWATWPYQTLLLPRRHVRRLPELTPAERDDLASIMKKLLTKYDNLFETSFPYSMGWHGAPTGSEAGANWNHWQLHAHYYPPLLRSATVRKFMVGYEMLAQAQRDLTPEQAAERLRALPEVHYHLGQKDRETATIA

SEQ ID NO: 846006 - protein, 119 aa, Homo sapiens [sequence omitted]

SEQ ID NO: 846007 - protein, 174 aa, Homo sapiens
MPAHRDQPLEQRPPRRDSLGSSGAYNSFSVLRHKIFSSGSPGGLMSRSGTDPQQRQQASEADAAAATFRANDHQHIRYNPLQDEWVLVSAHRMKRPWQGQVEPQLLKTVPRHDPLNPLCPGAIRANGEVNPQYDSTFLFDNDFPALQPDAPSPGPSDHPLFQAKSARGVWLQRD

SEQ ID NO: 846008 - protein, 751 aa, Homo sapiens
MGPQGARRQAFLAFGDVTVDFTQKEWRLLSPAQRALYREVTLENYSHLVSLGILHSKPELIRRLEQGEVPWGEERRRRPGPCAGIYAEHVLRPKNLGLAHQRQQQLQFSDQSFQSDTAEGQEKEKSTKPMAFSSPPLRHAVSSRRRNSVVEIESSQGQRENPTEIDKVLKGIENSRWGAFKCAERGQDFSRKMMVIIHKKAHSRQKLFTCRECHQGFRDESALLLHQNTHTGEKSYVCSVCGRGFSLKANLLRHQRTHSGEKPFLCKVCGRGYTSKSYLTVHERTHTGEKPYECQECGRRFNDKSSYNKHLKAHSGEKPFVCKECGRGYTNKSYFVVHKRIHSGEKPYRCQECGRGFSNKSHLITHQRTHSGEKPFACRQCKQSFSVKGSLLRHQRTHSGEKPFVCKDCERSFSQKSTLVYHQRTHSGEKPFVCRECGQGFIQKSTLVKHQITHSEEKPFVCKDCGRGFIQKSTFTLHQRTHSEEKPYGCRECGRRFRDKSSYNKHLRAHLGEKRFFCRDCGRGFTLKPNLTIHQRTHSGEKPFMCKQCEKSFSLKANLLRHQWTHSGERPFNCKDCGRGFILKSTLLFHQKTHSGEKPFICSECGQGFIWKSNLVKHQLAHSGKQPFVCKECGRGFNWKGNLLTHQRTHSGEKPFVCNVCGQGFSWKRSLTRHHWRIHSKEKPFVCQECKRGYTSKSDLTVHERIHTGERPYECQECGRKFSNKSYYSKHLKRHLREKRFCTGSVGEASS

SEQ ID NO: 846009 - protein, 751 aa, Homo sapiens; identical to SEQ ID NO: 846008

SEQ ID NO: 846010 - protein, 622 aa, Homo sapiens [sequence omitted]

SEQ ID NO: 846011 - protein, 751 aa, Homo sapiens; identical to SEQ ID NO: 846008

SEQ ID NO: 846012 - protein, 558 aa, Homo sapiens
MVIIHKKAHSRQKLFTCRECHQGFRDESALLLHQNTHTGEKSYVCSVCGRGFSLKANLLRHQRTHSGEKPFLCKVCGRGYTSKSYLTVHERTHTGEKPYECQECGRRFNDKSSYNKHLKAHSGEKPFVCKECGRGYTNKSYFVVHKRIHSGEKPYRCQECGRGFSNKSHLITHQRTHSGEKPFACRQCKQSFSVKGSLLRHQRTHSGEKPFVCKDCERSFSQKSTLVYHQRTHSGEKPFVCRECGQGFIQKSTLVKHQITHSEEKPFVCKDCGRGFIQKSTFTLHQRTHSEEKPYGCRECGRRFRDKSSYNKHLRAHLGEKRFFCRDCGRGFTLKPNLTIHQRTHSGEKPFMCKQCEKSFSLKANLLRHQWTHSGERPFNCKDCGRGFILKSTLLFHQKTHSGEKPFICSECGQGFIWKSNLVKHQLAHSGKQPFVCKECGRGFNWKGNLLTHQRTHSGEKPFVCNVCGQGFSWKRSLTRHHWRIHSKEKPFVCQECKRGYTSKSDLTVHERIHTGERPYECQECGRKFSNKSYYSKHLKRHLREKRFCTGSVGEASS

SEQ ID NO: 846013 - protein, 751 aa, Homo sapiens; identical to SEQ ID NO: 846008

SEQ ID NO: 846014 - protein, 128 aa, Homo sapiens
MSLSWICREPGSLDLLARSPQGNCAGAPSPDPQLVLESHQLSHMGRAAAPSHPLTSLLPQIGHLQASLLRGEQEDSHGTSGSQETGFLGIWGCHCGFHPEGMEAAEPCSEGPVQGGDTGELQPPGLTR

SEQ ID NO: 846015 - protein, 745 aa, Homo sapiens [sequence omitted]

SEQ ID NO: 846016 - protein, 650 aa, Homo sapiens
MVGPGPTAAAAVEERQRKLQEYLAAKGKLKSQNTKPYLKSKNNCQNQPPSKSTIRPKNDVTNHVVLPVKPKRSISIKLQPRPPNTAGSQKPKLEPPKLLGKRLTSECVSSNPYSKPSSKSFQQCEAGSSTTGELSRKPVGSLNIEQLKTTKQQLTDQGNGKCIDFMNNIHVENESLDNFLKETNKENLLDILTEPERKPDPKLYTRSKPKTDSYNQTKNSLVPKQALGKSSVNSAVLKDRVNKQFVGETQSRTFPVKSQQLSSGADLARPGVKPSRTVPSHFIRTLSKVQSSKKPVVKNIKDIKVNRSQYERPNETKIRSYPVTEQRVKHTKPRTYPSLLQGEYNNRHPNIKQDQKSSQVCIPQTSCVLQKSKAISQRPNLTVGRFNSAIPSTPSIRPNGTSGNKHNNNGFQQKAQTLDSKLKKAVPQNHFLNKTAPKTQADVTTVNGTQTNPNIKKKATAEDRRKQLEEWQKSKGKTYKRPPMELKTKRKVIKEMNISFWKSIEKEEEEKKAQLELSSKINNTLTECLNLIEGGVPSNEILNILSSIPEAEKFAKFWICKAKLLASKGTFDVIGLYEEAIKNGATPIQELRKVVLNILQDSNRTTEGITSDSSVAETSITSKVPLLANNFALQIQSLANISASGSSLSL

SEQ ID NO: 846017 - protein, 648 aa, Homo sapiens
MVGPGPTAAAAVEERQRKLQEYLAAKGKLKSQNTKPYLKSKNNCQNQPPSKSTIRPKNDVTNHVVLPVKPKRSISIKLQPRPPNTAGSQKPKLEPPKLLGKRLTSECVSSNPYSKPSSKSFQQCEAGSSTTGELSRKPVGSLNIEQLKTTKQQLTDQGNGKCIDFMNNIHVENESLDNFLKETNKENLLDILTEPERKPDPKLYTRSKPKTDSYNQTKNSLVPKQALGKSSVNSAVLKDRVNKQFVGETQSRTFPVKSQQLSSGADLARPGVKPSRTVPSHFIRTLSKVQSSKKPVVKNIKDIKVNRSQYERPNETKIRSYPVTEQRVKHTKPRTYPSLLQGEYNNRHPNIKQDQKSSQVCIPQTSCVLQKSKAISQRPNLTVGRFNSAIPSTPSIRPNGTSGNKHNNNGFQQKAQTLDSKLKKAVPQNHFLNKTAPKTQADVTTVNGTQTNPNIKKKATAEDRRKQLEEWQKSKGKTYKRPPMELKTKRKVIKEMNISFWKSIEKEEEEKKAQLELSSKINNTLTECLNLIEGGVPSNEILNILSSIPEAEKFAKFWICKAKLLASKGTFDVIGLYEEAIKNGATPIQELRKVVLNILQDSNRTTEGTIIFEFKFIFSSCTSKNHPGHIGKRRKESSPEMLLTSWFP

SEQ ID NO: 846018 - protein, 389 aa, Homo sapiens
IILYEQQIGEFFYNQKGLREVLVFLDSHCEVNVMWLQPLLAAIREDRHTVVCPVIDIISADTLAYSSSPVVRGGFNWGLHFKWDLVPLSELGRAEGATAPIKSPTMAGGLFAMNRQYFHELGQYDSGMDIWGGENLEISFRIWMCGGKLFIIPCSRVGHIFRKRRPYGSPEGQDTMTHNSLRLAHVWLDEYKEQYFSLRPDLKTKSYGNISERVELRKKLGCKSFKWYLDNVYPEMQISGSHAKPQQPIFVNRGPKRPKVLQRGRLYHLQTNKCLVAQGRPSQKGGLVVLKACDYSDPNQIWIYNEEHELVLNSLLCLDMSETRSSDPPRLMKCHGSGGSQQWTFGKNNRLYQVSVGQCLRAVDPLGQKGSVAMAICDGSSSQQWHLEG

SEQ ID NO: 846019 - protein, 209 aa, Homo sapiens
MALAHVWLDEYKEQYFSLRPDLKTKSYGNISERVELRKKLGCKSFKWYLDNVYPEMQISGSHAKPQQPIFVNRGPKRPKVLQRGRLYHLQTNKCLVAQGRPSQKGGLVVLKACDYSDPNQIWIYNEEHELVLNSLLCLDMSETRSSDPPRLMKCHGSGGSQQWTFGKNNRLYQVSVGQCLRAVDPLGQKGSVAMAICDGSSSQQWHLEG

SEQ ID NO: 846020 - protein, 106 aa, Homo sapiens
MPRVRRIPAVDLWEKQSAIPGVGWTVPESSGSPGSEGLCRHGDLRWLLFTAVAFGRLRWMLWRERCFIRRCLRCGVWGFRKAWVGWSRTILEKMTVPCPPGDAWVC

SEQ ID NO: 846021 - protein, 118 aa, Homo sapiens [sequence omitted]

SEQ ID NO: 846022 - protein, 608 aa, Homo sapiens
MGSVTVRYFCYGCLFTSATWTVLLFVYFNFSEVTQPLKNVPVKGSGPHGPSPKKFYPRFTRGPSRVLEPQFKANKIDDVIDSRVEDPEEGHLKFSSELGMIFNERDQELRDLGYQKHAFNMLISDRLGYHRDVPDTRNAACKEKFYPPDLPAASVVICFYNEAFSALLRTVHSVIDRTPAHLLHEIILVDDDSDFDDLKGELDEYVQKYLPGKIKVIRNTKREGLIRGRMIGAAHATGEVLVFLDSHCEVNVMWLQPLLAAIREDRHTVVCPVIDIISADTLAYSSSPVVRGGFNWGLHFKWDLVPLSELGRAEGATAPIKSPTMAGGLFAMNRQYFHELGQYDSGMDIWGGENLEISFRIWMCGGKLFIIPCSRVGHIFRKRRPYGSPEGQDTMTHNSLRLAHVWLDEYKEQYFSLRPDLKTKSYGNISERVELRKKLGCKSFKWYLDNVYPEMQISGSHAKPQQPIFVNRGPKRPKVLQRGRLYHLQTNKCLVAQGRPSQKGGLVVLKACDYSDPNQIWIYNEEHELVLNSLLCLDMSETRSSDPPRLMKCHGSGGSQQWTFGKNNRLYQVSVGQCLRAVDPLGQKGSVAMAICDGSSSQQWHLEG

SEQ ID NO: 846023 - protein, 284 aa, Homo sapiens [sequence omitted]

SEQ ID NO: 846024 - protein, 557 aa, Homo sapiens
MGSVTVRYFCYGCLFTSATWTVLLFVYFNFSEVTQPLKNVPVKGSGPHGPSPKKFYPRFTRGPSRVLEPQFKANKIDDVIDSRVEDPEEGHLKFSSELGMIFNERDQELRDLGYQKHAFNMLISDRLGYHRDVPDTRNAACKEKFYPPDLPAASVVICFYNEAFSALLRTVHSVIDRTPAHLLHEIILVDDDSDFDDLKGELDEYVQKYLPGKIKVIRNTKREGLIRGRMIGAAHATGEVLVFLDSHCEVNVMWLQPLLAAIREDRHTVVCPVIDIISADTLAYSSSPVVRGGFNWGLHFKWDLVPLSELGRAEGATAPIKSPTMAGGLFAMNRQYFHELGQYDSGMDIWGGENLEISFRIWMCGGKLFIIPCSRVGHIFRKRRPYGSPEGQDTMTHNSLRLAHVWLDEYKEQYFSLRPDLKTKSYGNISERVELRKKLGCKSFKWYLDNVYPEMQISGSHAKPQQPIFVNRGPKRPKVLQRGRLYHLQTNKCLVAQGRPSQKGGLVVLKACDYSDPNQIWIYNEEHELVLNSLLCLDMCGLMSSFIGLMKVKAKLT

SEQ ID NO: 846025 - protein, 68 aa, Homo sapiens
FHCRGGVELAAAVGASGVNGWLLHPAAPSPLQDGALLVTWFPYGFERFSCVFILEFVSLLIWFGCVPT

SEQ ID NO: 846026 - protein, 409 aa, Homo sapiens
PPSPRSPSSPRAAQGMAMAYLAWRLARRSCPSSLQVTSFPVVQLHMNRTAMRASQKDFENSMNQVKLLKKDPGNEVKLKLYALYKQATEGPCNMPKPGVFDLINKAKWDAWNALGSLPKEAARQNYVDLVSSLSPSLESSSQVEPGTDRKSTGFETLVVTSEDGITKIMFNRPKKKNAINTEMYHEIMRALKAASKDDSIITVLTGNGDYYSSGNDLTNFTDIPPGGVEEKAKNNAVLLREFVGCFIDFPKPLIAVVNGPAVGISVTLLGLFDAVYASDRATFHTPFSHLGQSPEGCSSYTFPKIMSPAKATEMLIFGKKLTAGEACAQGLVTEVFPDSTFQKEVWTRLKAFAKLPPNALRISKEVIRKREREKLHAVNAEECNVLQGRWLSDECTNAVVNFLSRKSKL

SEQ ID NO: 846027 - protein, 409 aa, Homo sapiens; identical to SEQ ID NO: 846026

SEQ ID NO: 846028 - protein, 240 aa, Homo sapiens
PPSPRSPSSPRAAQGMAMAYLAWRLARRSCPSSLQVTSFPVVQLHMNRTAMRASQKDFENSMNQVKLLKKDPGNEVKLKLYALYKQATEGPCNMPKPGVFDLINKAKWDAWNALGSLPKEAARQNYVDLVSSLSPSLESSSQVEPGTDRKSTGFETLVVTSEDGITKIMFNRPKKKNAINTEMYHEIMRALKAASKDDSIITVLTGNGDYYSSGNDLTNFTDIPPGGVEEKAKNNAVLLR

SEQ ID NO: 846029 - protein, 364 aa, Homo sapiens
MNRTAMRASQKDFENSMNQVKLLKKDPGNEVKLKLYALYKQATEGPCNMPKPGVFDLINKAKWDAWNALGSLPKEAARQNYVDLVSSLSPSLESSSQVEPGTDRKSTGFETLVVTSEDGITKIMFNRPKKKNAINTEMYHEIMRALKAASKDDSIITVLTGNGDYYSSGNDLTNFTDIPPGGVEEKAKNNAVLLREFVGCFIDFPKPLIAVVNGPAVGISVTLLGLFDAVYASDRATFHTPFSHLGQSPEGCSSYTFPKIMSPAKATEMLIFGKKLTAGEACAQGLVTEVFPDSTFQKEVWTRLKAFAKLPPNALRISKEVIRKREREKLHAVNAEECNVLQGRWLSDECTNAVVNFLSRKSKL

SEQ ID NO: 846030 - protein, 374 aa, Homo sapiens
MAYLAWRLARRSCPSSLQVTSFPVVQLHMNRTAMRASQKDFENSMNQVKLLKKDPGNEVKLTGVFDLINKAKWDAWNALGSLPKEAARQNYVDLVSSLSPSLESSSQVEPGTDRKSTGFETLVVTSEDGITKIMFNRPKKKNAINTEMYHEIMRALKAASKDDSIITVLTGNGDYYSSGNDLTNFTDIPPGGVEEKAKNNAVLLREFVGCFIDFPKPLIAVVNGPAVGISVTLLGLFDAVYASDRATFHTPFSHLGQSPEGCSSYTFPKIMSPAKATEMLIFGKKLTAGEACAQGLVTEVFPDSTFQKEVWTRLKAFAKLPPNALRISKEVIRKREREKLHAVNAEECNVLQGRWLSDECTNAVVNFLSRKSKL

SEQ ID NO: 846031 - protein, 143 aa, Homo sapiens
PPSPRSPSSPRAAQGMAMAYLAWRLARRSCPSSLQVTSFPVVQLHMNRTAMRASQKDFENSMNQVKLLKKDPGNEVKLKLYALYKQATEGPCNMPKPGVFDLINKAKWDAWNALGSLPKVSLLVTVLLFAVLLKKFVLLIKPL

SEQ ID NO: 846032 - protein, 251 aa, Homo sapiens
MAYLAWRLARRSCPSSLQVTSFPVVQLHMNRTAMRASQKDFENSMNQVKLLKKDPGNEVKLKLYALYKQATEGPCNMPKPGVFDLINKAKWDAWNALGSLPKEAARQNYVDLVSSLSPSLESSSQVEPGTDRKSTGFETLVVTSEDGITKIMFNRPKKKNAINTEMYHEIMRALKAASKDDSIITVLTGNGDYYSSGNDLTNFTDIPPGGVEEKAKNNAVLLRNWGRQRIPKPDGGARALGGSDPLGYEPV

SEQ ID NO: 846033 - protein, 308 aa, Homo sapiens
MAYLAWRLARRSCPSSLQVTSFPVVQLHMNRTAMRASQKDFENSMNQVKLLKKDPGNEVKLKLYALYKQATEGPCNMPKPGVFDLINKAKWDAWNALGSLPKEAARQNYVDLVSSLSPSLESSSQVEPGTDRKSTGFETLVVTSEDGITKIMFNRPKKKKKKKKSFWAGGAEKVFKQPFFGGAGPFGVGTWAKRVQRESRAIQWGAWFPQIKKRGSTRGFLEHTSQVVVGGTPRAFTQGGQRSRLTRARGDSEKTRENHKTTEYNSYKEEEDNKQRRYKPNRQNLTQRNNSQEKQPTKKTRRENSMTN

SEQ ID NO: 846034 - protein, 409 aa, Homo sapiens; identical to SEQ ID NO: 846026

SEQ ID NO: 846035 - protein, 441 aa, Homo sapiens [sequence omitted]

SEQ ID NO: 846036 - protein, 143 aa, Homo sapiens; identical to SEQ ID NO: 846031

SEQ ID NO: 846037 - protein, 433 aa, Homo sapiens
PPSPRSPSSPRAAQGMAMAYLAWRLARRSCPSSLQVTSFPVVQLHMNRTAMRASQKDFENSMNQVKLLKKDPGNEVKLKLYALYKQATEGPCNMPKPGVFDLINKAKWDAWNALGSLPKEAARQNYVDLVSSLSPSLESSSQVEPGTDRKSTGFETLVVTSEDGITKIMFNRPKKKNAINTEEELVIVATSYNRVEHSLFRVCEFQMYHEIMRALKAASKDDSIITVLTGNGDYYSSGNDLTNFTDIPPGGVEEKAKNNAVLLREFVGCFIDFPKPLIAVVNGPAVGISVTLLGLFDAVYASDRATFHTPFSHLGQSPEGCSSYTFPKIMSPAKATEMLIFGKKLTAGEACAQGLVTEVFPDSTFQKEVWTRLKAFAKLPPNALRISKEVIRKREREKLHAVNAEECNVLQGRWLSDECTNAVVNFLSRKSKL

SEQ ID NO: 846038 - protein, 143 aa, Homo sapiens; identical to SEQ ID NO: 846031

SEQ ID NO: 846039 - protein, 181 aa, Homo sapiens
MADPGNRGGIHRPLSFTCSLLIVGMCCVSPFFCHSQTDLLALSQADPQCWESSSVLLLEMWKPRVSNTVSGFWDFMIYLKSSENLKHGALFWDLAQLFWDIYVDCVLSRNHGLGRRQLVGEEEKISAAQPQHTRSKQGTYSQLLRTSFLKKKELIEDLISMHVRRSGSSVIGKVNLEIKRK

SEQ ID NO: 846040 - protein, 158 aa, Homo sapiens [sequence omitted]

SEQ ID NO: 846041 - protein, 168 aa, Homo sapiens
MDPARPLGLSILLLFLTEAALGDAAQEPTGNNAEICLLPLDYGPCRALLLRYYYDRYTQSCRQFLYGGCEGNANNFYTWEACDDACWRIEKVPKVCRLQVSVDDQCEGSTEKYFFNLSSMTCEKFFSGGCHRNRIENRFPDEATCMGFCAPKKIPSFCYSIILLQSKR

SEQ ID NO: 846042 - protein, 168 aa, Homo sapiens; identical to SEQ ID NO: 846041

SEQ ID NO: 846043 - protein, 168 aa, Homo sapiens; identical to SEQ ID NO: 846041

SEQ ID NO: 846044 - protein, 168 aa, Homo sapiens; identical to SEQ ID NO: 846041

SEQ ID NO: 846045 - protein, 168 aa, Homo sapiens; identical to SEQ ID NO: 846041

SEQ ID NO: 846046 - protein, 168 aa, Homo sapiens; identical to SEQ ID NO: 846041

SEQ ID NO: 846047 - protein, 168 aa, Homo sapiens; identical to SEQ ID NO: 846041

SEQ ID NO: 846048 - protein, 138 aa, Homo sapiens
DLEDPIEHTLDYGPCRALLLRYYYDRYTQSCRQFLYGGCEGNANNFYTWEACDDACWRIEKVPKVCRLQVSVDDQCEGSTEKYFFNLSSMTCEKFFSGGCHRNRIENRFPDEATCMGFCAPKKIPSFCYSIILLQSKR

SEQ ID NO: 846049 - protein, 36 aa, Homo sapiens
MIIYTHSPPWYLLEVSRALSHSFENDELTERIKHLS

SEQ ID NO: 846050 - protein, 158 aa, Homo sapiens
MDPARPLGLSILLLFLTEAALGDAAQEPTGNNAEICLLPLDYGPCRALLLRYYYDRYTQSCRQFLYGGCEGNANNFYTWEACDDACWRIEKVPKVCRLQVSVDDQCEGSTEKYFFNLSSMTCEKFFSGGCHRNRIENRFPDEATCMGFCAPKKIPSFC

SEQ ID NO: 846051 - protein, 168 aa, Homo sapiens; identical to SEQ ID NO: 846041

SEQ ID NO: 846052 - protein, 239 aa, Homo sapiens
MDPARPLGLSILLLFLTEAALGDAAQEPTGNNAEICLLPLDYGPCRALLLRYYYDRYTQSCRQFLYGGCEGNANNFYTWEACDDACWRIEKVPKVCRLQVSVDDQCEGSTEKYFFNLSSMTCEKFFSGGCHRNRIENRFPDEATCMGFCAPKKIPSFCYSPKDEGLCSANVTRYYFNPRYRTCDAFTYTGCGGNDNNFVSREDCKRACAKALKKEKEDAQSFALPVESGKFGRSNFKHS

SEQ ID NO: 846053 - protein, 104 aa, Homo sapiens
MKLLVWASAHQRKFHHFAIPSFCYSPKDEGLCSANVTRYYFNPRYRTCDAFTYTGCGGNDNNFVSREDCKRACAKALKKEKEDAQSFALPVESGKFGRSNFKHS

SEQ ID NO: 846054 - protein, 168 aa, Homo sapiens; identical to SEQ ID NO: 846041

SEQ ID NO: 846055 - protein, 168 aa, Homo sapiens; identical to SEQ ID NO: 846041

SEQ ID NO: 846056 - protein, 158 aa, Homo sapiens; identical to SEQ ID NO: 846050

SEQ ID NO: 846057 - protein, 239 aa, Homo sapiens; identical to SEQ ID NO: 846052

SEQ ID NO: 846058 - protein, 158 aa, Homo sapiens; identical to SEQ ID NO: 846050

SEQ ID NO: 846059 - protein, 158 aa, Homo sapiens; identical to SEQ ID NO: 846050

SEQ ID NO: 846060 - protein, 210 aa, Homo sapiens
MDPARPLGLSILLLFLTEAALGDAAQEPTGNNAEICLLPLDYGPCRALLLRYYYDRYTQSCRQFLYGGCEGNANNFYTWEACDDACWRIEKVPKVCRLQVSVDDQCEGSTEKYFFNLSSMTCEKFFSGGCHRNRIENRFPDEATCMGFCAPKKIPSFCYSPKDEGLCSANVTRYYFNPRYRTCDAFTYTGCGGNDNNFVSSRRAAESRAD

SEQ ID NO: 846061 - protein, 181 aa, Homo sapiens
MDPARPLGLSILLLFLTEAALGDAAQEPTGNNAEICLLPLDYGPCRALLLRYYYDRYTQSCRQFLYGGCEGNANNFYTWEACDDACWRIEKVPKVCRLQVSVDDQCEGSTEKYFFNLSSMTCEKFFSGGCHRNRIENRFPDEATCMGFCAPKKIPSFCYSPKDEGLCSANVIDKHRYQLGF

SEQ ID NO: 846062 - protein, 168 aa, Homo sapiens; identical to SEQ ID NO: 846041

SEQ ID NO: 846063 - protein, 168 aa, Homo sapiens; identical to SEQ ID NO: 846041

SEQ ID NO: 846064 - protein, 168 aa, Homo sapiens; identical to SEQ ID NO: 846041

SEQ ID NO: 846065 - protein, 168 aa, Homo sapiens; identical to SEQ ID NO: 846041

SEQ ID NO: 846066 - protein, 168 aa, Homo sapiens; identical to SEQ ID NO: 846041

SEQ ID NO: 846067 - protein, 168 aa, Homo sapiens; identical to SEQ ID NO: 846041

SEQ ID NO: 846068 - protein, 168 aa, Homo sapiens; identical to SEQ ID NO: 846041

SEQ ID NO: 846069 - protein, 89 aa, Homo sapiens
EDPQLAWHRIEKVPKVCRLQVSVDDQCEGSTEKYFFNLSSMTCEKFFSGGCHRNRIENRFPDEATCMGFCAPKKIPSFCYSIILLQSKR

SEQ ID NO: 846070 - protein, 168 aa, Homo sapiens; identical to SEQ ID NO: 846041

SEQ ID NO: 846071 - protein, 239 aa, Homo sapiens; identical to SEQ ID NO: 846052

SEQ ID NO: 846072 - protein, 205 aa, Homo sapiens
MGLLPLDYGPCRALLLRYYYDRYTQSCRQFLYGGCEGNANNFYTWEACDDACWRIEKVPKVCRLQVSVDDQCEGSTEKYFFNLSSMTCEKFFSGGCHRNRIENRFPDEATCMGFCAPKKIPSFCYSPKDEGLCSANVTRYYFNPRYRTCDAFTYTGCGGNDNNFVSREDCKRACAKALKKEKEDAQSFALPVESGKFGRSNFKHS

SEQ ID NO: 846073 - protein, 173 aa, Homo sapiens
MDPARPLGLSILLLFLTEAALGDAAQEPTGNNAEICLLPLDYGPCRALLLRYYYDRYTQSCRQFLYGGCEGNANNFYTWEACDDACWRIEKVPKVCRLQVSVDDQCEGSTEKYFFNLSSMTCEKFFSGGCHRNRIENRFPDEATCMGFCAPKKIPSFCYSPKDEGLCSANVTA

SEQ ID NO: 846074 - protein, 118 aa, Homo sapiens
DSLGHRPPGPGRFLENSTNNFYTWEACDDACWRIEKVPKVCRLQVSVDDQCEGSTEKYFFNLSSMTCEKFFSGGCHRNRIENRFPDEATCMGFCAPKKIPSFCYSPKDEGLCSANVTA

SEQ ID NO: 846075 - protein, 168 aa, Homo sapiens; identical to SEQ ID NO: 846041

SEQ ID NO: 846076 - protein, 158 aa, Homo sapiens; identical to SEQ ID NO: 846050

SEQ ID NO: 846077 - protein, 158 aa, Homo sapiens; identical to SEQ ID NO: 846050

SEQ ID NO: 846078 - protein, 307 aa, Homo sapiens
MDPARPLGLSILLLFLTEAALGDAAQEPTGNNAEICLLPLDYGPCRALLLRYYYDRYTQSCRQFLYGGCEGNANNFYTWEACDDACWRIEKVPKVCRLQVSVDDQCEGSTEKYFFNLSSMTCEKFFSGGCHRNRIENRFPDEATCMGFCAPKKIPSFCYSPKDEGLCSANVTRYYFNPRYRTCDAFTYTGCGGNDNNFVSREDCKRACAKKEKQKKKQKFLADIRPTAEKVCKKPIRALGGRQHPEWCKGEERHTARVTIEKKPRDKRPKGGDISHHKQENRAAVITPQVCGNQHPEGDRGEPKGEV

SEQ ID NO: 846079 - protein, 180 aa, Homo sapiens
MDPARPLGLSILLLFLTEAALGDAAQEPTGNNAEICLLPLDYGPCRALLLRYYYDRYTQSCRQFLYGGCEGNANNFYTWEACDDACWRIEKVPKVCRLQVSVDDQCEGSTEKYFFNLSSMTCEKFFSGGCHRNRIENRFPDEATCMGFCAPKKIPSFCYSPKDEGLCSAHVTRYYFNPDD

SEQ ID NO: 846080 - protein, 289 aa, Homo sapiens
SSCLERPSNQLDWDVRSIQRWFRQRRNQEKPSTLTRLNEIMWRFSFYLYVFTYGVRFLKKTPWLWNTRHCWYNYPYQPLTTDLHYYYILELSFYWSLMFSQFTDIKRKDFGIMFLHHLVSIFLITFSYVNNMARVGTLVLCLHDSADALLEAAKMANYAKFQKMCDLLFVMFAVVFITTRLGIFPLWVLNTTLFESWEIVGPYPSWWVFNLLLLLVQGLNCFWSYLIVKIACKAVSRGKVSKDDRSDIESSSDEEDSEPPGKNPHTATTTNGTSGTNGYLLTGSCSMDD

SEQ ID NO: 846081 - protein, 289 aa, Homo sapiens; identical to SEQ ID NO: 846080

SEQ ID NO: 846082 - protein, 121 aa, Homo sapiens
MVDMMDLPRSRINAGMLAQFIDKPVCFVGRLEKIHPTGKMFILSDGEGKNGTIELMEPLDEEISGIVEVVGRVTAKATILCTSYVQFKEDSHPFDLGLYNEAVKIIHDFPQFYPLGIVQHD

SEQ ID NO: 846083 - protein, 121 aa, Homo sapiens; identical to SEQ ID NO: 846082

SEQ ID NO: 846084 - protein, 121 aa, Homo sapiens; identical to SEQ ID NO: 846082

SEQ ID NO: 846085 - protein, 121 aa, Homo sapiens; identical to SEQ ID NO: 846082

SEQ ID NO: 846086 - protein, 140 aa, Homo sapiens
MGTWTTSQRQWTCCCSTPTSDGLLGEPRLLHPCLSSTPASPPPLPLLHPPRRAPPPPPLPLLHPCLPSTCPSAQTNQGPDSPAFCPLPCMGRHLFPTWVACSPAWALTSAPCSEVQEGGTGLSGLWESPKSQNSPLTMGL

SEQ ID NO: 846087 - protein, 270 aa, Homo sapiens
MAPWGKRLAGVRGVLLDISGVLYDSGAGGGTAIAGSVEAVARLKRSRLKVRFCTNESQKSRAELVGQLQRLGFDISEQEVTAPAPAACQILKERGLRPYLLIHDGVRSEFDQIDTSNPNCVVIADAGESFSYQNMNNAFQVLMELEKPVLISLGKGRYYKETSGLMLDVGPYMKALEYACGIKAEVVGKPSPEFFKSALQAIGVEAHQAVMIGDDIVGDVGGAQRCGMRALQVRTGKFRPSDEHHPEVKADGYVDNLAEAVDLLLQHADK

SEQ ID NO: 846088 - protein, 270 aa, Homo sapiens; identical to SEQ ID NO: 846087

SEQ ID NO: 846089 - protein, 210 aa, Homo sapiens [sequence omitted]

SEQ ID NO: 846090 - protein, 100 aa, Homo sapiens
ENPGLAGMLSSLPPSLCQAGGKALAKAHKTPSHSRGTSSSRQSRLQVGWKGCAPDPRIARLSKTIPGCWPSDEHHPEVKADGYVDNLAEAVDLLLQHADK

SEQ ID NO: 846091 - protein, 107 aa, Homo sapiens
MGTWTTSQRQWTCCCSTPTSDGLLGEPRLLHPCLSTCPSAQTNQGPDSPAFCPLPCMGRHLFPTWVACSPAWALTSAPCSEVQEGGTGLSGLWESPKSQNSPLTMGL

SEQ ID NO: 846092 - protein, 426 aa, Homo sapiens
MAPWGKRLAGVRGVLLDISGVLYDSGAGGGTAIAGSVEAVARLKRSRLKVRFCTNESQKSRAELVGQLQRLGFDISEQEVTAPAPAACQILKERGLRPYLLIHDGVRSEFDQIDTSNPNCVVIADAGESFSYQNMNNAFQVLMELEKPVLISLGKGRYYKETSGLMLDVGPYMKALEYACGIKAEVVGKPSPEFFKSALQAIGVEAHQAVMIGDDIVGDVGGAQRCGMRALQVRTGKFRPSDEHHPEVKADGHFLALRGALSLAGADEPWCDACLGVGVAKKGGMTSFTPGSFRQPGHFQHVEGARALAETVWNRRPHAGLEFGAANGLRPCVQHMSRNCREKKTQDHRSGVLPGVFPTEAGSEQQPRPSHTSQARELPGQATVKGSRVGGGGEDRESRPLGPHPPLHLPALGPTQYQALGSMYHL

SEQ ID NO: 846093 - protein, 257 aa, Homo sapiens
MAPWGKRLAGVRGVLLDISGVLYDSGAGGGTAIAGSVEAVARLKRSRLKVRFCTNESQKSRAELVGQLQRLGFDISEQEVTAPAPAACQILKERGLRPYLLIHDGVRSEFDQIDTSNPNCVVIADAGESFSYQNMNNAFQVLMELEKPVLISLGKGRYYKETSGLMLDVGPYMKALEYACGIKAEVVGKPSPEFFKSALQAIGVEAHQAVMIGDDIVGDVGGAQRCGMRALQSRSTRVARHVLWTWCSHVLFSQDTP

SEQ ID NO: 846094 - protein, 249 aa, Homo sapiens
MLSSLPPSLCQAGGKALAKAHKTPSHSRGTSSSRQSRLQVGWKGCAPDPRIARLSKTIPGCWPSDEHHPEVKADGHFLALRGALSLAGADEPWCDACLGVGVAYEVRKTSFTPGSFRQPGHFQHVEGARALAETVWNRRPHAGLEFGAANGLRPCVQHMSRNCREKKTQDHRSGVLPGVFPTEAGSEQQPRPSHTSQARELPGQATVKGSRVGGGGEDRESRPLGPHPPLHLPALGPTQYQALGSMYHL

SEQ ID NO: 846095 - protein, 270 aa, Homo sapiens; identical to SEQ ID NO: 846087

SEQ ID NO: 846096 - protein, 87 aa, Homo sapiens
LRGELQLTQGRAAKSALQAMEWKPTAVMIGDDIVGDVGGAQRCGMRALQVRTGKFRPSDEHHPEVKADGYVDNLAEAVDLLLQHADK

SEQ ID NO: 846097 - protein, 134 aa, Homo sapiens
MGTWTTSQRQWTCCCSTPTSDGLLGEPRLLHPCLPPPLPLLHPPRRAPPPPPLPLLHPCLPSTCPSAQTNQGPDSPAFCPLPCMGRHLFPTWVACSPAWALTSAPCSEVQEGGTGLSGLWESPKSQNSPLTMGL

SEQ ID NO: 846098 - protein, 275 aa, Homo sapiens
MAPWGKRLAGVRGVLLDISGVLYDSGAGGGTAIAGSVEAVARLKRSRLKVRFCTNESQKSRAELVGQLQRLGFDISEQEVTAPAPAACQILKERGLRPYLLIHDGVRSEFDQIDTSNPNCVVIADAGESFSYQNMNNAFQVLMELEKPVLISLGKGRYYKETSGLMLDVGPYMKALEYACGIKAEVVGKPSPEFFKSALQAIGVEAHQAVMIGDDIVGDVGGAQRCGMRALQVRTGKFRSVPAGVIYSPSFQGMTTFSFCFVLQNKGDILSKSKS

SEQ ID NO: 846099 - protein, 169 aa, Homo sapiens
MAPWGKRLAGVRGVLLDISGVLYDSGAGGGTAIAGSVEAVARLKRSRLKVRFCTNESQKSRAELVGQLQRLGFDISEQEVTAPAPAACQILKERGLRPYLLIHDGVRSEFDQIDTSNPNCVVIADAGESFSYQNMNNAFQVLMELEKPVLISLGKGIHGFLFVARTFTS

SEQ ID NO: 846100 - protein, 144 aa, Homo sapiens
MDRFVWTSGLLEINETLVIQQRGVRIYDGEEKIKFDAGTLLLSTHRLIWRDQKNHECCMAILLSQIVFIEEQAAGIGKSAKIVVHLHPAPPNKEPGPFQSSKNSYIKLSFKEHGQIEVSFYMNKIVLERCVCVCVCVCVCVVAC

SEQ ID NO: 846101 - protein, 386 aa, Homo sapiens
MDRFVWTSGLLEINETLVIQQRGVRIYDGEEKIKFDAGTLLLSTHRLIWRDQKNHECCMAILLSQIVFIEEQAAGIGKSAKIVVHLHPAPPNKEPGPFQSSKNSYIKLSFKEHGQIEFYRRLSEEMTQRRWENMPVSQSLQTNRGPQPGRIRAVGIVGIERKLEEKRKETDKNISEAFEDLSKLMIKAKEMVELSKSIANKIKDKQGDITEDETIRFKSYLLSMGIANPVTRETYGSGTQYHMQLAKQLAGILQVPLEERGGIMSLTEVYCLVNRARGMELLSPEDLVNACKMLEALKLPLRLRVFDSGVMVIELQSHKEEEMVASALETVSEKGSLTSEEFAKLVGMSVLLAKERLLLAEKMGHLCRDDSVEGLRFYPNLFMTQS

SEQ ID NO: 846102 - protein, 386 aa, Homo sapiens; identical to SEQ ID NO: 846101

SEQ ID NO: 846103 - protein, 386 aa, Homo sapiens; identical to SEQ ID NO: 846101

SEQ ID NO: 846104 - protein, 253 aa, Homo sapiens [sequence omitted]

SEQ ID NO: 846105 - protein, 386 aa, Homo sapiens; identical to SEQ ID NO: 846101

SEQ ID NO: 846106 - protein, 386 aa, Homo sapiens; identical to SEQ ID NO: 846101

SEQ ID NO: 846107 - protein, 328 aa, Homo sapiens
MAILLSQIVFIEEQAAGIGKSAKIVVHLHPAPPNKEPGPFQSSKNSYIKLSFKEHGQIEFYRRLSEEMTQRRWENMPVSQSLQTNRGPQPGRIRAVGIVGIERKLEEKRKETDKNISEAFEDLSKLMIKAKEMVELSKSIANKIKDKQGDITEDETIRFKSYLLSMGIANPVTRETYGSGTQYHMQLAKQLAGILQVPLEERGGIMSLTEVYCLVNRARGMELLSPEDLVNACKMLEALKLPLRLRVFDSGVMVIELQSHKEEEMVASALETVSEKGSLTSEEFAKLVGMSVLLAKERLLLAEKMGHLCRDDSVEGLRFYPNLFMTQS

SEQ ID NO: 846108 - protein, 380 aa, Homo sapiens
MDRFVWTSGLLEINETLVIQQRGVRIYDGEEKIKFDAGTLLLSTHRLIWRDQKNHECCMAILLSQIVFIEEQAAGIGKSAKIVVHLHPAPPNKEPGPFQSSKNSYIKLSFKEHGQIEFYRRLSEEMTQRRWENMPVSQSLQTNRGPQPGRIRAVGIVGIERKLEEKRKETDKNISEAFEDLSKLMIKAKEMVELSKSIANKIKDKQGDITEDETIRFKSYLLSMGIANPVTRETYGSGTQYHMQLAKQLAGILQVPLEERGGIMSLTEVYCLVNRARGMELLSPEDLVNACKMLEALKLPLSGVMVIELQSHKEEEMVASALETVSEKGSLTSEEFAKLVGMSVLLAKERLLLAEKMGHLCRDDSVEGLRFYPNLFMTQS

SEQ ID NO: 846109 - protein, 355 aa, Homo sapiens
  misc_feature (287)..(287): Xaa can be any naturally occurring amino acid
MDRFVWTSGLLEINETLVIQQRGVRIYDGEEKIKFDAGTLLLSTHRLIWRDQKNHECCMAILLSQIVFIEEQAAGIGKSAKIVVHLHPAPPNKEPGPFQSSKNSYIKLSFKEHGQIEFYRRLSEEMTQRRWENMPVSQSLQTNRGPQPGRIRAVGIVGIERKLEEKRKETDKNISEAFEDLSKLMIKAKEMVELSKSIANKIKDKQGDITEDETIRFKSYLLSMGIANPVTRETYGSGTQYHMQLAKQLAGILQVPLELLSPEDLVNACKMLEALKLPLSSCVTGSXMTFVSRKNGAAGRSKGLLESVVGSGPTRGGRKGLAGPRRVPFDNGGDRRRGGGDTPIILYIETSPREK

SEQ ID NO: 846110 - protein, 491 aa, Homo sapiens
MEEGKMDENEWGYHGEGNKSLVVAHAQRCVVLRFLKFPPNRKKTSEEIFQHLQNIVDFGKNVMKEFLGENYVHYGEVVQLPLEFVKQLCLKIQSERPESRCDKDLDTLSGYAMCLPNLTRLQTYRFAEHRPILCVEIKPKCGFIPFSSDVTHEMKHKVCRYCMHQHLKVATGKWKQISKYCPLDLYSGNKQRMHFALKSLLQEAQNNLKIFKNGELIYGCKDARSPVADWSELAHHLKPFFFPSNGLASGPHCTRAVIRELVHVITRVLLSGSDKGRAGTLSPGLGPQGPRVCEASPFSRSLRCQGKNTPERSGLPKGCLLYKTLQVQMLDLLDIEGLYPLYNRVERYLEEFPEERKTLQIDGPYDEAFYQKLLDLSTEDDGTVAFALTKVQQYRVAMTAKDCSIMIALSPCLQDASSDQRPVVPSSRSRFAFSVSVLDLDLKPYESIPHQYKLDGKIVNYYSKTVRAKDNAVMSTRFKESEDCTLVLHKV

SEQ ID NO: 846111 - protein, 356 aa, Homo sapiens
MEEGKMDENEWGYHGEGNKSLVVAHAQRCVVLRFLKFPPNRKKTSEEIFQHLQNIVDFGKNVMKEFLGENYVHYGEVVQLPLEFVKQLCLKIQSERPESRCDKDLDTLSGYAMCLPNLTRLQTYRFAEHRPILCVEIKPKCGFIPFSSDVTHEMKHKVCRYCMHQHLKVATGKWKQISKYCPLDLYSGNKQRMHFALKSLLQEAQNNLKIFKNGELIYGCKDARSPVADWSELAHHLKPFFFPSNGLASGPHCTRAVIRELVHVITRVLLSGSDKGRAGTLSPGLGPQGPRVCEASPFSRSLRCQGKNTPERSGLPKGCLLYKTLQVQMLDLLDIEGLYPLYNRVERYLEEFPEER

SEQ ID NO: 846112 - protein, 172 aa, Homo sapiens
HDSTSIASESPWVAHDPGVLDQSPTSCWNGELIYGCKDARSPVADWSELAHHLKPFFFPSNGLASGPHCTRAVIRELVHVITRVLLSGSDKGRAGTLSPGLGPQGPRVCEASPFSRSLRCQGKNTPERSGLPKGCLLYKTLQVQMLDLLDIEGLYPLYNRVERYLEEFPEER

SEQ ID NO: 846113 - protein, 491 aa, Homo sapiens; identical to SEQ ID NO: 846110

SEQ ID NO: 846114 - protein, 356 aa, Homo sapiens; identical to SEQ ID NO: 846111

SEQ ID NO: 846115 - protein, 480 aa, Homo sapiens [sequence omitted]

SEQ ID NO: 846116 - protein, 203 aa, Homo sapiens
MGNIFEKLFKSLLGKKKMRILILSLDTAGKTTILYKLKLGETVPAVPTVGFCVETVEYKNNTFAVWDVGSHFKIRPLWQHFFQNTKGARSPGSTHQGSLASGVLPIKCSHVEFGMWKGGRSHPFLPHSSRCAGSGGQLDSILPHQSPAWGPWGCKDLSSGFPSFLTSSILWKSAVSYQLPSLHNSSRNYAGSPAQMMRHLLEA

SEQ ID NO: 846117 - protein, 176 aa, Homo sapiens
MGNIFEKLFKSLLGKKKMRILILSLDTAGKTTILYKLKLGETVPAVPTVGFCVETVEYKNNTFAVWDVGSHFKIRPLWQHFFQNTKGARSPGSTHQGSLASGVLPIKCSHVEFGMWKGGRSHPFLPHSSRCAGSGGQLDSILPHQSPAWGPWGCKDLSSGFPSFLTSSILWKSAVQ

SEQ ID NO: 846118 - protein, 177 aa, Homo sapiens
MGNIFEKLFKSLLGKKKMRILILSLDTAGKTTILYKLKLGETVPAVPTVGFCVETVEYKNNTFAVWDVGSHFKIRPLWQHFFQNTKGARSPGSTHQGSLASGVLPIKCSHVEFGMWKGGRSHPFLPHSSRCAGSGGQLDSILPHQSPAWGPWGCKDLSSGFPSFLTSSILWKSAVVK

SEQ ID NO: 846119 - protein, 132 aa, Homo sapiens
MGNIFEKLFKSLLGKKKMRILILSLDTAGKTTILYKLKLGETVPAVPTVGFCVETVEYKNNTFAVWDVGSHFKIRPLWQHFFQNTKGSCSIDQAGVQWRDLGSLQRPLPKLRAISFPVCTIHQEIMRGHRHK

SEQ ID NO: 846120 - protein, 125 aa, Homo sapiens; identical to SEQ ID NO: 772052

SEQ ID NO: 846121 - protein, 103 aa, Homo sapiens
MGNIFEKLFKSLLGKKKMRILILSLDTAGKTTILYKLKLGETVPAVPTVGFCVETVEYKNNTFAVWDVGSHFKIRPLWQHFFQNTKGKDYSVCSLDTVSVKCL

SEQ ID NO: 846122 - protein, 176 aa, Homo sapiens; identical to SEQ ID NO: 846117

SEQ ID NO: 846123 - protein, 177 aa, Homo sapiens; identical to SEQ ID NO: 846118

SEQ ID NO: 846124 - protein, 650 aa, Homo sapiens
MATALLAGEKLRELILPGAQDDKAGALAALLLQLKLELPFDRVVTIGTVLVPILLVTLVFTKNFAGWTLFSGSWDWLWGQNIKEPIYCYTPHNFTRDQALYARGYCWTELRDALPGVDASLWPSLFEHKFLPYALLAFAAIMYVPALGWEFLASTRLTSELNFLLQEIDNCYHRAAEGRAPKIEKQIQSKGPGITEREKREIIENAEKEKSPEQNLFEKYLERRGRSNFLAKLYLARHVLILLLSAVPISYLCTYYATQKQNEFTCALGASPDGAAGAGPAVRVSCKLPSVQLQRIIAGVDIVLLCVMNLIILVNLIHLFIFRKSNFIFDKLHKVGIKTRRQWRRSQFCDINILAMFCNENRDHIKSLNRLDFITNESDLMYDNVVRQLLAALAQSNHDATPTVRDSGVQTVDPSANPAEPDGAAEPPVVKRPRKKMKWIPTSNPLPQPFKEPLAIMRVENSKAEKPKPARRKTATDTLIAPLLDRSAHHYKGGGGDPGPGPAPAPAPPPAPDKKHARHFSLDVHPYILGTKKAKAEAVPAALPASRSQEGGFLSQAEDCGLGLAPAPIKDAPLPEKEIPYPTEPARAGLPSGGPFHVRSPPAAPAVAPLTPASLGKAEPLTILSRNATHPLLHINTLSSSPPSTSRERS

SEQ ID NO: 846125 - protein, 77 aa, Homo sapiens
MATALLAGEKLRELILPGAQDDKAGALAALLLQLKLELPFDRVVTIGTVLVPILLVTLVFTKNFAGWTLFSGSWDWL

SEQ ID NO: 846126 - protein, 138 aa, Homo sapiens
VEQMRKLRSEWQAGLGFPLLPPSGRETVTGMRSSGPSGAPHSGGSSPDTWLGVGPLLSSTLEEARPPPAPEPRSPPSHLPAALLESGSRVLGPLPTHVGHTCPARVAARDGPSSGRDTNLSLFSSPGWTLFSGSWDWL

SEQ ID NO: 846127 - protein, 165 aa, Homo sapiens
SPVSSAQPVRLPAPARVSSLPPEEPIYCYTPHNFTRDQALYARGYCWTELRDALPGVDASLWPSLFEHKFLPYALLAFAAIMYVPALGWEFLASTRLTSELNFLLQEIDNCYHRAAEGRAPKIEKQIQSKGPGITEREKREIIENAEKEKSPEQNLFEKYLERRG

SEQ ID NO: 846128 - protein, 633 aa, Homo sapiens
MATALLAGEKLRELILPGAQDDKAGALAALLLQLKLELPFDRVVTIGTVLVPILLVTLVFTKNFAEEPIYCYTPHNFTRDQALYARGYCWTELRDALPGVDASLWPSLFEHKFLPYALLAFAAIMYVPALGWEFLASTRLTSELNFLLQEIDNCYHRAAEGRAPKIEKQIQSKGPGITEREKREIIENAEKEKSPEQNLFEKYLERRGRSNFLAKLYLARHVLILLLSAVPISYLCTYYATQKQNEFTCALGASPDGAAGAGPAVRVSCKLPSVQLQRIIAGVDIVLLCVMNLIILVNLIHLFIFRKSNFIFDKLHKVGIKTRRQWRRSQFCDINILAMFCNENRDHIKSLNRLDFITNESDLMYDNVVRQLLAALAQSNHDATPTVRDSGVQTVDPSANPAEPDGAAEPPVVKRPRKKMKWIPTSNPLPQPFKEPLAIMRVENSKAEKPKPARRKTATDTLIAPLLDRSAHHYKGGGGDPGPGPAPAPAPPPAPDKKHARHFSLDVHPYILGTKKAKAEAVPAALPASRSQEGGFLSQAEDCGLGLAPAPIKDAPLPEKEIPYPTEPARAGLPSGGPFHVRSPPAAPAVAPLTPASLGKAEPLTILSRNATHPLLHINTLSSSPPSTSRERS

SEQ ID NO: 846129 - protein, 450 aa, Homo sapiens
MATALLAGEKLRELILPGAQDDKAGALAALLLQLKLELPFDRVVTIGTVLVPILLVTLVFTKNFAEEPIYCYTPHNFTRDQALYARGYCWTELRDALPGVDASLWPSLFEHKFLPYALLAFAAIMYVPALGWEFLASTRLTSELNFLLQEIDNCYHRAAEGRAPKIEKQIQSKGPGITEREKREIIENAEKEKSPEQNLFEKYLERRGRSNFLAKLYLARHVLILLLSAVPISYLCTYYATQKQNEFTCALGASPDGAAGAGPAVRVSCKLPSVQLQRIIAGVDIVLLCVMNLIILVNLIHLFIFRKSNFIFDKLHKVGIKTRRQWRRSQFCDINILAMFCNENRDHIKSLNRLDFITNESDLMYDNVVRQLLAALAQSNHDATPTVRDSGVQTVDPSANPAEPDGAAEPPVVKRPRKKMKWIPTSNPFPCSCIRCPAVGGGPEVKSLFF

SEQ ID NO: 846130 - protein, 81 aa, Homo sapiens
MATSRYEPVAEIGVGAYGTVYKARDPHSGHFVALKSVRVPNGGGGGGGLPISTVREVALLRRLEAFEHPNVVRLEGGGGLG

SEQ ID NO: 846131 - protein, 158 aa, Homo sapiens
MATSRYEPVAEIGVGAYGTVYKARDPHSGHFVALKSVRVPNGGGGGGGLPISTVREVALLRRLEAFEHPNVVRLMDVCATSRTDREIKVTLVFEHVDQDLRTYLDKAPPPGLPAETIKDLMRQFLRGLDFLHANCIVHRDLKPENILVTTWWNTSKAG

SEQ ID NO: 846132 - protein, 158 aa, Homo sapiens; identical to SEQ ID NO: 846131

SEQ ID NO: 846133 - protein, 158 aa, Homo sapiens; identical to SEQ ID NO: 846131

SEQ ID NO: 846134 - protein, 158 aa, Homo sapiens; identical to SEQ ID NO: 846131

SEQ ID NO: 846135 - protein, 158 aa, Homo sapiens; identical to SEQ ID NO: 846131

SEQ ID NO: 846136 - protein, 158 aa, Homo sapiens; identical to SEQ ID NO: 846131

SEQ ID NO: 846137 - protein, 158 aa, Homo sapiens; identical to SEQ ID NO: 846131

SEQ ID NO: 846138 - protein, 136 aa, Homo sapiens
ASSIGEEVEEAFPSVKPPHELCCWEGLPISTVREVALLRRLEAFEHPNVVRLMDVCATSRTDREIKVTLVFEHVDQDLRTYLDKAPPPGLPAETIKDLMRQFLRGLDFLHANCIVHRDLKPENILVTTWWNTSKAG

SEQ ID NO: 846139 - protein, 108 aa, Homo sapiens
MWTCWLYLCRECFVERPLFCGNSEADQLGKIFDLIGLPPEDDWPRDVSLPRGAFPPRGPRPVQSVVPEMEESGAQLLLEMLTFNPHKRISAFRALQHSYLHKDEGNPE

SEQ ID NO: 846140 - protein, 200 aa, Homo sapiens
MDVCATSRTDREIKVTLVFEHVDQDLRTYLDKAPPPGLPAETIKVSGVGGIERWIGTFVVEPSGISGMVPSFQCICTSPLKLGSDAPVSKRPRFPSCQLHRSPRSEAREHSGDNVVEHVKSWLTLGLARKSTSYQNGTLHPVGCYTLGTRGSRKFFCRSTYCNTCGTCGGVGCIFAENVSSKGLSSVETLKPTSWAKSLT

SEQ ID NO: 846141 - protein, 140 aa, Homo sapiens
MALYTPWVVTLWVPEAPESSSAGPHIATPVGHVEVLAVSLQRMFRRKRPLFCGNSEADQLGKIFDLIGLPPEDDWPRDVSLPRGAFPPRGPRPVQSVVPEMEESGAQLLLEMLTFNPHKRISAFRALQHSYLHKDEGNPE

SEQ ID NO: 846142 - protein, 158 aa, Homo sapiens; identical to SEQ ID NO: 846131

SEQ ID NO: 846143 - protein, 125 aa, Homo sapiens [sequence omitted]

SEQ ID NO: 846144 - protein, 170 aa, Homo sapiens
MATSRYEPVAEIGVGAYGTVYKARDPHSGHFVALKSVRVPNGGGGGGGLPISTVREVALLRRLEAFEHPNVVRRDETSVHTLPELTGEIKGNTMDAREQCSNHGTLEGRYLAQGTPPRKDCAQARTTESTGTLDWRPVYLHERLEFSFKWPNMHSAYTRRTLDRPSRTTP

SEQ ID NO: 846145 - protein, 98 aa, Homo sapiens
SQSKHLLSAPQRMGGGHVPRTSGVRPALPVSARLFGSWSHGEGGGEGASLACGLCLWSGPLRPAAPDRARVYGAVGTGSGAPITGRPHSTPGWREGLP

SEQ ID NO: 846146 - protein, 158 aa, Homo sapiens; identical to SEQ ID NO: 846131

SEQ ID NO: 846147 - protein, 158 aa, Homo sapiens; identical to SEQ ID NO: 846131

SEQ ID NO: 846148 - protein, 158 aa, Homo sapiens; identical to SEQ ID NO: 846131

SEQ ID NO: 846149 - protein, 158 aa, Homo sapiens; identical to SEQ ID NO: 846131

SEQ ID NO: 846150 - protein, 158 aa, Homo sapiens; identical to SEQ ID NO: 846131

SEQ ID NO: 846151 - protein, 158 aa, Homo sapiens; identical to SEQ ID NO: 846131

SEQ ID NO: 846152 - protein, 158 aa, Homo sapiens; identical to SEQ ID NO: 846131

SEQ ID NO: 846153 - protein, 108 aa, Homo sapiens; identical to SEQ ID NO: 846139

SEQ ID NO: 846154 - protein, 98 aa, Homo sapiens; identical to SEQ ID NO: 846145

SEQ ID NO: 846155 - protein, 158 aa, Homo sapiens; identical to SEQ ID NO: 846131

SEQ ID NO: 846156 - protein, 113 aa, Homo sapiens
SQSKHLLSAPQRMGGGHVPRTSGVRPALPVSARLFGSWSHGEGGGEGASLACGLCLWSGPLRPAAPDRARVYGAVGTGSGAPITGRPHSTPGWREGLSSVETLKPTSWAKSLT

SEQ ID NO: 846157 - protein, 192 aa, Homo sapiens
IYYAPVYILLYGLSNDIGYPHRVLICRIHLGDWSSYTPSVHVGRTRGRIYSYQMALTPWVVTLWVPEAPESSSAGPHIATPVGHVEVLAVSLQRMFRRKRPLFCGNSEADQLGKIFDLIGLPPEDDWPRDVSLPRGAFPPRGPRPVQSVVPEMEESGAQLLLEMLTFNPHKRISAFRALQHSYLHKDEGNPE

SEQ ID NO: 846158 - protein, 98 aa, Homo sapiens; identical to SEQ ID NO: 846145

SEQ ID NO: 846159 - protein, 1126 aa, Homo sapiens
EDCEHSGGRVAGVSGASGAGQQRAPGAAAASLPAPAEHIAAAEMGPPRHPQAGEIEAGGAGGGRRLQVEMSSQQFPRLGAPSTGLSQAPSQIANSGSAGLINPAATVNDESGRDSEVSAREHMSSSSSLQSREEKQEPVVVRPYPQVQMLSTHHAVASATPVAVTAPPAHLTPAVPLSFSEGLMKPPPKPTMPSRPIAPAPPSTLSLPPKVPGQVTVTMESSIPQASAIPVATISGQQGHPSNLHHIMTTNVQMSIIRSNAPGPPLHIGASHLPRGAAAAAVMSSSKVTTVLRPTSQLPNAATAQPAVQHIIHQPIQSRPPVTTSNAIPPAVVATVSATRAQSPVITTTAAHATDSALSRPTLSIQHPPSAAISIQRPAQSRDVTTRITLPSHPALGTPKQQLHTMAQKTIFSTGTPVAAATVAPILATNTIPSATTAGSVSHTQAPTSTIVTMTVPSHSSHATAVTTSNIPVAKVVPQQITHTSPRIQPDYPAERSSLIPISGHRASPNPVAMETRSDNRPSVPVQFQYFLPTYPPSAYPLAAHTYTPITSSVSTIRQYPVSAQAPNSAITAQTGVGVASTVHLNPMQLMTVDASHARHIQGIQPAPISTQGIQPAPIGTPGIQPAPLGTQGIHSATPINTQGLQPAPMGTQQPQPEGKTSAVVLADGATIVANPISNPFSAAPAATTVVQTHSQSASTNAPAQGSSPRPSILRKKPATDGMAVRKTLIPPQPPDVASPRVESSMRSTSGSPRPAGAKPKSEIHVSMATPVTVSMETVSNQNNDQPTIAVPPTAQQPPPTIPTMIAAASPPSQPAVALSTIPGAVPITPPITTIAAAPPPSVTVGGSLSSVLGPPVPEIKVKEEVEPMDIMRPVSAVPPLATNTVSPSLALLANNLSMPTSDLPPGASPRKKPRKQQHVISTEEGDMMETNSTDDEKSTAKSLLVKAEKRKSPPKEYIDEEGVRYVPVRPRPPITLLRHYRNPWKAAYHHFQRYSDVRVKEEKKAMLQEIANQKGVSCRAQGWKVHLCAAQLLQLTNLEHDVYERLTNLQEGIIPKKKAATDDDLHRINELIQGNMQRCKLVMDQISEARDSMLKVLDHKDRVLKLLNKNGTVKKVSKLKRKEKV

SEQ ID NO: 846160 - protein, 152 aa, Homo sapiens
MAFTLLEHKSFTFLNTEIHVFLFFMVPEEKKAMLQEIANQKGVSCRAQGWKVHLCAAQLLQLTNLEHDVYERLTNLQEGIIPKKKAATDDDLHRINELIQGNMQRCKLVMDQISEARDSMLKVLDHKDRVLKLLNKNGTVKKVSKLKRKEKV

SEQ ID NO: 846161 - protein, 1126 aa, Homo sapiens; identical to SEQ ID NO: 846159

SEQ ID NO: 846162 - protein, 1091 aa, Homo sapiens
EDCEHSGGRVAGVSGASGAGQQRAPGAAAASLPAPAEHIAAAEMGPPRHPQAGEIEAGGAGGGRRLQVEMSSQQFPRLGAPSTGLSQAPSQIANSGSAGLINPAATVNDESGRDSEVSAREHMSSSSSLQSREEKQEPVVVRPYPQVQMLSTHHAVASATPVAVTAPPAHLTPAVPLSFSEGLMKPPPKPTMPSRPIAPAPPSTLSLPPKVPGQVTVTMESSIPQASAIPVATISGQQGHPSNLHHIMTTNVQMSIIRSNAPGPPLHIGASHLPRGAAAAAVMSSSKVTTVLRPTSQLPNAATAQPAVQHIIHQPIQSRPPVTTSNAIPPAVVATVSATRAQSPVITTTAAHATDSALSRPTLSIQHPPSAAISIQRPAQSRDVTTRITLPSHPALGTPKQQLHTMAQKTIFSTGTPVAAATVAPILATNTIPSATTAGSVSHTQAPTSTIVTMTVPSHSSHATAVTTSNIPVAKVVPQQITHTSPRIQPDYPAERSSLIPISGHRASPNPVAMETRSDNRPSVPVQFQYFLPTYPPSAYPLAAHTYTPITSSVSTIRQYPVSAQAPNSAITAQTGVGVASTVHLNPMQLMTVDASHARHIQGIQPAPISTQGIQPAPIGTPGIQPAPLGTQGIHSATPINTQGLQPAPMGTQQPQPEGKTSAVVLADGATIVANPISNPFSAAPAATTVVQTHSQSASTNAPAQGSSPRPSILRKKPATDGAKPKSEIHVSMATPVTVSMETVSNQNNDQPTIAVPPTAQQPPPTIPTMIAAASPPSQPAVALSTIPGAVPITPPITTIAAAPPPSVTVGGSLSSVLGPPVPEIKVKEEVEPMDIMRPVSAVPPLATNTVSPSLALLANNLSMPTSDLPPGASPRKKPRKQQHVISTEEGDMMETNSTDDEKSTAKSLLVKAEKRKSPPKEYIDEEGVRYVPVRPRPPITLLRHYRNPWKAAYHHFQRYSDVRVKEEKKAMLQEIANQKGVSCRAQGWKVHLCAAQLLQLTNLEHDVYERLTNLQEGIIPKKKAATDDDLHRINELIQGNMQRCKLVMDQISEARDSMLKVLDHKDRVLKLLNKNGTVKKVSKLKRKEKV

SEQ ID NO: 846163 - protein, 149 aa, Homo sapiens
  misc_feature (5)..(5): Xaa can be any naturally occurring amino acid
  misc_feature (9)..(9): Xaa can be any naturally occurring amino acid
GSPHXCRLXIPETLPPLQGQCVRAKEKKAMLQEIANQKGVSCRAQGWKVHLCAAQLLQLTNLEHDVYERLTNLQEGIIPKKKAATDDDLHRINELIQGNMQRCKLVMDQISEARDSMLKVLDHKDRVLKLLNKNGTVKKVSKLKRKEKV

SEQ ID NO: 846164 - protein, 109 aa, Homo sapiens
MADGNEDLRADDLPGPAFESYESMELACPAERSGHVAVSDGRHMFVWGGYKVSEWPGRDGRRSAVTRVCVRGQAGRPERAAEGAPRLRRAPHLRLCPLVVFFLRAGIFL

SEQ ID NO: 846165 - protein, 249 aa, Homo sapiens
MADGNEDLRADDLPGPAFESYESMELACPAERSGHVAVSDGRHMFVWGGYKSNQVRGLYDFYLPREELWIYNMETGRWKKINTEGDVPPSMSGSCAVCVDRVLYLFGGHHSRGNTNKFYMLDSRSTDRVLQWERIDCQGIPPSSKDKLGVWVYKNKLIFFGGYGYLPEDKVLGTFEFDETSFWNSSHPRGWNDHVHILDTETFTWSQPITTGKAPSPRAAHACATVGNRGFVFGGRYRVSIQTTSMTCF

SEQ ID NO: 846166 - protein, 249 aa, Homo sapiens; identical to SEQ ID NO: 846165

SEQ ID NO: 846167 - protein, 249 aa, Homo sapiens; identical to SEQ ID NO: 846165

SEQ ID NO: 846168 - protein, 334 aa, Homo sapiens
METGRWKKINTEGDVPPSMSGSCAVCVDRVLYLFGGHHSRGNTNKFYMLDSRSTDRVLQWERIDCQGIPPSSKDKLGVWVYKNKLIFFGGYGYLPEDKVLGTFEFDETSFWNSSHPRGWNDHVHILDTETFTWSQPITTGKAPSPRAAHACATVGNRGFVFGGRYRDARMNDLHYLNLDTWEWNELIPQGICPVGRSWHSLTPVSSDHLFLFGGFTTDKQPLSDAWTYCISKNEWIQFNHPYTEKPRLWHTACASDEGEVIVFGGCANNLLVHHRAAHSNEILIFSVQPKSLVRLSLEAVICFKEMLANSWNCLPKHLLHSVNQRFGSNNTSGS

SEQ ID NO: 846169 - protein, 364 aa, Homo sapiens
MFTPLGRLQSNQVRGLYDFYLPREELWIYNMETGRWKKINTEGDVPPSMSGSCAVCVDRVLYLFGGHHSRGNTNKFYMLDSRSTDRVLQWERIDCQGIPPSSKDKLGVWVYKNKLIFFGGYGYLPEDKVLGTFEFDETSFWNSSHPRGWNDHVHILDTETFTWSQPITTGKAPSPRAAHACATVGNRGFVFGGRYRDARMNDLHYLNLDTWEWNELIPQGICPVGRSWHSLTPVSSDHLFLFGGFTTDKQPLSDAWTYCISKNEWIQFNHPYTEKPRLWHTACASDEGEVIVFGGCANNLLVHHRAAHSNEILIFSVQPKSLVRLSLEAVICFKEMLANSWNCLPKHLLHSVNQRFGSNNTSGS

SEQ ID NO: 846170 - protein, 406 aa, Homo sapiens
MADGNEDLRADDLPGPAFESYESMELACPAERSGHVAVSDGRHMFVWGGYKSNQVRGLYDFYLPREELWIYNMETGRWKKINTEGDVPPSMSGSCAVCVDRVLYLFGGHHSRGNTNKFYMLDSRSTDRVLQWERIDCQGIPPSSKDKLGVWVYKNKLIFFGGYGYLPEDKVLGTFEFDETSFWNSSHPRGWNDHVHILDTETFTWSQPITTGKAPSPRAAHACATVGNRGFVFGGRYRDARMNDLHYLNLDTWEWNELIPQGICPVGRSWHSLTPVSSDHLFLFGGFTTDKQPLSDAWTYCISKNEWIQFNHPYTEKPRLWHTACASDEGEVIVFGGCANNLLVHHRAAHSNEILIFSVQPKSLVRLSLEAVICFKEMLANSWNCLPKHLLHSVNQRFGSNNTSGS

SEQ ID NO: 846171 - protein, 406 aa, Homo sapiens; identical to SEQ ID NO: 846170

SEQ ID NO: 846172 - protein, 366 aa, Homo sapiens
MADGNEDLRADDLPGPAFESYESMELACPAERSGHVAVSDGRHMFVWGGYKSNQVRGLYDFYLPREELWIYNMETGRWKKINTEGDVPPSMSGSCAVCVDRVLYLFGGHHSRGNTNKFYMLDSRSTDRVLQWERIDCQGIPPSSKDKLGVWVYKNKLIFFGGYGYLPEDKVLGTFEFDETSFWNSSHPRGWNDHVHILDTETFTWSQPITTGKAPSPRAAHACATVGNRGFVFGGRYRDARMNDLHYLNLDTWEWNELIPQGICPVGRSWHSLTPVSSDHLFLFGGFTTDKQPLSDAWTYCISKNEWIQFNHPYTEKPRLWHTACASDEGEVIVFGGCANNLLVHHRAAHSNEILIFSVQPKSLVR

SEQ ID NO: 846173 - protein, 368 aa, Homo sapiens
MADGNEDLRADDLPGPAFESYESMELACPAERSGHVAVSDGRHMFVWGGYKSNQVRGLYDFYLPREELWIYNMETGRWKKINTEGDVPPSMSGSCAVCVDRVLYLFGGHHSRGNTNKFYMLDSRSTDRVLQWERIDCQGIPPSSKDKLGVWVYKNKLIFFGGYGYLPEDKVLGTFEFDETSFWNSSHPRGWNDHVHILDTETFTWSQPITTGKAPSPRAAHACATVGNRGFVFGGRYRDARMNDLHYLNLDTWEWNELIPQGICPVGRSWHSLTPVSSDHLFLFGGFTTDKQPLSDAWTYCISKNEWIQFNHPYTEKPRLWHTACASDEGEVIVFGGCANNLLVHHRAAHSNEILIFSVQPKSLVRYI

SEQ ID NO: 846174 - protein, 385 aa, Homo sapiens
MADGNEDLRADDLPGPAFESYESMELACPAERSGHVAVSDGRHMFVWGGYKSNQVRGLYDFYLPREELWIYNMETGRWKKINTEGDVPPSMSGSCAVCVDRVLYLFGGHHSRGNTNKFYMLDSRSTDRVLQWERIDCQGIPPSSKDKLGVWVYKNKLIFFGGYGYLPEDKVLGTFEFDETSFWNSSHPRGWNDHVHILDTETFTWSQPITTGKAPSPRAAHACATVGNRGFVFGGRYRDARMNDLHYLNLDTWEWNELIPQGICPVGRSWHSLTPVSSDHLFLFGGFTTDKQPLSDAWTYCISKNEWIQFNHPYTEKPRLWHTACASDEGEVIVFGGCANNLLVHHRAAHSNEILIFSVQPKSLVRHCKKKHGENKKILRLEEKP

SEQ ID NO: 846175 - protein, 157 aa, Homo sapiens [sequence omitted]

SEQ ID NO: 846176 - protein, 406 aa, Homo sapiens; identical to SEQ ID NO: 846170

SEQ ID NO: 846177 - protein, 122 aa, Homo sapiens
SSRPPYVVWGGYKSLMSNQVRGLYDFYLPREELWIYNMETGRWKKINTEGDVPPSMSGSCAVCVDRVLYLFGGHHSRGNTNKVSVSKDYGLRHFYSYYLSNNCKFLRLAPDLFVSQLKMMCT

SEQ ID NO: 846178 - protein, 249 aa, Homo sapiens; identical to SEQ ID NO: 846165

SEQ ID NO: 846179 - protein, 406 aa, Homo sapiens; identical to SEQ ID NO: 846170

SEQ ID NO: 846180 - protein, 386 aa, Homo sapiens
MKLVSQDRFKKYSSASLKYQFLYLQFFLFLESNQVRGLYDFYLPREELWIYNMETGRWKKINTEGDVPPSMSGSCAVCVDRVLYLFGGHHSRGNTNKFYMLDSRSTDRVLQWERIDCQGIPPSSKDKLGVWVYKNKLIFFGGYGYLPEDKVLGTFEFDETSFWNSSHPRGWNDHVHILDTETFTWSQPITTGKAPSPRAAHACATVGNRGFVFGGRYRDARMNDLHYLNLDTWEWNELIPQGICPVGRSWHSLTPVSSDHLFLFGGFTTDKQPLSDAWTYCISKNEWIQFNHPYTEKPRLWHTACASDEGEVIVFGGCANNLLVHHRAAHSNEILIFSVQPKSLVRLSLEAVICFKEMLANSWNCLPKHLLHSVNQRFGSNNTSGS

SEQ ID NO: 846181 - protein, 334 aa, Homo sapiens; identical to SEQ ID NO: 846168

SEQ ID NO: 846182 - protein, 249 aa, Homo sapiens; identical to SEQ ID NO: 846165

SEQ ID NO: 846183 - protein, 357 aa, Homo sapiens [sequence omitted]

SEQ ID NO: 846184 - protein, 369 aa, Homo sapiens
MADGNEDLRADDLPGPAFESYESMELACPAERSGHVAVSDGRHMFVWGGYKSNQVRGLYDFYLPREELWIYNMETGRWKKINTEGDVPPSMSGSCAVCVDRVLYLFGGHHSRGNTNKFYMLDSRSTDRVLQWERIDCQGIPPSSKDKLGVWVYKNKLIFFGGYGYLPEDKVLGTFEFDETSFWNSSHPRGWNDHVHILDTETFTWSQPITTGKAPSPRAAHACATVGNRGFVFGGRYRDARMNDLHYLNLDTWEWNELIPQGICPVGRSWHSLTPVSSDHLFLFGGFTTDKQPLSDAWTYCISKNEWIQFNHPYTEKPRLWHTACASDEGEVIVFGGCANNLLVHHRAAHSNEILIFSVQPKSLVRQGT

SEQ ID NO: 846185 - protein, 72 aa, Homo sapiens
LPCVPTGAPLAFNLTTLSRQSLLLPPCGPLSATLCCRREKQVPGLTLNDLFPPRSLNTGSEEELEELCEQAV

SEQ ID NO: 846186 - protein, 783 aa, Homo sapiens [sequence omitted]

SEQ ID NO: 846187 - protein, 229 aa, Homo sapiens
MSGGHQLQLAALWPWLLMATLQAGFGRTGLVLAAAVESERSAEQKAVIRVIPLKMDPTGKLNLTLEGVFAGVAEITPAEGKLMQSHPLYLCNASDDDNLEPGFISIVKLESPRRAPRPCLSLASKARMAGERGASAVLFDITEDRAAAEQLQQPLGLTWPVVLIWGNDAEKLMEFVYKNQKAHVRIELKEPPAWPDYDVWILMTVVGTIFVIILASVLRIRSSSRGSSA

SEQ ID NO: 846188 - protein, 783 aa, Homo sapiens [sequence omitted]

SEQ ID NO: 846189 - protein, 783 aa, Homo sapiens [sequence omitted]

SEQ ID NO: 846190 - protein, 869 aa, Homo sapiens
MSGGHQLQLAALWPWLLMATLQAGFGRTGLVLAAAVESERSAEQKAVIRVIPLKMDPTGKLNLTLEGVFAGVAEITPAEGKLMQSHPLYLCNASDDDNLEPGFISIVKLESPRRAPRPCLSLASKARMAGERGASAVLFDITEDRAAAEQLQQPLGLTWPVVLIWGNDAEKLMEFVYKNQKAHVRIELKEPPAWPDYDVWILMTVVGTIFVIILASVLRIRCRPRHSRPDPLQQRTAWAISQLATRRYQASCRQARGEWPDSGSSCSSAPVCAICLEEFSEGQELRVISCLHEFHRNCVDPWLHQHRTCPLCMFNITEGDSFSQSLGPSRSYQEPGRRLHLIRQHPGHAHYHLPAAYLLGPSRSAVARPPRPGPFLPSQEPGMGPRHHRFPRAAHPRAPGEQQRLAGAQHPYAQGWGLSHLQSTSQHPAACPVPLRRARPPDSSGSGESYCTERSGYLADGPASDSSSGPCHGSSSDSVVNCTDISLQGVHGSSSTFCSSLSSDFDPLVYCSPKGDPQRVDMQPSVTSRPRSLDSVVPTGETQVSSHVHYHRHRHHHYKKRFQWHGRKPGPETGVPQSRPPIPRTQPQPEPPSPDQQVTRSNSAAPSGRLSNPQCPRALPEPAPGPVDASSICPSTSSLFNLQKSSLSARHPQRKRRGGPSEPTPGSRPQDATVHPACQIFPHYTPSVAYPWSPEAHPLICGPPGLDKRLLPETPGPCYSNSQPVWLCLTPRQPLEPHPPGEGPSEWSSDTAEGRPCPYPHCQVLSAQPGEFSEGSGCGRERRLQLNISGQVKSANKGLMEAEKDTAEMTTKILNHRDSVSCWLECRNTPPLPGATPLVGRSQGGPREVLVWLRHQKGTWKAGCDGSCL

SEQ ID NO: 846191 - protein, 206 aa, Homo sapiens
MSGGHQLQLAALWPWLLMATLQAGFGRTGLVLAAAVESERSAEQKAVIRVIPLKMDPTGKLNLTLEGVFAGVAEITPAEGKLMQSHPLYLCNASDDDNLEPGFISIVKLESPRRAPRPCLSLASKARMAGERGASAVLFDITEDRAAAEQLQQPLGLTWPVVLIWGNDAEKLMEFVYKNQKAHVRIELKEPPAWVSTLDLQTLPCT

SEQ ID NO: 846192 - protein, 75 aa, Homo sapiens
VLLRPPSAAPEERGDSTSLTACTVTKKTMRPPGPEICVIVGKRRKTNKGTVNGVTWLEYGSNYKACSALARRQPT

SEQ ID NO: 846193 - protein, 106 aa, Homo sapiens
VLLRPPSAAPEERGDSTSLTACTVTKKTMRPPGPEICVIVGKRRKTNKGTVNGVTWLEYGSNYKACSALARRCSLALSPRLECNGTILAHCNLCLPGSSDSSASAS

SEQ ID NO: 846194 - protein, 110 aa, Homo sapiens
VLLRPPSAAPEERGDSTSLTACTVTKKTMRPPGPEICVIVGKRRKTNKGTVNGVTWLEYGSNYKACSALARRKGYMKTEQEGSYLQARKRVLTKTQPCWYPDLQLPVLSC

SEQ ID NO: 846195 - protein, 72 aa, Homo sapiens
VLLRPPSAAPEERGDSTSLTACTVTKKTMRPPGPEICVIVGKRRKTNKGTVNGVTWLEYGSNYKACSALARR

SEQ ID NO: 846196 - protein, 95 aa, Homo sapiens
AAAVKRGGRRGHRGRAGAAAAAAMGALTSRQHAGVEEVDIPSNSVYRYPPKSGSYFASHFIMGGEKFDSTHPEGYLFGENSDLNFLGNRPVVVWL

SEQ ID NO: 846197 - protein, 658 aa, Homo sapiens
CNPGTRKSGSYFASHFIMGGEKFDSTHPEGYLFGENSDLNFLGNRPVVFPYAAPPPQEPVKTLRSLVNIRKDTLRLVKCAEEVKSPGEEASKAKVHYNVEFTFDTDARVAITIYYQATEEFQNGIASYIPKDNSLQSETVQYKRGVCQQFCLPSHTVDPSEWAEEELGFDLDREVYPLVVHAVVDEGDEYFGHCHVLLGTFEKHTDGTFCVKPLKQKQVVDGVSYLLQEIYGIENKYNTQDSKVAEDEVSDNSAECVVCLSDVRDTLILPCRHLCLCNTCADTLRYQANNCPICRLPFRALLQIRAMRKKLGPLSPTSFNPIISSQTSDSEEHPSSENIPPGYEVVSLLEALNGPLTPSPAVPPLHVLGDGHLSGMLPSYGSDGHLPPVRTISPLDRLSDSSSQGLKLKKSLSKSTSQNSSVLHEEEDEHSCSESETQLSQRPSVQHLGEECGVTPESENLTLSSSGAIDQSSCTGTPLSSTISSPEGPASSSLAQSVMSMASSQISTDTVSSMSGSYIAPGTEEEGEALSSPQPASRAPSEEGEGLPAESPDSNFAGLPAGEQDAEGNDVIEEEDGSPTQEGQRTCAFLGMECDNNNDFDIASVKALDNKLCSEVCLPGAWQADDNAVSRNAQRRRLSSSSLEDSETRPCVWGPLAV

SEQ ID NO: 846198 - protein, 440 aa, Homo sapiens
AAAVKRGGRRGHRGRAGAAAAAAMGALTSRQHAGVEEVDIPSNSVYRYPPKSGSYFASHFIMGGEKFDSTHPEGYLFGENSDLNFLGNRPVVFPYAAPPPQEPVKTLRSLVNIRKDTLRLVKCAEEVKSPGEEASKAKVHYNVEFTFDTDARVAITIYYQATEEFQNGIASYIPKDNSLQSETVQYKRGVCQQFCLPSHTVDPSEWAEEELGFDLDREVYPLVVHAVVDEGDEYFGHCHVLLGTFEKHTDGTFCVKPLKQKQVVDGVSYLLQEIYGIENKYNTQDSKVAEDEVSDNSAECVVCLSDVRDTLILPCRHLCLCNTCADTLRYQANNCPICRLPFRALLQIRAMRKKLGPLSPTSFNPIISSQTSDSEEHPSSENIPPGYEVVSLLEALNGPLTPSLLKIQKISWAWLQAPVVPATWEAEAGEWPEPGRRSLQ

SEQ ID NO: 846199 - protein, 461 aa, Homo sapiens
MTKSNVNADFVRNYYLSELFSHAALSVKYGTGRALCHWLHFFLLGQVAEDEVSDNSAECVVCLSDVRDTLILPCRHLCLCNTCADTLRYQANNCPICRLPFRALLQIRAMRKKLGPLSPTSFNPIISSQTSDSEEHPSSENIPPGYEVVSLLEALNGPLTPSPAVPPLHVLGDGHLSGMLPSYGSDGHLPPVRTISPLDRLSDSSSQGLKLKKSLSKSTSQNSSVLHEEEDEHSCSESETQLSQRPSVQHLGEECGVTPESENLTLSSSGAIDQSSCTGTPLSSTISSPEGPASSSLAQSVMSMASSQISTDTVSSMSGSYIAPGTEEEGEALSSPQPASRAPSEEGEGLPAESPDSNFAGLPAGEQDAEGNDVIEEEDGSPTQEGQRTCAFLGMECDNNNDFDIASVKALDNKLCSEVCLPGAWQADDNAVSRNAQRRRLSSSSLEDSETRPCVWGPLAV

SEQ ID NO: 846200 - protein, 260 aa, Homo sapiens
AAAVKRGGRRGHRGRAGAAAAAAMGALTSRQHAGVEEVDIPSNSVYRYPPKSGSYFASHFIMGGEKFDSTHPEGYLFGENSDLNFLGNRPVVFPYAAPPPQEPVKTLRSLVNIRKDTLRLVKCAEEVKSPGEEASKAKVHYNVEFTFDTDARVAITIYYQATEEFQNGIASYIPKDNSLQSETVQYKRGVCQQFCLPSHTVDPSEWAEEELGFDLDREVYPLVVHAVVDEGDEYFGHCHVLLGTFEKHTDGTFCVKPLKQ

SEQ ID NO: 846201 - protein, 588 aa, Homo sapiens
MLSLWFSRCAEEVKSPGEEASKAKVHYNVEFTFDTDARVAITIYYQATEEFQNGIASYIPKDNSLQSETVQYKRGVCQQFCLPSHTVDPSEWAEEELGFDLDREVYPLVVHAVVDEGDEYFGHCHVLLGTFEKHTDGTFCVKPLKQKQVVDGVSYLLQEIYGIENKYNTQDSKVAEDEVSDNSAECVVCLSDVRDTLILPCRHLCLCNTCADTLRYQANNCPICRLPFRALLQIRAMRKKLGPLSPTSFNPIISSQTSDSEEHPSSENIPPGYEVVSLLEALNGPLTPSPAVPPLHVLGDGHLSGMLPSYGSDGHLPPVRTISPLDRLSDSSSQGLKLKKSLSKSTSQNSSVLHEEEDEHSCSESETQLSQRPSVQHLGEECGVTPESENLTLSSSGAIDQSSCTGTPLSSTISSPEGPASSSLAQSVMSMASSQISTDTVSSMSGSYIAPGTEEEGEALSSPQPASRAPSEEGEGLPAESPDSNFAGLPAGEQDAEGNDVIEEEDGSPTQEGQRTCAFLGMECDNNNDFDIASVKALDNKLCSEVCLPGAWQADDNAVSRNAQRRRLSSSSLEDSETRPCVWGPLAV

SEQ ID NO: 846202 - protein, 702 aa, Homo sapiens
AAAVKRGGRRGHRGRAGAAAAAAMGALTSRQHAGVEEVDIPSNSVYRYPPKSGSYFASHFIMGGEKFDSTHPEGYLFGENSDLNFLGNRPVVFPYAAPPPQEPVKTLRSLVNIRKDTLRLVKCAEEVKSPGEEASKAKVHYNVEFTFDTDARVAITIYYQATEEFQNGIASYIPKDNSLQSETVQYKRGVCQQFCLPSHTVDPSEWAEEELGFDLDREVYPLVVHAVVDEGDEYFGHCHVLLGTFEKHTDGTFCVKPLKQKQVVDGVSYLLQEIYGIENKYNTQDSKVAEDEVSDNSAECVVCLSDVRDTLILPCRHLCLCNTCADTLRYQANNCPICRLPFRALLQIRAMRKKLGPLSPTSFNPIISSQTSDSEEHPSSENIPPGYEVVSLLEALNGPLTPSPAVPPLHVLGDGHLSGMLPSYGSDGHLPPVRTISPLDRLSDSSSQGLKLKKSLSKSTSQNSSVLHEEEDEHSCSESETQLSQRPSVQHLGEECGVTPESENLTLSSSGAIDQSSCTGTPLSSTISSPEGPASSSLAQSVMSMASSQISTDTVSSMSGSYIAPGTEEEGEALSSPQPASRAPSEEGEGLPAESPDSNFAGLPAGEQDAEGNDVIEEEDGSPTQEGQRTCAFLGMECDNNNDFDIASVKALDNKLCSEVCLPGAWQADDNAVSRNAQRRRLSSSSLEDSETRPCVWGPLAV

SEQ ID NO: 846203 - protein, 459 aa, Homo sapiens
  misc_feature (12)..(12): Xaa can be any naturally occurring amino acid
SRVSRGSRQALXASPQTETVVDGVSYLLQEIYGIENKYNTQDSKVAEDEVSDNSAECVVCLSDVRDTLILPCRHLCLCNTCADTLRYQANNCPICRLPFRALLQIRAMRKKLGPLSPTSFNPIISSQTSDSEEHPSSENIPPGYEVVSLLEALNGPLTPSPAVPPLHVLGDGHLSGMLPSYGSDGHLPPVRTISPLDRLSDSSSQGLKLKKSLSKSTSQNSSVLHEEEDEHSCSESETQLSQRPSVQHLGEECGVTPESENLTLSSSGAIDQSSCTGTPLSSTISSPEGPASSSLAQSVMSMASSQISTDTVSSMSGSYIAPGTEEEGEALSSPQPASRAPSEEGEGLPAESPDSNFAGLPAGEQDAEGNDVIEEEDGSPTQEGQRTCAFLGMECDNNNDFDIASVKALDNKLCSEVCLPGAWQADDNAVSRNAQRRRLSSSSLEDSETRPCVWGPLAV

SEQ ID NO: 846204 - protein, 702 aa, Homo sapiens; identical to SEQ ID NO: 846202

SEQ ID NO: 846205 - protein, 436 aa, Homo sapiens
AAAVKRGGRRGHRGRAGAAAAAAMGALTSRQHAGVEEVDIPSNSVYRYPPKSGSYFASHFIMGGEKFDSTHPEGYLFGENSDLNFLGNRPVVFPYAAPPPQEPVKTLRSLVNIRKDTLRLVKCAEEVKSPGEEASKAKVHYNVEFTFDTDARVAITIYYQATEEFQNGIASYIPKDNSLQSETVQYKRGVCQQFCLPSHTVDPSEWAEEELGFDLDREVYPLVVHAVVDEGDEYFGHCHVLLGTFEKHTDGTFCVKPLKQKQVVDGVSYLLQEIYGIENKYNTQDSKVAEDEVSDNSAECVVCLSDVRDTLILPCRHLCLCNTCADTLRYQANNCPICRLPFRALLQIRAMRKKLGPLSPTSFNPIISSQTSDSEEHPSSENIPPGYEVVSLLEALNGPLTPSPAVPPLHVLGDGHLSGMLPSYGSDGHLPPVRTI

SEQ ID NO: 846206 - protein, 266 aa, Homo sapiens
AAAVKRGGRRGHRGRAGAAAAAAMGALTSRQHAGVEEVDIPSNSVYRYPPKSGSYFASHFIMGGEKFDSTHPEGYLFGENSDLNFLGNRPVVFPYAAPPPQEPVKTLRSLVNIRKDTLRLVKCAEEVKSPGEEASKAKVHYNVEFTFDTDARVAITIYYQATEEFQNGIASYIPKDNSLQSETVQYKRGVCQQFCLPSHTVDPSEWAEEELGFDLDREVYPLVVHAVVDEGDEYFGHCHVLLGTFEKHTDGTFCVKPLKQKQVVSI

SEQ ID NO: 846207 - protein, 433 aa, Homo sapiens
CGPRTRREPSSGEEAAPVTAMAAESALQVVEKLQARLAANPDPKKLLKYLKKLSTLPITVDILAETGVGKTVNSLRKHEHVGSFARDLVAQWKKLVPVERNAEPDEQDFEKSNSRKRPRDALQKEEEMEGDYQETWKATGSRSYSPDHRQKKHRKLSELERPHKVSHGHERRDERKRCHRMSPTYSSDPESSDYGHVQSPPSCTSPHQMYVDHYRSLEEDQEPIVSHQKPGKGHSNAFQDRLGASQERHLGEPHGKGVVSQNKEHKSSHKDKRPVDAKSDEKASVVSREKSHKALSKEENRRPPSGDNAREKPPSSGVKKEKDREGSSLKKKCLPPSEAASDNHLKKPKHRDPEKAKLDKSKQGLDSFDTGKGAGDLLPKVKEKGSNNLKTPEGKVKTNLDRKSLGSLPKVEETDMEDEFEQPTMSFEILPQL

SEQ ID NO: 846208 - protein, 433 aa, Homo sapiens; identical to SEQ ID NO: 846207

SEQ ID NO: 846209 - protein, 375 aa, Homo sapiens
MNSSSQPCLLKSYLSYDQPRKKKKKIVKTSATALGDKGLKKNDSKSTGKNLDSVQKLPKVNKTKSEKPAGADLAKLRKVPDVLPVLPDLPLPAIQANYRPLPSLELISSFQPKRKAFSSPQEEEEAGFTGRRMNSKMQVYSGSKCAYLPKMMTLHQQCIRVLKNNIDSIFEVGGVPYSVLEPVLERCTPDQLYRIEEYNHVLIEETDQLWKVHCHRDFKEERPEEYESWREMYLRLQDAREQRLRVLTKNIQFAHANKPKGRQAKMAFVNSVAKPPRDVRRRQEKFGTGGAAVPEKIKIKPAPYPMGSSHASASSISFNPSPEEPAYDGPSTSSAHLAPVVSSTVSYDPRKPTVKKIAPMMAKTIKAFKNRFSRR

SEQ ID NO: 846210 - protein, 433 aa, Homo sapiens; identical to SEQ ID NO: 846207

SEQ ID NO: 846211 - protein, 125 aa, Homo sapiens
PSLKLRRQIWRMNSSSQPCLLKSYLSYDQPRKKKKKIVKTSATALGDKGLKKNDSKSTGKNLDSVQKLPKVNKTKSEKPAGADLAKLRKVTPSAPWWLPTQSTWPCRAQRIALPLFSLACFWGAC

SEQ ID NO: 846212 - protein, 375 aa, Homo sapiens; identical to SEQ ID NO: 846209

SEQ ID NO: 846213 - protein, 105 aa, Homo sapiens
MISSITSPGDQAQDLVEGVAFTLVVHLRARWPGGTSLCGGGHSWNSLLGPPQFDVISPGIGPPRTRLTFMLLQRARHRATLFSRFLLKTPCEPMIINCPNDGQDN

SEQ ID NO: 846214 - protein, 73 aa, Homo sapiens
LEVPQQNKLGYFPPMSNELSLKDSTPQWEPLDPMLEFPLCKNLHFSTINFDQVAMSGTKLSDNCLYTVSKSSV

SEQ ID NO: 846215 - protein, 112 aa, Homo sapiens
MGSTEILEKETPENLSNGTSSNVEAAKRLAKRLYQLDRFKRSDVAKHLGKNNEFSKLVAEEYLKFFDFTGMTLDQSLRVSLCHPGWSAVAPSWLTATSTSQVQAVLLNQPPE

SEQ ID NO: 846216 - protein, 551 aa, Homo sapiens
MGSSWCLYGCCNAGVKTTRLEAHSEMGSTEILEKETPENLSNGTSSNVEAAKRLAKRLYQLDRFKRSDVAKHLGKNNEFSKLVAEEYLKFFDFTGMTLDQSLRYFFKAFSLVGETQERERVLIHFSNRYFYCNPDTIASQDGVHCLTCAIMLLNTDLHGHLVVAFAAVAKIKAQDLLRQEGRGAAKTAGQPEGRPVPDNIGKKMTCQEFIANLQGVNEGVDFSKDLLKALYNSIKNEKLEWAVDDEEKKKSPSESTEEKANGTHPKTISRIGSTTNPFLDIPHDPNAAVYKSGFLARKIHADMDGKKTPRGKRGWKTFYAVLKGTVLYLQKDEYKPEKALSEEDLKNAVSVHHALASKATDYEKKPNVFKLKTADWRVLLFQTQSPEEMQGWINKINCVAAVFSAPPFPAAIGSQKKFSRPLLPATTTKLSQEEQLKSHESKLKQITTELAEHRSYPPDKKVKAKDVDEYKLKDHYLEFEKTRYEMYVSILKEGGKELLSNDESEAAGLKKSHSSPSLNPDTSPITAKVKRNVSERKDHRPETPSIKQKVT

SEQ ID NO: 846217 - protein, 191 aa, Homo sapiens
RPRRRRTSGGLLEPGGGRGDHVREALPPLHHRPRHQSNAGVKTTRLEAHSEMGSTEILEKETPENLSNGTSSNVEAAKRLAKRLYQLDRFKRSDVAKHLGKNNEFSKLVAEEYLKFFDFTGMTLDQSLRYFFKAFSLVGETQERERVLIHFSNRYFYCNPDTIASQDGVHCLTCAIMLLNTDLHGHVSVDL

SEQ ID NO: 846218 - protein, 112 aa, Homo sapiens; identical to SEQ ID NO: 846215

SEQ ID NO: 846219 - protein, 163 aa, Homo sapiens
MGSSWCLYGCCNAGVKTTRLEAHSEMGSTEILEKETPENLSNGTSSNVEAAKRLAKRLYQLDRFKRSDVAKHLGKNNEFSKLVAEEYLKFFDFTGMTLDQSLRYFFKAFSLVGETQERERVLIHFSNRYFYCNPDTIASQDGVHCLTCAIMLLNTDLHGHNDQ

SEQ ID NO: 846220 - protein, 551 aa, Homo sapiens; identical to SEQ ID NO: 846216

SEQ ID NO: 846221 - protein, 173 aa, Homo sapiens
MGSTEILEKETPENLSNGTSSNVEAAKRLAKRLYQLDRFKRSDVAKHLGKNNEFSKLVAEEYLKFFDFTGMTLDQSLRYFFKAFSLVGETQERERVLIHFSNRYFYCNPDTIASQDGVHCLTCAIMLLNTDLHGHNIGKKMTCQEFIANLQGVNEGVDFSKDLLKVLWDWRRC

SEQ ID NO: 846222 - protein, 534 aa, Homo sapiens
MGYSSGVTNGLNDASDSIYTKGTPEIAFWGSNAGVKTTRLEAHSEMGSTEILEKETPENLSNGTSSNVEAAKRLAKRLYQLDRFKRSDVAKHLGKNNEFSKLVAEEYLKFFDFTGMTLDQSLRYFFKAFSLVGETQERERVLIHFSNRYFYCNPDTIASQDGVHCLTCAIMLLNTDLHGHVNIGKKMTCQEFIANLQGVNEGVDFSKDLLKALYNSIKNEKLEWAVDDEEKKKSPSESTEEKANGTHPKTISRIGSTTNPFLDIPHDPNAAVYKSGFLARKIHADMDGKKTPRGKRGWKTFYAVLKGTVLYLQKDEYKPEKALSEEDLKNAVSVHHALASKATDYEKKPNVFKLKTADWRVLLFQTQSPEEMQGWINKINCVAAVFSAPPFPAAIGSQKKFSRPLLPATTTKLSQEEQLKSHESKLKQITTELAEHRSYPPDKKVKAKDVDEYKLKDHYLEFEKTRYEMYVSILKEGGKELLSNDESEAAGLKKSHSSPSLNPDTSPITAKVKRNVSERKDHRPETPSIKQKVT

SEQ ID NO: 846223 - protein, 1204 aa, Homo sapiens
IPGCLGWRWRREELPRSPCTGCPLLAMANGGGGGGGSSGGGGGGGGSSLRMSSNIHANHLSLDASSSSSSSSSSSSSSSSSSSSSSVHEPKMDALIIPVTMEVPCDSRGQRMWWAFLASSMVTFFGGLFIILLWRTLKYLWTVCCHCGGKTKEAQKINNGSSQADGTLKPVDEKEEAVAAEVGWMTSVKDWAGVMISAQTLTGRVLVVLVFALSIGALVIYFIDSSNPIESCQNFYKDFTLQIDMAFNVFFLLYFGLRFIAANDKLWFWLEVNSVVDFFTVPPVFVSVYLNRSWLGLRFLRALRLIQFSEILQFLNILKTSNSIKLVNLLSIFISTWLTAAGFIHLVENSGDPWENFQNNQALTYWECVYLLMVTMSTVGYGDVYAKTTLGRLFMVFFILGGLAMFASYVPEIIELIGNRKKYGGSYSAVSGRKHIVVCGHITLESVSNFLKDFLHKDRDDVNVEIVFLHNISPNLELEALFKRHFTQVEFYQGSVLNPHDLARVKIESADACLILANKYCADPDAEDASNIMRVISIKNYHPKIRIITQMLQYHNKAHLLNIPSWNWKEGDDAICLAELKLGFIAQSCLAQGLSTMLANLFSMRSFIKIEEDTWQKYYLEGVSNEMYTEYLSSAFVGLSFPTVCELCFVKLKLLMIAIEYKSANRESRILINPGNHLKIQEGTLGFFIASDAKEVKRAFFYCKACHDDITDPKRIKKCGCKRLEDEQPSTLSPKKKQRNGGMRNSPNTSPKLMRHDPLLIPGNDQIDNMDSNVKKYDSTGMFHWCAPKEIEKVILTRSEAAMTVLSGHVVVCIFGDVSSALIGLRNLVMPLRASNFHYHELKHIVFVGSIEYLKREWETLHNFPKVSILPGTPLSRADLRAVNINLCDMCVILSANQNNIDDTSLQDKECILASLNIKSMQFDDSIGVLQANSQGFTPPGMDRSSPDNSPVHGMLRQPSITTGVNIPIITELVNDTNVQFLDQDDDDDPDTELYLTQPFACGTAFAVSVLDSLMSATYFNDNILTLIRTLVTGGATPELEALIAEENALRGGYSTPQTLANRDRCRVAQLALLDGPFADLGDGGCYGDLFCKALKTYNMLCFGIYRLRDAHLSTPSQCTKRYVITNPPYEFELVPTDLIFCLMQFDHNAGQSRASLSHSSHSSQSSSKKSSSVHSIPSTANRQNRPKSRESRDKQKYVQEERL

SEQ ID NO: 846224 - protein, 1262 aa, Homo sapiens
IPGCLGWRWRREELPRSPCTGCPLLAMANGGGGGGGSSGGGGGGGGSSLRMSSNIHANHLSLDASSSSSSSSSSSSSSSSSSSSSSVHEPKMDALIIPVTMEVPCDSRGQRMWWAFLASSMVTFFGGLFIILLWRTLKYLWTVCCHCGGKTKEAQKINNGSSQADGTLKPVDEKEEAVAAEVGWMTSVKDWAGVMISAQTLTGRVLVVLVFALSIGALVIYFIDSSNPIESCQNFYKDFTLQIDMAFNVFFLLYFGLRFIAANDKLWFWLEVNSVVDFFTVPPVFVSVYLNRSWLGLRFLRALRLIQFSEILQFLNILKTSNSIKLVNLLSIFISTWLTAAGFIHLVENSGDPWENFQNNQALTYWECVYLLMVTMSTVGYGDVYAKTTLGRLFMVFFILGGLAMFASYVPEIIELIGNRKKYGGSYSAVSGRKHIVVCGHITLESVSNFLKDFLHKDRDDVNVEIVFLHNISPNLELEALFKRHFTQVEFYQGSVLNPHDLARVKIESADACLILANKYCADPDAEDASNIMRVISIKNYHPKIRIITQMLQYHNKAHLLNIPSWNWKEGDDAICLAELKLGFIAQSCLAQGLSTMLANLFSMRSFIKIEEDTWQKYYLEGVSNEMYTEYLSSAFVGLSFPTVCELCFVKLKLLMIAIEYKSANRESRILINPGNHLKIQEGTLGFFIASDAKEVKRAFFYCKACHDDITDPKRIKKCGCKRPKMSIYKRMRRACCFDCGRSERDCSCMSGRVRGNVDTLERAFPLSSVSVNDCSTSFRAFEDEQPSTLSPKKKQRNGGMRNSPNTSPKLMRHDPLLIPGNDQIDNMDSNVKKYDSTGMFHWCAPKEIEKVILTRSEAAMTVLSGHVVVCIFGDVSSALIGLRNLVMPLRASNFHYHELKHIVFVGSIEYLKREWETLHNFPKVSILPGTPLSRADLRAVNINLCDMCVILSANQNNIDDTSLQDKECILASLNIKSMQFDDSIGVLQANSQGFTPPGMDRSSPDNSPVHGMLRQPSITTGVNIPIITELVNDTNVQFLDQDDDDDPDTELYLTQPFACGTAFAVSVLDSLMSATYFNDNILTLIRTLVTGGATPELEALIAEENALRGGYSTPQTLANRDRCRVAQLALLDGPFADLGDGGCYGDLFCKALKTYNMLCFGIYRLRDAHLSTPSQCTKRYVITNPPYEFELVPTDLIFCLMQFDHNAGQSRASLSHSSHSSQSSSKKSSSVHSIPSTANRQNRPKSRESRDKQKYVQEERL

SEQ ID NO: 846225 - protein, 121 aa, Homo sapiens
SCDVYLGLSENYEMKVASHFMKPLAVGLLESDFDTCIERYVITNPPYEFELVPTDLIFCLMQFDHNAGQSRASLSHSSHSSQSSSKKSSSVHSIPSTANRQNRPKSRESRDKQKYVQEERL

SEQ ID NO: 846226 - protein, 936 aa, Homo sapiens
IPGCLGWRWRREELPRSPCTGCPLLAMANGGGGGGGSSGGGGGGGGSSLRMSSNIHANHLSLDASSSSSSSSSSSSSSSSSSSSSSVHEPKMDALIIPVTMEVPCDSRGQRMWWAFLASSMVTFFGGLFIILLWRTLKYLWTVCCHCGGKTKEAQKINNGSSQADGTLKPVDEKEEAVAAEVGWMTSVKDWAGVMISAQTLTGRVLVVLVFALSIGALVIYFIDSSNPIESCQNFYKDFTLQIDMAFNVFFLLYFGLRFIAANDKLWFWLEVNSVVDFFTVPPVFVSVYLNRSWLGLRFLRALRLIQFSEILQFLNILKTSNSIKLVNLLSIFISTWLTAAGFIHLVENSGDPWENFQNNQALTYWECVYLLMVTMSTVGYGDVYAKTTLGRLFMVFFILGGLAMFASYVPEIIELIGNRKKYGGSYSAVSGRKHIVVCGHITLESVSNFLKDFLHKDRDDVNVEIVFLHNISPNLELEALFKRHFTQVEFYQGSVLNPHDLARVKIESADACLILANKYCADPDAEDASNIMRVISIKNYHPKIRIITQMLQYHNKAHLLNIPSWNWKEGDDAICLAELKLGFIAQSCLAQGLSTMLANLFSMRSFIKIEEDTWQKYYLEGVSNEMYTEYLSSAFVGLSFPTVCELCFVKLKLLMIAIEYKSANRESRILINPGNHLKIQEGTLGFFIASDAKEVKRAFFYCKACHDDITDPKRIKKCGCKRPKMSIYKRMRRACCFDCGRSERDCSCMSGRVRGNVDTLERAFPLSSVSVNDCSTSFRAFEDEQPSTLSPKKKQRNGGMRNSPNTSPKLMRHDPLLIPGNDQIDNMDSNVKKYDSTGMFHWCAPKEIEKVILTRSEAAMTVLSGHVVVCIFGDVSSALIGLRNLVMPLRASNFHYHELKHIVFVGSIEYLKREWETLHNFPKVSILPVSPRSHY

SEQ ID NO: 846227 - protein, 733 aa, Homo sapiens
IPGCLGWRWRREELPRSPCTGCPLLAMANGGGGGGGSSGGGGGGGGSSLRMSSNIHANHLSLDASSSSSSSSSSSSSSSSSSSSSSVHEPKMDALIIPVTMEVPCDSRGQRMWWAFLASSMVTFFGGLFIILLWRTLKYLWTVCCHCGGKTKEAQKINNGSSQADGTLKPVDEKEEAVAAEVGWMTSVKDWAGVMISAQTLTGRVLVVLVFALSIGALVIYFIDSSNPIESCQNFYKDFTLQIDMAFNVFFLLYFGLRFIAANDKLWFWLEVNSVVDFFTVPPVFVSVYLNRSWLGLRFLRALRLIQFSEILQFLNILKTSNSIKLVNLLSIFISTWLTAAGFIHLVENSGDPWENFQNNQALTYWECVYLLMVTMSTVGYGDVYAKTTLGRLFMVFFILGGLAMFASYVPEIIELIGNRKKYGGSYSAVSGRKHIVVCGHITLESVSNFLKDFLHKDRDDVNVEIVFLHNISPNLELEALFKRHFTQVEFYQGSVLNPHDLARVKIESADACLILANKYCADPDAEDASNIMRVISIKNYHPKIRIITQMLQYHNKAHLLNIPSWNWKEGDDAICLAELKLGFIAQSCLAQGLSTMLANLFSMRSFIKIEEDTWQKYYLEGVSNEMYTEYLSSAFVGLSFPTVCELCFVKLKLLMIAIEYKSANRESRILINPGNHLKIQEGTLGFFIASDAKEVKRAFFYCKACHDDITDPKRIKTDANVHFPTLTTTPVD

SEQ ID NO: 846228 - protein, 722 aa, Homo sapiens
IPGCLGWRWRREELPRSPCTGCPLLAMANGGGGGGGSSGGGGGGGGSSLRMSSNIHANHLSLDASSSSSSSSSSSSSSSSSSSSSSVHEPKMDALIIPVTMEVPCDSRGQRMWWAFLASSMVTFFGGLFIILLWRTLKYLWTVCCHCGGKTKEAQKINNGSSQADGTLKPVDEKEEAVAAEVGWMTSVKDWAGVMISAQTLTGRVLVVLVFALSIGALVIYFIDSSNPIESCQNFYKDFTLQIDMAFNVFFLLYFGLRFIAANDKLWFWLEVNSVVDFFTVPPVFVSVYLNRSWLGLRFLRALRLIQFSEILQFLNILKTSNSIKLVNLLSIFISTWLTAAGFIHLVENSGDPWENFQNNQALTYWECVYLLMVTMSTVGYGDVYAKTTLGRLFMVFFILGGLAMFASYVPEIIELIGNRKKYGGSYSAVSGRKHIVVCGHITLESVSNFLKDFLHKDRDDVNVEIVFLHNISPNLELEALFKRHFTQVEFYQGSVLNPHDLARVKIESADACLILANKYCADPDAEDASNIMRVISIKNYHPKIRIITQMLQYHNKAHLLNIPSWNWKEGDDAICLAELKLGFIAQSCLAQGLSTMLANLFSMRSFIKIEEDTWQKYYLEGVSNEMYTEYLSSAFVGLSFPTVCELCFVKLKLLMIAIEYKSANRESRILINPGNHLKIQEGTLGFFIASDAKEVKRPPQLCLPLAAQKRCFQSDKLDIFI

SEQ ID NO: 846229 - protein, 678 aa, Homo sapiens
IPGCLGWRWRREELPRSPCTGCPLLAMANGGGGGGGSSGGGGGGGGSSLRMSSNIHANHLSLDASSSSSSSSSSSSSSSSSSSSSSVHEPKMDALIIPVTMEVPCDSRGQRMWWAFLASSMVTFFGGLFIILLWRTLKYLWTVCCHCGGKTKEAQKINNGSSQADGTLKPVDEKEEAVAAEVGWMTSVKDWAGVMISAQTLTGRVLVVLVFALSIGALVIYFIDSSNPIESCQNFYKDFTLQIDMAFNVFFLLYFGLRFIAANDKLWFWLEVNSVVDFFTVPPVFVSVYLNRSWLGLRFLRALRLIQFSEILQFLNILKTSNSIKLVNLLSIFISTWLTAAGFIHLVENSGDPWENFQNNQALTYWECVYLLMVTMSTVGYGDVYAKTTLGRLFMVFFILGGLAMFASYVPEIIELIGNRKKYGGSYSAVSGRKHIVVCGHITLESVSNFLKDFLHKDRDDVNVEIVFLHNISPNLELEALFKRHFTQVEFYQGSVLNPHDLARVKIESADACLILANKYCADPDAEDASNIMRVISIKNYHPKIRIITQMLQYHNKAHLLNIPSWNWKEGDDAICLAELKLGFIAQSCLAQGLSTMLANLFSMRSFIKIEEDTWQKYYLEGVSNEMYTEYLSSAFVGLSFPTVCELCFVKLKLLMIAKTEQLVFFQNCKNFFGGGSE

SEQ ID NO: 846230 - protein, 113 aa, Homo sapiens
DTKKSCNLDVGCHDFRVFAYRTFPSLSLLPQTYFNDNILTLIRTLVTGGATPELEALIAEENALRGGYSTPQTLANRDRCRVAQLALLDGPFADLGVSPQHRGHLSLLFGKSL

SEQ ID NO: 846231 - protein, 1204 aa, Homo sapiens; identical to SEQ ID NO: 846223

SEQ ID NO: 846232 - protein, 1233 aa, Homo sapiens
IPGCLGWRWRREELPRSPCTGCPLLAMANGGGGGGGSSGGGGGGGGSSLRMSSNIHANHLSLDASSSSSSSSSSSSSSSSSSSSSSVHEPKMDALIIPVTMEVPCDSRGQRMWWAFLASSMVTFFGGLFIILLWRTLKYLWTVCCHCGGKTKEAQKINNGSSQADGTLKPVDEKEEAVAAEVGWMTSVKDWAGVMISAQTLTGRVLVVLVFALSIGALVIYFIDSSNPIESCQNFYKDFTLQIDMAFNVFFLLYFGLRFIAANDKLWFWLEVNSVVDFFTVPPVFVSVYLNRSWLGLRFLRALRLIQFSEILQFLNILKTSNSIKLVNLLSIFISTWLTAAGFIHLVENSGDPWENFQNNQALTYWECVYLLMVTMSTVGYGDVYAKTTLGRLFMVFFILGGLAMFASYVPEIIELIGNRKKYGGSYSAVSGRKHIVVCGHITLESVSNFLKDFLHKDRDDVNVEIVFLHNISPNLELEALFKRHFTQVEFYQGSVLNPHDLARVKIESADACLILANKYCADPDAEDASNIMRVISIKNYHPKIRIITQMLQYHNKAHLLNIPSWNWKEGDDAICLAELKLGFIAQSCLAQGLSTMLANLFSMRSFIKIEEDTWQKYYLEGVSNEMYTEYLSSAFVGLSFPTVCELCFVKLKLLMIAIEYKSANRESRILINPGNHLKIQEGTLGFFIASDAKEVKRAFFYCKACHDDITDPKRIKKCGCKRLKVAARSRYSKDPFEFKKETPNSRLVTEPVEDEQPSTLSPKKKQRNGGMRNSPNTSPKLMRHDPLLIPGNDQIDNMDSNVKKYDSTGMFHWCAPKEIEKVILTRSEAAMTVLSGHVVVCIFGDVSSALIGLRNLVMPLRASNFHYHELKHIVFVGSIEYLKREWETLHNFPKVSILPGTPLSRADLRAVNINLCDMCVILSANQNNIDDTSLQDKECILASLNIKSMQFDDSIGVLQANSQGFTPPGMDRSSPDNSPVHGMLRQPSITTGVNIPIITELVNDTNVQFLDQDDDDDPDTELYLTQPFACGTAFAVSVLDSLMSATYFNDNILTLIRTLVTGGATPELEALIAEENALRGGYSTPQTLANRDRCRVAQLALLDGPFADLGDGGCYGDLFCKALKTYNMLCFGIYRLRDAHLSTPSQCTKRYVITNPPYEFELVPTDLIFCLMQFDHNAGQSRASLSHSSHSSQSSSKKSSSVHSIPSTANRQNRPKSRESRDKQKYVQEERL

SEQ ID NO: 846233 - protein, 1261 aa, Homo sapiens
IPGCLGWRWRREELPRSPCTGCPLLAMANGGGGGGGSSGGGGGGGGSSLRMSSNIHANHLSLDASSSSSSSSSSSSSSSSSSSSSSVHEPKMDALIIPVTMEVPCDSRGQRMWWAFLASSMVTFFGGLFIILLWRTLKYLWTVCCHCGGKTKEAQKINNGSSQADGTLKPVDEKEEAVAAEVGWMTSVKDWAGVMISAQTLTGRVLVVLVFALSIGALVIYFIDSSNPIESCQNFYKDFTLQIDMAFNVFFLLYFGLRFIAANDKLWFWLEVNSVVDFFTVPPVFVSVYLNRSWLGLRFLRALRLIQFSEILQFLNILKTSNSIKLVNLLSIFISTWLTAAGFIHLVENSGDPWENFQNNQALTYWECVYLLMVTMSTVGYGDVYAKTTLGRLFMVFFILGGLAMFASYVPEIIELIGNRKKYGGSYSAVSGRKHIVVCGHITLESVSNFLKDFLHKDRDDVNVEIVFLHNISPNLELEALFKRHFTQVEFYQGSVLNPHDLARVKIESADACLILANKYCADPDAEDASNIMRVISIKNYHPKIRIITQMLQYHNKAHLLNIPSWNWKEGDDAICLAELKLGFIAQSCLAQGLSTMLANLFSMRSFIKIEEDTWQKYYLEGVSNEMYTEYLSSAFVGLSFPTVCELCFVKLKLLMIAIEYKSANRESRILINPGNHLKIQEGTLGFFIASDAKEVKRAFFYCKACHDDITDPKRIKKCGCKRPKMSIYKRMRRACCFDCGRSERDCSCMSGRVRGNVDTLERAFPLSSVSVNDCSTSFRAFEDEQPSTLSPKKKQRNGGMRNSPNTSPKLMRHDPLLIPGNDQIDNMDSNVKKYDSTGMFHWCAPKEIEKVILTRSEAAMTVLSGHVVVCIFGDVSSALIGLRNLVMPLRASNFHYHELKHIVFVGSIEYLKREWETLHNFPKVSILPGTPLSRADLRAVNINLCDMCVILSANQNNIDDTSLQDKECILASLNIKSMQFDDSIGVLQANSQGFTPPGMDRSSPDNSPVHGMLRQPSITTGVNIPIITELVNDTNVQFLDQDDDDDPDTELYLTQPFACGTAFAVSVLDSLMSATYFNDNILTLIRTLVTGGATPELEALIAEENALRGGYSTPQTLANRDRCRVAQLALLDGPFADLGDGGCYGDLFCKALKTYNMLCFGIYRLRDAHLSTPSQCTKRYVITNPPYEFELVPTDLIFCLMQFDHNAGQSRASLSHSSHSSQSSSKKSSSVHSIPSTANRQNRPKSRESRDKQKKEMVYR

SEQ ID NO: 846234 - protein, 741 aa, Homo sapiens
IPGCLGWRWRREELPRSPCTGCPLLAMANGGGGGGGSSGGGGGGGGSSLRMSSNIHANHLSLDASSSSSSSSSSSSSSSSSSSSSSVHEPKMDALIIPVTMEVPCDSRGQRMWWAFLASSMVTFFGGLFIILLWRTLKYLWTVCCHCGGKTKEAQKINNGSSQADGTLKPVDEKEEAVAAEVGWMTSVKDWAGVMISAQTLTGRVLVVLVFALSIGALVIYFIDSSNPIESCQNFYKDFTLQIDMAFNVFFLLYFGLRFIAANDKLWFWLEVNSVVDFFTVPPVFVSVYLNRSWLGLRFLRALRLIQFSEILQFLNILKTSNSIKLVNLLSIFISTWLTAAGFIHLVENSGDPWENFQNNQALTYWECVYLLMVTMSTVGYGDVYAKTTLGRLFMVFFILGGLAMFASYVPEIIELIGNRKKYGGSYSAVSGRKHIVVCGHITLESVSNFLKDFLHKDRDDVNVEIVFLHNISPNLELEALFKRHFTQVEFYQGSVLNPHDLARVKIESADACLILANKYCADPDAEDASNIMRVISIKNYHPKIRIITQMLQYHNKAHLLNIPSWNWKEGDDAICLAELKLGFIAQSCLAQGLSTMLANLFSMRSFIKIEEDTWQKYYLEGVSNEMYTEYLSSAFVGLSFPTVCELCFVKLKLLMIAIEYKSANRESRILINPGNHLKIQEGTLGFFIASDAKEVKRAFFYCKACHDDITDPKRIKKCGCKRRQWPVLRILILTASTTRQ

SEQ ID NO: 846235 - protein, 624 aa, Homo sapiens
IPGCLGWRWRREELPRSPCTGCPLLAMANGGGGGGGSSGGGGGGGGSSLRMSSNIHANHLSLDASSSSSSSSSSSSSSSSSSSSSSVHEPKMDALIIPVTMEVPCDSRGQRMWWAFLASSMVTFFGGLFIILLWRTLKYLWTVCCHCGGKTKEAQKINNGSSQADGTLKPVDEKEEAVAAEVGWMTSVKDWAGVMISAQTLTGRVLVVLVFALSIGALVIYFIDSSNPIESCQNFYKDFTLQIDMAFNVFFLLYFGLRFIAANDKLWFWLEVNSVVDFFTVPPVFVSVYLNRSWLGLRFLRALRLIQFSEILQFLNILKTSNSIKLVNLLSIFISTWLTAAGFIHLVENSGDPWENFQNNQALTYWECVYLLMVTMSTVGYGDVYAKTTLGRLFMVFFILGGLAMFASYVPEIIELIGNRKKYGGSYSAVSGRKHIVVCGHITLESVSNFLKDFLHKDRDDVNVEIVFLHNISPNLELEALFKRHFTQVEFYQGSVLNPHDLARVKIESADACLILANKYCADPDAEDASNIMRVISIKNYHPKIRIITQMLQYHNKAHLLNIPSWNWKEGDDAICLAELKLGFIAQSCLAQGLSTMLANLFSMRSFIKVSSLIQAALILHGWN

SEQ ID NO: 846236 - protein, 610 aa, Homo sapiens
IPGCLGWRWRREELPRSPCTGCPLLAMANGGGGGGGSSGGGGGGGGSSLRMSSNIHANHLSLDASSSSSSSSSSSSSSSSSSSSSSVHEPKMDALIIPVTMEVPCDSRGQRMWWAFLASSMVTFFGGLFIILLWRTLKYLWTVCCHCGGKTKEAQKINNGSSQADGTLKPVDEKEEAVAAEVGWMTSVKDWAGVMISAQTLTGRVLVVLVFALSIGALVIYFIDSSNPIESCQNFYKDFTLQIDMAFNVFFLLYFGLRFIAANDKLWFWLEVNSVVDFFTVPPVFVSVYLNRSWLGLRFLRALRLIQFSEILQFLNILKTSNSIKLVNLLSIFISTWLTAAGFIHLVENSGDPWENFQNNQALTYWECVYLLMVTMSTVGYGDVYAKTTLGRLFMVFFILGGLAMFASYVPEIIELIGNRKKYGGSYSAVSGRKHIVVCGHITLESVSNFLKDFLHKDRDDVNVEIVFLHNISPNLELEALFKRHFTQVEFYQGSVLNPHDLARVKIESADACLILANKYCADPDAEDASNIMRVISIKNYHPKIRIITQMLQYHNKAHLLNIPSWNWKEGDDAICLAELKLGFIAQSCLAQGLSTMLANLFSMRSFIKL

SEQ ID NO: 846237 - protein, 111 aa, Homo sapiens
MTREPPGCRRVNSLMLYTLRSITSHRSSHPERWATSSQFLPYIPVQPQPLELSFYTMDLITVHLLYGCPSLLHGPTLAGTVLGAAGDPRPWPVHASQPPYTGHPYVLPFRA

SEQ ID NO: 846238 - protein, 380 aa, Homo sapiens
MGIQGLAKLIADVAPSAIRENDIKSYFGRKVAIDASMSIYQFLIAVRQGGDVLQNEEGETTSHLMGMFYRTIRMMENGIKPVYVFDGKPPQLKSGELAKRSERRAEAEKQLQQAQAAGAEQEVEKFTKRLVKVTKQHNDECKHLLSLMGIPYLDAPSEAEASCAALVKAGKVYAAATEDMDCLTFGSPVLMRHLTASEAKKLPIQEFHLSRILQELGLNQEQFVDLCILLGSDYCESIRGIGPKRAVDLIQKHKSIEEIVRRLDPNKYPVPENWLHKEAHQLFLEPEVLDPESVELKWSEPNEEELIKFMCGEKQFSEERIRSGVKRLSKSRQGSTQGRLDDFFKVTGSLSSAKRKEPEPKGSTKKKAKTGAAGKFKRGK

SEQ ID NO: 846239 - protein, 364 aa, Homo sapiens
MGIQGLAKLIADVAPSAIRENDIKSYFGRKVAIDASMSIYQFLIAVRQGGDVLQNEEGETTSHLMGMFYRTIRMMENGIKPVYVFDGKPPQLKSGELAKRSERRAEAEKQLQQAQAAGAEQEVEKFTKRLVKVTKQHNDECKHLLSLMGIPYLDAPSEAEASCAALVKAGKVYAAATEDMDCLTFGSPVLMRHLTASEAKKLPIQEFHLSRILQELGLNQEQFVDLCILLGSDYCESIRGIGPKRAVDLIQKHKSIEEIVRRLDPNKYPVPENWLHKEAHQLFLEPEVLDPESVELKWSEPNEEELIKFMCGEKQFSEERIRSGVKRLSKSRQGSTQGRLDDFSLTHLEREPPGRRILADGRNC

SEQ ID NO: 846240 - protein, 329 aa, Homo sapiens
MGIQGLAKLIADVAPSAIRENDIKSYFGRKVAIDASMSIYQFLIAVRQGGDVLQNEEGETTSHLMGMFYRTIRMMENGIKPVYVFDGKPPQLKSGELAKRSERRAEAEKQLQQAQAAGAEQEVEKFTKRLVKVTKQHNDECKHLLSLMGIPYLDAPSEAEASCAALVKAGKVYAAATEDMDCLTFGSPVLMRHLTASEAKKLPIQEFHLSRILQELGLNQEQFVDLCILLGSDYCEVLDPESVELKWSEPNEEELIKFMCGEKQFSEERIRSGVKRLSKSRQGSTQGRLDDFFKVTGSLSSAKRKEPEPKGSTKKKAKTGAAGKFKRGK

SEQ ID NO: 846241 - protein, 380 aa, Homo sapiens; identical to SEQ ID NO: 846238

SEQ ID NO: 846242 - protein, 190 aa, Homo sapiens
MRHLTASEAKKLPIQEFHLSRILQELGLNQEQFVDLCILLGSDYCESIRGIGPKRAVDLIQKHKSIEEIVRRLDPNKYPVPENWLHKEAHQLFLEPEVLDPESVELKWSEPNEEELIKFMCGEKQFSEERIRSGVKRLSKSRQGSTQGRLDDFFKVTGSLSSAKRKEPEPKGSTKKKAKTGAAGKFKRGK

SEQ ID NO: 846243 - protein, 163 aa, Homo sapiens
SESRSDIVMHAWNVAAIVQSIRGIGPKRAVDLIQKHKSIEEIVRRLDPNKYPVPENWLHKEAHQLFLEPEVLDPESVELKWSEPNEEELIKFMCGEKQFSEERIRSGVKRLSKSRQGSTQGRLDDFFKVTGSLSSAKRKEPEPKGSTKKKAKTGAAGKFKRGK

SEQ ID NO: 846244 - protein, 194 aa, Homo sapiens
  misc_feature (11)..(11): Xaa can be any naturally occurring amino acid
  misc_feature (32)..(32): Xaa can be any naturally occurring amino acid
  misc_feature (42)..(42): Xaa can be any naturally occurring amino acid
  misc_feature (44)..(44): Xaa can be any naturally occurring amino acid
  misc_feature (47)..(47): Xaa can be any naturally occurring amino acid
  misc_feature (52)..(52): Xaa can be any naturally occurring amino acid
KVKLYKQQCLXKTDGHVTFITCPERVAEVPGXVLKLPVHRSXRXRYXTVSSXGALSVVTGALAEQDSTVMSQMRFGRPLRRRGFIGSLRYLCRPSRLAVILEQVSVGSHERWSEPNEEELIKFMCGEKQFSEERIRSGVKRLSKSRQGSTQGRLDDFFKVTGSLSSAKRKEPEPKGSTKKKAKTGAAGKFKRGK

SEQ ID NO: 846245 - protein, 90 aa, Homo sapiens
MGIQGLAKLIADVAPSAIRENDIKSYFGRKVAIDASMSIYQFLIAVRQGGDVLQNEEGETTSHLMGMFYRTIRMMENGIKPVYVFDGKPP

SEQ ID NO: 846246 - protein, 380 aa, Homo sapiens; identical to SEQ ID NO: 846238

SEQ ID NO: 846247 - protein, 69 aa, Homo sapiens
SPAISGVEGAGACGDLVWVEWGQAVEKGTPGSLRDSVLPGGTGCHESSRLRGRSLHYAPQEAVRGEQVT

SEQ ID NO: 846248 - protein, 270 aa, Homo sapiens
MGIQGLAKLIADVAPSAIRENDIKSYFGRKVAIDASMSIYQFLIAVRQGGDVLQNEEGETTSHLMGMFYRTIRMMENGIKPVYVFDGKPPQLKSGELAKRSERRAEAEKQLQQAQAAGAEQEVEKFTKRLVKVTKQHNDECKHLLSLMGIPYLDAPSEAEASCAALVKAGKVYAAATEDMDCLTFGSPVLMRHLTASEAKKLPIQEFHLSRILQELGLNQEQFVDLCILLGSDYCEDLTPTSTLCQKIGSTRRLTSSSWNLRCWTQSLWS

SEQ ID NO: 846249 - protein, 380 aa, Homo sapiens; identical to SEQ ID NO: 846238

SEQ ID NO: 846250 - protein, 316 aa, Homo sapiens
MGMFYRTIRMMENGIKPVYVFDGKPPQLKSGELAKRSERRAEAEKQLQQAQAAGAEQEVEKFTKRLVKVTKQHNDECKHLLSLMGIPYLDAPSEAEASCAALVKAGKVYAAATEDMDCLTFGSPVLMRHLTASEAKKLPIQEFHLSRILQELGLNQEQFVDLCILLGSDYCESIRGIGPKRAVDLIQKHKSIEEIVRRLDPNKYPVPENWLHKEAHQLFLEPEVLDPESVELKWSEPNEEELIKFMCGEKQFSEERIRSGVKRLSKSRQGSTQGRLDDFFKVTGSLSSAKRKEPEPKGSTKKKAKTGAAGKFKRGK

SEQ ID NO: 846251 - protein, 233 aa, Homo sapiens [sequence omitted]

SEQ ID NO: 846252 - protein, 149 aa, Homo sapiens
MGIQGLAKLIADVAPSAIRENDIKSYFGRKVAIDASMSIYQFLIAVRQGGDVLQNEEGETTSHLMGMFYRTIRMMENGIKPVYVFDGKPPQLKSGELAKRSERRAEAEKQLQQAQAAGAEQEVEKFTKRLVKVTKQHNDDQGDRLTLFS

SEQ ID NO: 846253 - protein, 169 aa, Homo sapiens
MLPSTMFLVHLPLSTNRLHCLRNTSLESYLCSFVHLNHPLHISDRVILISLHEAVRFSFAFSFPRGTLSIAYCLMSSVSTSSEAIMSTELLANYCHSSLHVCICISSFPNETGNHDSFPGAVVSISDQPTDQCKLAAKELPLRNLLECRFFDCMGEEDLINLGVIGTER

SEQ ID NO: 846254 - protein, 296 aa, Homo sapiens
MDGDGDPESVGQPEEASPEEQPEEASAEEERPEDQQEEEAAAAAAYLDELPEPLLLRVLAALPAAELVQACRLVCLRWKELVDGAPLWLLKCQQEGLVPEGGVEEERDHWQQFYFLSKRRRNLLRNPCGEEDLEGWCDVEHGGDGWRVEELPGDSGVEFTHDESVKKYFASSFEWCRKAQVIDLQAEGYWEELLDTTQPAIVVKDWYSGRSDAGCLYELTVKLLSEHENVLAEFSSGQVAVPQDSDGGGWMEISHTFTDYGPGVRFVRFEHGGQDSVYWKGWFGARVTNSSVWVEP

SEQ ID NO: 846255 - protein, 296 aa, Homo sapiens; identical to SEQ ID NO: 846254

SEQ ID NO: 846256 - protein, 313 aa, Homo sapiens
MDALPPGVTGAVQGAWDTSGTLIKESVGQPEEASPEEQPEEASAEEERPEDQQEEEAAAAAAYLDELPEPLLLRVLAALPAAELVQACRLVCLRWKELVDGAPLWLLKCQQEGLVPEGGVEEERDHWQQFYFLSKRRRNLLRNPCGEEDLEGWCDVEHGGDGWRVEELPGDSGVEFTHDESVKKYFASSFEWCRKAQVIDLQAEGYWEELLDTTQPAIVVKDWYSGRSDAGCLYELTVKLLSEHENVLAEFSSGQVAVPQDSDGGGWMEISHTFTDYGPGVRFVRFEHGGQDSVYWKGWFGARVTNSSVWVEP

SEQ ID NO: 846257 - protein, 289 aa, Homo sapiens
MDGDGDPESVGQPEEASPEEQPEEASAEEERPEDQQEEEAAAAAAYLDELPEPLLLRVLAALPAAELVQACRLVCLRWKELVDGAPLWLLKCQQEGLVPEGGVEEERDHWQQFYFLSKRRRNLLRNPCGEEDLEGWCDVEHGGDGWRVEELPGDSGVEFTHDESVKKWCRKAQVIDLQAEGYWEELLDTTQPAIVVKDWYSGRSDAGCLYELTVKLLSEHENVLAEFSSGQVAVPQDSDGGGWMEISHTFTDYGPGVRFVRFEHGGQDSVYWKGWFGARVTNSSVWVEP

SEQ ID NO: 846258 - protein, 206 aa, Homo sapiens
MDGDGDPESVGQPEEASPEEQPEEASAEEERPEDQQEEEAAAAAAYLDELPEPLLLRVLAALPAAELVQACRLVCLRWKELVDGAPLWLLKCQQEGLVPEGGVEEERDHWQQFYFLSKRRRNLLRNPCGEEDLEGWCDVEHGGDGWRVEELPGDSGVEFTHDESVKKYFASSFEWCRKAQVIDLQAEGYWEELLDTTQPAIVVKDW

SEQ ID NO: 846259 - protein, 298 aa, Homo sapiens
MPWTLGPTPESVGQPEEASPEEQPEEASAEEERPEDQQEEEAAAAAAYLDELPEPLLLRVLAALPAAELVQACRLVCLRWKELVDGAPLWLLKCQQEGLVPEGGVEEERDHWQQFYFLSKRRRNLLRNPCGEEDLEGWCDVEHGGDGWRVEELPGDSGVEFTHDESVKKYFASSFEWCRKAQVIDLQAEGYWEELLDTTQPAIVVKDWYSGRSDAGCLYELTVKLLSEHENVLAEFSSGQVAVPQDSDGGGWMEISHTFTDYGPGVRFVRFEHGGQDSVYWKGWFGARVTNSSVWVEP

SEQ ID NO: 846260 - protein, 272 aa, Homo sapiens
MDGDGDPESVGQPEEASPEEQPEEASAEEERPEDQQEEEAAAAAAYLDELPEPLLLRVLAALPAAELVQACRLVCLRWKELVDGAPLWLLKCQQEGLVPEGGVEEERDHWQQFYFLSKRRRNLLRNPCGEEDLEGWCDVEHGGDGWRVEELPGDSGVEFTHDESVKKYFASSFEWCRKAQVIDLQAEGYWEELLDTTQPAIVVKDWYSGRSDAGCLYELTVKLLSEHENVLAEFSSGQVAVPQDSDGGGWMERPHLPQATHPPPIPCSDPSP

SEQ ID NO: 846261 - protein, 222 aa, Homo sapiens
MILLLLLVDGAPLWLLKCQQEGLVPEGGVEEERDHWQQFYFLSKRRRNLLRNPCGEEDLEGWCDVEHGGDGWRVEELPGDSGVEFTHDESVKKYFASSFEWCRKAQVIDLQAEGYWEELLDTTQPAIVVKDWYSGRSDAGCLYELTVKLLSEHENVLAEFSSGQVAVPQDSDGGGWMEISHTFTDYGPGVRFVRFEHGGQDSVYWKGWFGARVTNSSVWVEP

SEQ ID NO: 846262 - protein, 523 aa, Homo sapiens
MVPPRRHRGAGRPGVLSSSPPFRLRSAKFSGIALEDLRRALKTRLQMVCVFVMNRMNSQNSGFTQRRRMALGIVILLLVDVIWVASSELTSYVFTQYNKPFFSTFAKTSMFVLYLLGFIIWKPWRQQCTRGLRGKHAAFFADAEGYFAACTTDTTMNSSLSEPLYVPVKFHDLPSEKPESTNIDTEKTPKKSRVRFSNIMEIRQLPSSHALEAKLSRMSYPVKEQESILKTVGKLTATQVAKISFFFCFVWFLANLSYQEALSDTQVAIVNILSSTSGLFTLILAAVFPSNSGDRFTLSKLLAVILSIGGVVLVNLAGSEKPAGRDTVGSIWSLAGAMLYAVYIVMIKRKVDREDKLDIPMFFGFVGLFNLLLLWPGFFLLHYTGFEDFEFPNKVVLMCIIINGLIGTVLSEFLWLWGCFLTSSLIGTLALSLTIPLSIIADMCMQKVQFSWLFFAGAIPVFFSFFIVTLLCHYNNWDPVMVGIRRIFAFICRKHRIQRVPEDSEQCESLISMHSVSQEDGAS

SEQ ID NO: 846263 - protein, 536 aa, Homo sapiens
MVPPRRHRGAGRPGVLSSSPPFRLRSAKFSGIALEDLRRALKTRLQMVCVFVMNRMNSQNSGFTQRRRMALGIVILLLVDVIWVASSELTSYVFTQYNKPFFSTFAKTSMFVLYLLGFIIWKPWRQQCTRGLRGKHAAFFADAEGYFAACTTDTTMNSSLSEPLYVPVKFHDLPSEKPESTNIDTEKTPKKSRVRFSNIMEIRQLPSSHALEAKLSRMSYPVKEQESILKTVGKLTATQVAKISFFFCFVWFLANLSYQEALSDTQVAIVNILSSTSGLFTLILAAVFPSNSGDRFTLSKLLAVILRLDKEGNGYKILNFIGGVVLVNLAGSEKPAGRDTVGSIWSLAGAMLYAVYIVMIKRKVDREDKLDIPMFFGFVGLFNLLLLWPGFFLLHYTGFEDFEFPNKVVLMCIIINGLIGTVLSEFLWLWGCFLTSSLIGTLALSLTIPLSIIADMCMQKVQFSWLFFAGAIPVFFSFFIVTLLCHYNNWDPVMVGIRRIFAFICRKHRIQRVPEDSEQCESLISMHSVSQEDGAS

SEQ ID NO: 846264 - protein, 523 aa, Homo sapiens; identical to SEQ ID NO: 846262

SEQ ID NO: 846265 - protein, 523 aa, Homo sapiens; identical to SEQ ID NO: 846262

SEQ ID NO: 846266 - protein, 523 aa, Homo sapiens; identical to SEQ ID NO: 846262

SEQ ID NO: 846267 - protein, 523 aa, Homo sapiens; identical to SEQ ID NO: 846262

SEQ ID NO: 846268 - protein, 570 aa, Homo sapiens
MVPPRRHRGAGRPGVLSSSPPFRLRSAKFSGIALEDLRRALKTRLQMVCVFVMNRMNSQNSGFTQRRRMALGIVILLLVDVIWVASSELTSYVFTQYNKPFFSTFAKTSMFVLYLLGFIIWKPWRQQCTRGLRGKHAAFFADAEGYFAACTTDTTMNSSLSEPLYVPVKFHDLPSEKPESTNIDTEKTPKKSRVRFSNIMEIRQLPSSHALEAKLSRMSYPVKEQESILKTVGKLTATQVAKISFFFCFVWFLANLSYQEALSDTQVAIVNILSSTSGLFTLILAAVFPSNSGDRFTLSKLLAVILSIGGVVLVNLAGSEKPAGRDTVGSIWSLAGAMLYAVYIVMIKRKVDREDKLDIPMFFGFVGLFNLLLLWPGFFLLHYTGFEDFEFPNKVVLMCIIINGLIGTVLSEFLWLWGCFLTSSLIGTLALSLTIPLSIIADMCMQKVQFSWLFFAGAIPVFFSFFIVTLLCHYNNWDPVMVGIRRIFAFICRKHRIQRWNLALSPKLECSGEISGHCNLYLLGSSDSPASASRVAGTTGARHHTQLIFVFLVETGFHHVGQDGLDLLNS

SEQ ID NO: 846269 - protein, 254 aa, Homo sapiens
MVPPRRHRGAGRPGVLSSSPPFRLRSAKFSGIALEDLRRALKTRLQMVCVFVMNRMNSQNSGFTQRRRMALGIVILLLVDVIWVASSELTSYVFTQYNKPFFSTFAKTSMFVLYLLGFIIWKPWRQQCTRGLRGKHAAFFADAEGYFAACTTDTTMNSSLSEPLYVPVKFHDLPSEKPESTNIDTEKTPKKSRVRFSNIMEIRQLPSSHALEAKLSRMSYPVKEQESILKTVGKLTATQVAKISFFFCFVVGLL

SEQ ID NO: 846270 - protein, 248 aa, Homo sapiens
MDSSGWRGVLSSSPPFRLRSAKFSGIALEDLRRALKTRLQMVCVFVMNRMNSQNSGFTQRRRMALGIVILLLVDVIWVASSELTSYVFTQYNKPFFSTFAKTSMFVLYLLGFIIWKPWRQQCTRGLRGKHAAFFADAEGYFAACTTDTTMNSSLSEPLYVPVKFHDLPSEKPESTNIDTEKTPKKSRVRFSNIMEIRQLPSSHALEAKLSRMSYPVKEQESILKTVGKLTATQVAKISFFFCFVVGLL

SEQ ID NO: 846271 - protein, 523 aa, Homo sapiens; identical to SEQ ID NO: 846262

SEQ ID NO: 846272 - protein, 517 aa, Homo sapiens
MDSSGWRGVLSSSPPFRLRSAKFSGIALEDLRRALKTRLQMVCVFVMNRMNSQNSGFTQRRRMALGIVILLLVDVIWVASSELTSYVFTQYNKPFFSTFAKTSMFVLYLLGFIIWKPWRQQCTRGLRGKHAAFFADAEGYFAACTTDTTMNSSLSEPLYVPVKFHDLPSEKPESTNIDTEKTPKKSRVRFSNIMEIRQLPSSHALEAKLSRMSYPVKEQESILKTVGKLTATQVAKISFFFCFVWFLANLSYQEALSDTQVAIVNILSSTSGLFTLILAAVFPSNSGDRFTLSKLLAVILSIGGVVLVNLAGSEKPAGRDTVGSIWSLAGAMLYAVYIVMIKRKVDREDKLDIPMFFGFVGLFNLLLLWPGFFLLHYTGFEDFEFPNKVVLMCIIINGLIGTVLSEFLWLWGCFLTSSLIGTLALSLTIPLSIIADMCMQKVQFSWLFFAGAIPVFFSFFIVTLLCHYNNWDPVMVGIRRIFAFICRKHRIQRVPEDSEQCESLISMHSVSQEDGAS

SEQ ID NO: 846273 - protein, 523 aa, Homo sapiens; identical to SEQ ID NO: 846262

SEQ ID NO: 846274 - protein, 523 aa, Homo sapiens; identical to SEQ ID NO: 846262

SEQ ID NO: 846275 - protein, 525 aa, Homo sapiens
MVPPRRHRGAGRPGVLSSSPPFRLRSAKFSGIALEDLRRALKTRLQMVCVFVMNRMNSQNSGFTQRRRMALGIVILLLVDVIWVASSELTSYVFTQYNKPFFSTFAKTSMFVLYLLGFIIWKPWRQQCTRGLRGKHAAFFADAEGYFAACTTDTTMNSSLSEPLYVPVKFHDLPSEKPESTNIDTEKTPKKSRVRFSNIMEIRQLPSSHALEAKLSRMSYPVKEQESILKTVGKLTATQVAKISFFFCFVWFLANLSYQEALSDTQVAIVNILSSTSGLFTLILAAVFPSNSGDRFTLSKLLAVILSIGGVVLVNLAGSEKPAGRDTVGSIWSLAGAMLYAVYIVMIKRKVDREDKLDIPMFFGFVGLFNLLLLWPGFFLLHYTGFEDFEFPNKVVLMCIIINGLIGTVLSEFLWLWGCFLTSSLIGTLALSLTIPLSIIADMCMQKVQFSWLFFAGAIPVFFSFFIVTLLCHYNNWDPVMVGIRRIFAFICRKHRIQSLLMELYSGETIFGKFWRKNGSGPNLK

SEQ ID NO: 846276 - protein, 320 aa, Homo sapiens
MVPPRRHRGAGRPGVLSSSPPFRLRSAKFSGIALEDLRRALKTRLQMVCVFVMNRMNSQNSGFTQRRRMALGIVILLLVDVIWVASSELTSYVFTQYNKPFFSTFAKTSMFVLYLLGFIIWKPWRQQCTRGLRGKHAAFFADAEGYFAACTTDTTMNSSLSEPLYVPVKFHDLPSEKPESTNIDTEKTPKKSRVRFSNIMEIRQLPSSHALEAKLSRMSYPVKEQESILKTVGKLTATQVAKISFFFCFVWFLANLSYQEALSDTQVAIVNILSSTSGLFTLILAAVFPSNSGDRFTLSKLLAVILRLDKEGNGYKILNL

SEQ ID NO: 846277 - protein, 679 aa, Homo sapiens
MCRGCGCLPPDAPCPTLCSRNPAMVNEARGNSSLNPCLEGSASSGSESSKDSSRCSTPGLDPERHERLREKMRRRLESGDKWFSLEFFPPRTAEGAVNLISRFDRMAAGGPLYIDVTWHPAGDPGSDKETSSMMIASTAVNYCGLETILHMTCCRQRLEEITGHLHKAKQLGLKNIMALRGDPIGDQWEEEEGGFNYAVDLVKHIRSEFGDYFDICVAGYPKGHPEAGSFEADLKHLKEKVSAGADFIITQLFFEADTFFRFVKACTDMGITCPIVPGIFPIQGYHSLRQLVKLSKLEVPQEIKDVIEPIKDNDAAIRNYGIELAVSLCQELLASGLVPGLHFYTLNREMATTEVLKRLGMWTEDPRRPLPWALSAHPKRREEDVRPIFWASRPKSYIYRTQEWDEFPNGRWGNSSSPAFGELKDYYLFYLKSKSPKEELLKMWGEELTSEASVFEVFVLYLSGEPNRNGHKVTCLPWNDEPLAAETSLLKEELLRVNRQGILTINSQPNINGKPSSDPIVGWGPSGGYVFQKAYLEFFTSRETAEALLQVLKKYELRVNYHLVNVKGENITNAPELQPNAVTWGIFPGREIIQPTVVDPVSFMFWKDEAFALWIERWGKLYEEESPSRTIIQYIHDNYFLVNLVDNDFPLDNCLWQVVEDTLELLNRPTQNARETEAP

SEQ ID NO: 846278 - protein, 679 aa, Homo sapiens; identical to SEQ ID NO: 846277

SEQ ID NO: 846279 - protein, 692 aa, Homo sapiens
PAPRPFTAFPAPAAATVVRPAAERSESPGTGGRNPAMVNEARGNSSLNPCLEGSASSGSESSKDSSRCSTPGLDPERHERLREKMRRRLESGDKWFSLEFFPPRTAEGAVNLISRFDRMAAGGPLYIDVTWHPAGDPGSDKETSSMMIASTAVNYCGLETILHMTCCRQRLEEITGHLHKAKQLGLKNIMALRGDPIGDQWEEEEGGFNYAVDLVKHIRSEFGDYFDICVAGYPKGHPEAGSFEADLKHLKEKVSAGADFIITQLFFEADTFFRFVKACTDMGITCPIVPGIFPIQGYHSLRQLVKLSKLEVPQEIKDVIEPIKDNDAAIRNYGIELAVSLCQELLASGLVPGLHFYTLNREMATTEVLKRLGMWTEDPRRPLPWALSAHPKRREEDVRPIFWASRPKSYIYRTQEWDEFPNGRWGNSSSPAFGELKDYYLFYLKSKSPKEELLKMWGEELTSEASVFEVFVLYLSGEPNRNGHKVTCLPWNDEPLAAETSLLKEELLRVNRQGILTINSQPNINGKPSSDPIVGWGPSGGYVFQKAYLEFFTSRETAEALLQVLKKYELRVNYHLVNVKGENITNAPELQPNAVTWGIFPGREIIQPTVVDPVSFMFWKDEAFALWIERWGKLYEEESPSRTIIQYIHDNYFLVNLVDNDFPLDNCLWQVVEDTLELLNRPTQNARETEAP

SEQ ID NO: 846280 - protein, 672 aa, Homo sapiens
PAPRPFTAFPAPAAATVVRPAAERSESPGTGGRNPAMVNEARGNSSLNPCLEGSASSGSESSKDSSRCSTPGLDPERHERLREKMRRRLESGDKWFSLEFFPPRTAEGAVNLISRFDRMAAGGPLYIDVTWHPAGDPGSDKETSSMMIASTAVNYCGLETILHMTCCRQRLEEITGHLHKAKQLGLKNIMALRGDPIGDQWEEEEGGFNYAVDLVKHIRSEFGDYFDICVAGYPKGHPEAGSFEADLKHLKEKVSAGADFIITQLFFEADTFFRFVKACTDMGITCPIVPGIFPIQGYHSLRQLVKLSKLEVPQEIKDVIEPIKDNDAAIRNYGIELAVSLCQELLASGLVPGLHFYTLNREMATTEVLKRLGMWTEDPRRPLPWALSAHPKRREEDVRPIFWASRPKSYIYRTQEWDEFPNGLLSKSPKEELLKMWGEELTSEASVFEVFVLYLSGEPNRNGHKVTCLPWNDEPLAAETSLLKEELLRVNRQGILTINSQPNINGKPSSDPIVGWGPSGGYVFQKAYLEFFTSRETAEALLQVLKKYELRVNYHLVNVKGENITNAPELQPNAVTWGIFPGREIIQPTVVDPVSFMFWKDEAFALWIERWGKLYEEESPSRTIIQYIHDNYFLVNLVDNDFPLDNCLWQVVEDTLELLNRPTQNARETEAP

SEQ ID NO: 846281 - protein, 79 aa, Homo sapiens
VSFMFWKVKEPGASLPRPPGKPWGGIGTKSQACTEGHTGPSLQGTPSSDSPMSLLTQGVYFWAGVGSDTGSGPCSIPGN

SEQ ID NO: 846282 - protein, 66 aa, Homo sapiens
MTSTNPADPIGDQWEEEEGGFNYAVDLVKHIRSEFGDYFDICVAGEWLDHPGGGDGAREAEMPREP

SEQ ID NO: 846283 - protein, 129 aa, Homo sapiens
CGAVTSPSCALPSMLWTWQREKGKLGDLHLEGLREAKTGWVFVGGRERDSGCQTCWSPQPAHRLSQVTCLPWNDEPLAAETSLLKEELLRVNRQGILTINSQPNINGKPSSDPIVGWGPSGGYVFQKVW

SEQ ID NO: 846284 - protein, 106 aa, Homo sapiens
MAQASPSALAPIPRTHQTAHTAPLTVASVYGPCFGLCRLWAQGWSALLVPGPSSTGAGLGPSYSVQATVARAGRQGRGNVPCTLERGVESQEVKVGPGRQLLLVPA

SEQ ID NO: 846285 - protein, 679 aa, Homo sapiens; identical to SEQ ID NO: 846277

SEQ ID NO: 846286 - protein, 215 aa, Homo sapiens
PAPRPFTAFPAPAAATVVRPAAERSESPGTGGRNPAMVNEARGNSSLNPCLEGSASSGSESSKDSSRCSTPGLDPERHERLREKMRRRLESGDKWFSLEFFPPRTAEGAVNLISRFDRMAAGGPLYIDVTWHPAGDPGSDKETSSMMIASTAVNYCGLETILHMTCCRQRLEEITGHLHKAKQLGLKNIMALRGGVEPALPYTLGSGFPGGHLVA

SEQ ID NO: 846287 - protein, 93 aa, Homo sapiens
EESGAEFTGMASWACGGTALCQECALTSGHPSARGNSSSPAFGELKDYYLFYLKSKSPKEELLKMWGEELTSEASVFEVFVLYLSGEPNRNGH

SEQ ID NO: 846288 - protein, 82 aa, Homo sapiens
SSPDTLGVCERASGRAGVGDRHLSLPQAYLEFFTSRETAEALLQVLKKYELRVNYHLVNVKVGQAPGFPQSTRPFVEQTPST

SEQ ID NO: 846289 - protein, 292 aa, Homo sapiens
MTTARYRPTWDLALDPLVSCKLCLGEYPVEQMTTIAQCQCIFCTLCLKQYVELLIKEGLETAISCPDAACPKQGHLQENEIECMVAAEIMQRYKKLQFEREVLFDPCRTWCPASTCQAVCQLQDVGLQTPQPVQCKACRMEFCSTCKASWHPGQGCPETMPITFLPGETSAAFKMEEDDAPIKRCPKCKVYIERDEGCAQMMCKNCKHAFCWYCLESLDDDFLLIHYDKGPCRNKLGHSRASVIWHRTQVVGIFAGFGLLLLVASPFLLLATPFVLCCKCKCSKGDDDPLPT

SEQ ID NO: 846290 - protein, 90 aa, Homo sapiens
GLALQCGPCGLRGRGEARAANCGHPAPRSQYRAEASEPRTADEQAQASSTLLTLTCPQPPPALQGALVPETFSHFSLWVPDLRAETSECV

SEQ ID NO: 846291 - protein, 82 aa, Homo sapiens
AGIAVRAVRAARARGGAGGKLRAPGTPQPVPGGGVRAAHRGRAGPGRVTRVPFVSASPGPAAERGGRDAALRGRPWGSGLAA

SEQ ID NO: 846292 - protein, 292 aa, Homo sapiens; identical to SEQ ID NO: 846289

SEQ ID NO: 846293 - protein, 258 aa, Homo sapiens [sequence omitted]

SEQ ID NO: 846294 - protein, 90 aa, Homo sapiens; identical to SEQ ID NO: 846290

SEQ ID NO: 846295 - protein, 209 aa, Homo sapiens
MVAAEIMQRYKKLQFEREVLFDPCRTWCPASTCQAVCQLQDVGLQTPQPVQCKACRMEFCSTCKASWHPGQGCPETMPITFLPGETSAAFKMEEDDAPIKRCPKCKVYIERDEGCAQMMCKNCKHAFCWYCLESLDDDFLLIHYDKGPCRNKLGHSRASVIWHRTQVVGIFAGFGLLLLVASPFLLLATPFVLCCKCKCSKGDDDPLPT

SEQ ID NO: 846296 - protein, 258 aa, Homo sapiens [sequence omitted]

SEQ ID NO: 846297 - protein, 292 aa, Homo sapiens; identical to SEQ ID NO: 846289

SEQ ID NO: 846298 - protein, 292 aa, Homo sapiens; identical to SEQ ID NO: 846289

SEQ ID NO: 846299 - protein, 191 aa, Homo sapiens
MDIDKDLEAPLYLTPEGWSLFLQRYYQVVHEGAELRHLDTQVQRCEDILQQLQAVVPQIDMEGDRNIWIVKPGAKSRGRGIMCMDHLEEMLKLVNGNPVVMKDGKWVVQKYIERPLLIFGTKFDLRQWFLVTDWNPLTVWFYRDSYIRFSTQPFSLKNLDNSVHLCNNSIQKHLENSCHRHPLLPPEPHVV

SEQ ID NO: 846300 - protein, 571 aa, Homo sapiens
RERRRRRGGARDQGPWEGERGEGRMQGPDAPLLLSARELGPGRRGSASWYRQEGGAVCNWLRKPQPLEPRTSFPSARRSEFRPPRRLPWAGPASAQSEEGHAGGRCQAGSPAPARRLSGAFKTLVPGTHAQGASDTHPLGPPHTPVLDDPSPQDGFPVLWRGSSKASHMNRLRNAKIYVERAVKQKKIFTIQGCYPVIRCLLRRRGWVEKKMVHRSGPTLLPPQKDLDSSAMGDSDTTEDEDEDEDEEFQPSQLFDFDDLLKFDDLDGTHALMVGLCLNLRNLPWFDEVDANSFFPRCYCLGAEDDKKAFIEDFWLTAARNVLKLVVKSEWKSYPIQAVEEEASGDKQPKKQEKNPVLVSPEFVDEALCACEEYLSNLAHMDIDKDLEAPLYLTPEGWSLFLQRYYQVVHEGAELRHLDTQVQRCEDILQQLQAVVPQIDMEGDRNIWIVKPGAKSRGRGIMCMDHLEEMLKLVNGNPVVMKDGKWVVQKYIERPLLIFGTKFDLRQWFLVTDWNPLTVWFYRDSYIRFSTQPFSLKNLDNSVHLCNNSIQKHLENSCHRHPLLPPEPHVV

SEQ ID NO: 846301 - protein, 311 aa, Homo sapiens
MWSSQRFQAHLQEMGAPNAWSTIIVPGMKDAVIHALQTSQDTVQCRKASFELYGADFVFGEDFQPWLIEINASPTMAPSTAVTARLCAGVQADTLRVVIDRMLDRNCDTGAFELIYKQGPAPNMQVSPERNAHCAQHHSSGSESLPEKAADRKQKVRVAPEGTDFMCNRARRSPRLSTLSRTVEVVLKGNWEATESLGGAGYTGGQQVCQRETEKKTGGKSSPGVRTKLNIFFDKERNIKIANYGFSSTFAKRDNTEKGTFDGTLPYAGPELFLGHGYQCPAINVWSLGIIVCKMVAGALPFYEQNCKDIL

SEQ ID NO: 846302 - protein, 114 aa, Homo sapiens
MHANPTTACPFPSGFSSCLQAPSPVIQGPISEGFREAEAALQEGGKSLPLPERLPHCCLLCVSCTRKAWLCARIRGTRASGVARDPMLKLLWYRSGCRGLRASVVYQNLQSSAL

SEQ ID NO: 846303 - protein, 176 aa, Homo sapiens; identical to SEQ ID NO: 785921

SEQ ID NO: 846304 - protein, 177 aa, Homo sapiens
GSQRGRAYWSLPGVGRRWASSKAARGGVRVVGLRRAPGHSPGREAELGGRDLRAAVSPAERQELRTATLRPYLSAVRATLQAALCLENFSSQVVERHNKPEVEVRSSKELLLQPVTISRNEKEKVLIEGSINSVRVSIAVKQADEIEKILCHKFMRFMMMRAENFFILRRKPVEVRP

SEQ ID NO: 846305 - protein, 164 aa, Homo sapiens
MWSSQRFQAHLQEMGAPNAWSTIIVPGMKDAVIHALQTSQDTVQCRKASFELYGADFVFGEDFQPWLIEINASPTMAPSTAVTARLCAGVQADTLRVVIDRMLDRNCDTGAFELIYKQPVTTSPASTPRPSCLLPMYSDTRARSSDDSTASWWALRPCRPQARP

SEQ ID NO: 846306 - protein, 164 aa, Homo sapiens; identical to SEQ ID NO: 846305

SEQ ID NO: 846307 - protein, 164 aa, Homo sapiens; identical to SEQ ID NO: 846305

SEQ ID NO: 846308 - protein, 246 aa, Homo sapiens
MWSSQRFQAHLQEMGAPNAWSTIIVPGMKDAVIHALQTSQDTVQCRKASFELYGADFVFGEDFQPWLIEINASPTMAPSTAVTARLCAGVQADTLRVVIDRMLDRNCDTGAFELIYKQPAVEVPQYVGIRLLVEGFTIKKPMAMCHRRMGVRPAVPLLTQRGSGEARHHFPSLHTKAQLPSPHVLRHQGQVLRRQHSKLVGTKALSTTGKALRTLPTAKVFISLPPNLDFKVAPSILKPRKVGLDL

SEQ ID NO: 846309 - protein, 164 aa, Homo sapiens; identical to SEQ ID NO: 846305

SEQ ID NO: 846310 - protein, 311 aa, Homo sapiens
MWSSQRFQAHLQEMGAPNAWSTIIVPGMKDAVIHALQTSQDTVQCRKASFELYGADFVFGEDFQPWLIEINASPTMAPSTAVTARLCAGVQADTLRVVIDRMLDRNCDTGAFELIYKQGPAPNMQVSPEEMHHCAQHHSSGSESLPEKAADRKQKVRVAPEGTDFMCNRARRSPRLSTLSRTVEVVLKGNWEATESLGGAGYTGGQQVCQRETEKKTGGKSSPGVRTKLNIFFDKERNIKIANYGFSSTFAKRDNTEKGTFDGTLPYAGPELFLGHGYQCPAINVWSLGIIVCKMVAGALPFYEQNCKDIL

SEQ ID NO: 846311 - protein, 150 aa, Homo sapiens [sequence omitted]

SEQ ID NO: 846312 - protein, 401 aa, Homo sapiens
MQYLLKKYPSLTLQQKKIFTIQGCYPVIRCLLRRRGWVEKKMVHRSGPTLLPPQKDLDSSAMGDSDTTEDEDEDEDEEFQPSQLFDFDDLLKFDDLDGTHALMVGLCLNLRNLPWFDEVDANSFFPRCYCLGAEDDKKAFIEDFWLTAARNVLKLVVKSEWKSYPIQAVEEEASGDKQPKKQEKNPVLVSPEFVDEALCACEEYLSNLAHMDIDKDLEAPLYLTPEGWSLFLQRYYQVVHEGAELRHLDTQVQRCEDILQQLQAVVPQIDMEGDRNIWIVKPGAKSRGRGIMCMDHLEEMLKLVNGNPVVMKDGKWVVQKYIERPLLIFGTKFDLRQWFLVTDWNPLTVWFYRDSYIRFSTQPFSLKNLDNSVHLCNNSIQKHLENSCHRHPLLPPEPHVV

SEQ ID NO: 846313 - protein, 372 aa, Homo sapiens
SASRVAGTTGARHHAWLVFCIFSRDGVSLCWPGWSRSPDLMIHPPQPPKVLGLQASATVTSLKQEQVLNSGSRVRKGRVRFWIQNGASHDQVLEPEQASSLGLSRVSPGLGAEDFWLTAARNVLKLVVKSEWKSYPIQAVEEEASGDKQPKKQEKNPVLVSPEFVDEALCACEEYLSNLAHMDIDKDLEAPLYLTPEGWSLFLQRYYQVVHEGAELRHLDTQVQRCEDILQQLQAVVPQIDMEGDRNIWIVKPGAKSRGRGIMCMDHLEEMLKLVNGNPVVMKDGKWVVQKYIERPLLIFGTKFDLRQWFLVTDWNPLTVWFYRDSYIRFSTQPFSLKNLDNSVHLCNNSIQKHLENSCHRHPLLPPEPHVV

SEQ ID NO: 846314 - protein, 288 aa, Homo sapiens
RERRRRRGGARDQGPWEGERGEGRMQGPDAPLLLSARELGPGRRGSASWYRQEGGAVCNWLRKPQPLEPRTSFPSARRSEFRPPRRLPWAGPASAQSEEGHAGGRCQAGSPAPARRLSGAFKTLVPGTHAQGASDTHPLGPPHTPVLDDPSPQDGFPVLWRGSSKASHMNRLRNAKIYVERAVKQKKIFTIQGCYPVIRCLLRRRGWVEKKMVHRSGPTLLPPQKDLDSSAMGDSDTTEDEDEDEDEEFQPSQLFDFDDLLKFDDLDGTHALMRRGRTQAPRHSGPAL

SEQ ID NO: 846315 - protein, 164 aa, Homo sapiens; identical to SEQ ID NO: 846305

SEQ ID NO: 846316 - protein, 121 aa, Homo sapiens
MHANPTTACPFPSGFSSCLQAPSPVIQGPISEGFREAEAALQEGGKSLPLPERLPHCCLLCVSCTRKAWLCARIRGTRASGVARDPMLKLLWYRSGCRGLRASVVYQNLQSTAMFRGESGL

SEQ ID NO: 846317 - protein, 159 aa, Homo sapiens
MDIDKDLEAPLYLTPEGWSLFLQRYYQVVHEGAELRHLDTQVQRCEDILQQLQAVVPQIDMEGDRNIWIVKPGAKSRGRGIMCMDHLEEMLKLVNGNPVVMKDGKWVVQKYIERPLLIFGTKFDLRQWFLVTDWNPLTVWFYRDSYMETKAEMLSAYKT

SEQ ID NO: 846318 - protein, 202 aa, Homo sapiens
MQYLLKKYPSLTLQQKKIFTIQGCYPVIRCLLRRRGWVEKKMVHRSGPTLLPPQKDLDSSAMGDSDTTEDEDEDEDEEFQPSQLFDFDDLLKFDDLDGTHALMVGLCLNLRNLPWFDEVDANSFFPRCYCLGAEDDKKAFIEDFWLTAARNVLKLVVKSEWKSYPIQAVEEEASGKYCGYLHSPTHLSSEAPSWKCLVASAL

SEQ ID NO: 846319 - protein, 121 aa, Homo sapiens; identical to SEQ ID NO: 846316

SEQ ID NO: 846320 - protein, 110 aa, Homo sapiens
MQYLLKKYPSLTLQQKKIFTIQGCYPVIRCLLRRRGWVEKKMVHRSGPTLLPPQKDLDSSAMGDSDTTEDEDEDEDEEFQPSQLFDFDDLLKFDDLDGTHALMVRPWGPR

SEQ ID NO: 846321 - protein, 192 aa, Homo sapiens
MQYLLKKYPSLTLQQKKIFTIQGCYPVIRCLLRRRGWVEKKMVHRSGPTLLPPQKDLDSSAMGDSDTTEDEDEDEDEEFQPSQLFDFDDLLKFDDLDGTHALMVGLCLNLRNLPWFDEVDANSFFPRCYCLGAEDDKKAFIGKETPSPMPEPQADRAGLKLWLILERNRPLFMPSSACPSRFPFPPSILILP

SEQ ID NO: 846322 - protein, 77 aa, Homo sapiens
NSMRKVYGKGYNVERVQTKGRLPRRQANTQDERVSKKTPFLHRLLIISLFSPPFTPRLLLSCASEAPSWKCLVASAL

SEQ ID NO: 846323 - protein, 107 aa, Homo sapiens
SKDQMINHYARAGSFTTKVGLCLNLRNLPWFDEVDANSFFPRCYCLGAEDDKKAFIGKETPSPMPEPQADRAGLKLWLILERNRPLFMPSSACPSRFPFPPSILILP

SEQ ID NO: 846324 - protein, 164 aa, Homo sapiens; identical to SEQ ID NO: 846305

SEQ ID NO: 846325 - protein, 211 aa, Homo sapiens
MWSSQRFQAHLQEMGAPNAWSTIIVPGMKDAVIHALQTSQDTVQCRKASFELYGADFVFGEDFQPWLIEINASPTMAPSTAVTARLCAGVQADTLRVVIDRMLDRNCDTGAFELIYKQPAVEVPQYVGIRLLVEGFTIKKPMAMCHRRMGVRPAVPLLTQRGSGEGKDSGTPTHSPSPLPQPPHQGPAAFSPCTPTPGPGPQTTAQQAGGH

SEQ ID NO: 846326 - protein, 164 aa, Homo sapiens; identical to SEQ ID NO: 846305

SEQ ID NO: 846327 - protein, 164 aa, Homo sapiens; identical to SEQ ID NO: 846305

SEQ ID NO: 846328 - protein, 164 aa, Homo sapiens; identical to SEQ ID NO: 846305

SEQ ID NO: 846329 - protein, 288 aa, Homo sapiens; identical to SEQ ID NO: 846314

SEQ ID NO: 846330 - protein, 164 aa, Homo sapiens; identical to SEQ ID NO: 846305

SEQ ID NO: 846331 - protein, 238 aa, Homo sapiens
NKPRTTNIEVIRLTIDLHDESMLVIAHLWNEETHKGLDLSFLFSAPAQCTCATTPSRSTWRTHAIGIHCFRQNHMWSSQRFQAHLQEMGAPNAWSTIIVPGMKDAVIHALQTSQDTVQCRKASFELYGADFVFGEDFQPWLIEINASPTMAPSTAVTARLCAGVQADTLRVVIDRMLDRNCDTGAFELIYKQPVTTSPASTPRPSCLLPMYSDTRARSSDDSTASWWALRPCRPQARP

SEQ ID NO: 846332 - protein, 121 aa, Homo sapiens; identical to SEQ ID NO: 846316

SEQ ID NO: 846333 - protein, 205 aa, Homo sapiens
MDIDKDLEAPLYLTPEGWSLFLQRYYQVVHEGAELRHLDTQVQRCEDILQQLQAVVPQIDMEGDRNIWIVKPGAKSRGRGIMCMDHLEEMLKLVNGNPVVMKDGKWVVQKYIERPLLIFGTKFDLRQWFLVTDWNPLTVWFYRDSYIVIRRPIAILRRMKKHDSSGNQCNQSSQRRHMENHTTAITRFTSMTHSGKARRTAHPQD

SEQ ID NO: 846334 - protein, 121 aa, Homo sapiens; identical to SEQ ID NO: 846316

SEQ ID NO: 846335 - protein, 110 aa, Homo sapiens; identical to SEQ ID NO: 846320

SEQ ID NO: 846336 - protein, 138 aa, Homo sapiens
AGLLSAHLCPGGREIFLTYTKMMCGLEATLEASSPSCSPTLLSRAGRGCLRPCYPHWPLCFCLLLSPQSRMVQNEIPYFIWTTRRDVLDCRFLSKDQMINHYARAGSFTTKVGSLEEQAGQLPTPCPWAGSSPPCSPC

SEQ ID NO: 846337 - protein, 392 aa, Homo sapiens
MEAPLVSLDEEFEDLRPSCSEDPEEKPQCFYGSSPHHLEDPSLSELENFSSEIISFKSMEDLVNEFDEKLNVCFRNYNAKTENLAPVKNQLQIQEEEETLQDEEVWDALTDNYIPSLSEDWRDPNIEALNGNCSDTEIHEKEEEEFNEKSENDSGINEEPLLTADQVIEEIEEMMQNSPDPEEEEEVLEEEDGGETSSQADSVLLQEMQALTQTFNNNWSYEGLRHMSGSELTELLDQVEGAIRDFSEELVQQLARRDELEFEKEVKNSFITVLIEVQNKQKEQRELMKKRRKEKGLSLQSSRIEKGNQMPLKRFSMEGISNILQSGIRQTFGSSGTDKQYLNTVIPYEKKASPPSVEDLQMLTNILFAMKEDNEKVPTLLTDYILKVLCPT

SEQ ID NO: 846338 - protein, 104 aa, Homo sapiens
MEAPLVSLDEEFEDLRPSCSEDPEEKPQCFYGSSPHHLEDPSLSELENFSSEIISFKSMEDLVNEFDEKLNVCFRNYNAKTENLAPVKNQLQIQEEEETLQDEE

SEQ ID NO: 846339 - protein, 363 aa, Homo sapiens
MEAPLVSLDEEFEDLRPSCSEDPEEKPQCFYGSSPHHLEDPSLSELENFSSEIISFKSMEDLVNEFDEKLNVCFRNYNAKTENLAPVKNQLQIQEEEETLQDEEVWDALTDNYIPSLSEDWRDPNIEALNGNCSDTEVIEEIEEMMQNSPDPEEEEEVLEEEDGGETSSQADSVLLQEMQALTQTFNNNWSYEGLRHMSGSELTELLDQVEGAIRDFSEELVQQLARRDELEFEKEVKNSFITVLIEVQNKQKEQRELMKKRRKEKGLSLQSSRIEKGNQMPLKRFSMEGISNILQSGIRQTFGSSGTDKQYLNTVIPYEKKASPPSVEDLQMLTNILFAMKEDNEKVPTLLTDYILKVLCPT

SEQ ID NO: 846340 - protein, 293 aa, Homo sapiens
  misc_feature (2)..(2): Xaa can be any naturally occurring amino acid
LXGLLTSKLPLFFFPVLLSPPKVDFIFPNRIRQSRSGLLPNIEALNGNCSDTDIHEKEEEEFNEKSEVIEEIEEMMQNSPDPEEEEEVLEEEDGGETSSQADSVLLQEMQALTQTFNNNWSYEGLRHMSGSELTELLDQVEGAIRDFSEELVQQLARRDELEFEKEVKNSFITVLIEVQNKQKEQRELMKKRRKEKGLSLQSSRIEKGNQMPLKRFSMEGISNILQSGIRQTFGSSGTDKQYLNTVIPYEKKASPPSVEDLQMLTNILFAMKEDNEKVPTLLTDYILKVLCPT

SEQ ID NO: 846341 - protein, 166 aa, Homo sapiens
MSGSELTELLDQVEGAIRDFSEELVQQLARRDELEFEKEVKNSFITVLIEVQNKQKEQRELMKKRRKEKGLSLQSSRIEKGNQMPLKRFSMEGISNILQSGIRQTFGSSGTDKQYLNTVIPYEKKASPPSVEDLQMLTNILFAMKEDNEKVPTLLTDYILKVLCPT

SEQ ID NO: 846342 - protein, 392 aa, Homo sapiens; identical to SEQ ID NO: 846337

SEQ ID NO: 846343 - protein, 396 aa, Homo sapiens
MEAPLVSLDEEFEDLRPSCSEDPEEKPQCFYGSSPHHLEDPSLSELENFSSEIISFKSMEDLVNEFDEKLNVCFRNYNAKTENLAPVKNQLQIQEEEETLQDEEVWDALTDNYIPSLSEDWRDPNIEALNGNCSDTEIHEKEEEEFNEKSENDSGINEEPLLTADQVIEEIEEMMQNSPDPEEEEEVLEEEDGGETSSQADSVLLQEMQALTQTFNNNWSYEGLRHMSGSELTELLDQVEGAIRDFSEELVQQLARRDELEFEKEVKNSFITVLIEVQNKQKEQRELMKKRRKEKGLSLQSSRIEKGNQMPLKRFSMEGISNILQSGIRQTFGSSGTDKQVRVVSLLQALFLDSCSLASPATQGDSDSPELSQHLFRGLGVLTLFSPLKEEQRISF

SEQ ID NO: 846344 - protein, 181 aa, Homo sapiens
  misc_feature (168)..(168): Xaa can be any naturally occurring amino acid
MEAPLVSLDEEFEDLRPSCSEDPEEKPQCFYGSSPHHLEDPSLSELENFSSEIISFKSMEDLVNEFDEKLNVCFRNYNAKTENLAPVKNQLQIQEEEETLQDEEVWDALTDNYIPSLSEDWRDPNIEALNGNCSDTEIHEKEEEEFNEKSENDSGINEEPLLTADQIXVIEEMMQNSPVLV

SEQ ID NO: 846345 - protein, 392 aa, Homo sapiens; identical to SEQ ID NO: 846337

SEQ ID NO: 846346 - protein, 218 aa, Homo sapiens
MQNSPDPEEEEEVLEEEDGGETSSQADSVLLQEMQALTQTFNNNWSYEGLRHMSGSELTELLDQVEGAIRDFSEELVQQLARRDELEFEKEVKNSFITVLIEVQNKQKEQRELMKKRRKEKGLSLQSSRIEKGNQMPLKRFSMEGISNILQSGIRQTFGSSGTDKQYLNTVIPYEKKASPPSVEDLQMLTNILFAMKEDNEKVPTLLTDYILKVLCPT

SEQ ID NO: 846347 - protein, 166 aa, Homo sapiens; identical to SEQ ID NO: 846341

SEQ ID NO: 846348 - protein, 127 aa, Homo sapiens
LCKPVSYTYCLVTEPWGVIWDSLVAERSLGVVTVSKKHLPFLSLSPPQRFSMEGISNILQSGIRQTFGSSGTDKQYLNTVIPYEKKASPPSVEDLQMLTNILFAMKEDNEKVPTLLTDYILKVLCPT

SEQ ID NO: 846349 - protein, 294 aa, Homo sapiens
MEAPLVSLDEEFEDLRPSCSEDPEEKPQCFYGSSPHHLEDPSLSELENFSSEIISFKSMEDLVNEFDEKLNVCFRNYNAKTENLAPVKNQLQIQEEEETLQDEEVWDALTDNYIPSLSEDWRDPNIEALNGNCSDTEIHEKEEEEFNEKSENDSGINEEPLLTADQVIEEIEEMMQNSPDPEEEEEVLEEEDGGETSSQADSVLLQEMQALTQTFNNNWSYEGEGPGRWAGRGGSTCSGPGSGLCALYMANRTLTASEQSLADLGGQQYLSYSASGEKFAFLRKEQGSRAKFKC

SEQ ID NO: 846350 - protein, 74 aa, Homo sapiens
VGDLEDPVDEEVLEKCPAPILFKCDQVKVCARAQGSSEPGLPPTGHSALCASIQTCVEVPADGEDRPAAVHPGR

SEQ ID NO: 846351 - protein, 1083 aa, Homo sapiens
MFSFEGDFKTRPKVSLGGASRKEEKASLLHRTQEERRKREEERRRLKNAIIIQSFIRGYRDRKQQYSIQRSAFDRCATLSQSGGAFPIANGPNLTLLVRQLLFFYKQNEDSKRLIWLYQNLIKHSSLFVKQLDGSERLTCLFQIKRLMSLCCRLLQNCNDDSLNVALPMRMLEVFSSENTYLPVLQDASYVVSVIEQILHYMIHNGYYRSLYLLINSKLPSSIEYSDLSRVPIAKILLENVLKPLHFTYNSCPEGARQQVFTAFTEEFLAAPFTDQIFHFIIPALADAQTVFPYEPFLNALLLIESRCSRKSGGAPWLFYFVLTVGENYLGALSEEGLLVYLRVLQTFLSQLPVSPASASCHDSASDSEEESEEADKPSSPEDGRLSVSYITEECLKKLDTKQQTNTLLNLVWRDSASEEVFTTMASVCHTLMVQHRMMVPKVRLLYSLAFNARFLRHLWFLISSMSTRMITGSMVPLLQVISRGSPMSFEDSSRIIPLFYLFSSLFSHSLISIHDNEFFGDPIEVVGQRQSSMMPFTLEELIMLSRCLRDACLGIIKLAYPETKPEVREEYITAFQSIGVTTSSEMQQCIQMEQKRWIQLFKVITNLVKMLKSRDTRRNFCPPNHWLSEQEDIKADKVTQLYVPASRHVWRFRRMGRIGPLQSTLDVGLESPPLSVSEERQLAVLTELPFVVPFEERVKIFQRLIYADKQEVQGDGPFLDGINVTIRRNYIYEDAYDKLSPENEPDLKKRIRVHLLNAHGLDEAGIDGGGIFREFLNELLKSGFNPNQGFFKTTNEGLLYPNPAAQMLVGDSFARHYYFLGRMLGKALYENMLVELPFAGFFLSKLLGTSADVDIHHLASLDPEVYKNLLFLKSYEDDVEELGLNFTVVNNDLGEAQVVELKFGGKDIPVTSANRIAYIHLVADYRLNRQIRQHCLAFRQGLANVVSLEWLRMFDQQEIQVLISGAQVPISLEDLKSFTNYSGGYSADHPVIKVFWRVVEGFTDEEKRKLLKFVTSCSRPPLLGFKELYPAFCIHNGGSDLERLPTASTCMNLLKLPEFYDETLLRSKLLYAIECAAGFELS

SEQ ID NO: 846352 - protein, 1083 aa, Homo sapiens; identical to SEQ ID NO: 846351

SEQ ID NO: 846353 - protein, 475 aa, Homo sapiens
VIPTSYPTTRRNFCPPNHWLSEQEDIKADKVTQLYVPASRHVWRFRRMGRIGPLQSTLDVGLESPPLSVSEERQLAVLTELPFVVPFEERVKIFQRLIYADKQEVQGDGPFLDGINVTIRRNYIYEDAYDKLSPENEPDLKKRIRVHLLNAHGLDEAGIDGGGIFREFLNELLKSGFNPNQGFFKTTNEGLLYPNPAAQMLVGDSFARHYYFLGRMLGKALYENMLVELPFAGFFLSKLLGTSADVDIHHLASLDPEVYKNLLFLKSYEDDVEELGLNFTVVNNDLGEAQVVELKFGGKDIPVTSANRIAYIHLVADYRLNRQIRQHCLAFRQGLANVVSLEWLRMFDQQEIQVLISGAQVPISLEDLKSFTNYSGGYSADHPVIKVFWRVVEGFTDEEKRKLLKFVTSCSRPPLLGFKELYPAFCIHNGGSDLERLPTASTCMNLLKLPEFYDETLLRSKLLYAIECAAGFELS

SEQ ID NO: 846354 - protein, 1083 aa, Homo sapiens; identical to SEQ ID NO: 846351

SEQ ID NO: 846355 - protein, 1083 aa, Homo sapiens; identical to SEQ ID NO: 846351

SEQ ID NO: 846356 - protein, 1083 aa, Homo sapiens; identical to SEQ ID NO: 846351

SEQ ID NO: 846357 - protein, 130 aa, Homo sapiens
MFDQQEIQVLISGAQVPISLEDLKSFTNYSGGYSADHPVIKVFWRVVEGFTDEEKRKLLKFVTSCSRPPLLGFKELYPAFCIHNGGSDLERLPTASTCMNLLKLPEFYDETLLRSKLLYAIECAAGFELS

SEQ ID NO: 846358 - protein, 73 aa, Homo sapiens
AVGEASLLAVRAPTQFQELYPAFCIHNGGSDLERLPTASTCMNLLKLPEFYDETLLRSKLLYAIECAAGFELS

SEQ ID NO: 846359 - protein, 126 aa, Homo sapiens
EKPARYRVCAPETVTRLASREQHQEEEGLPSYCNICHPLYPVTWGRTDTVVSLKLFEPKWRLHLCPDASRAGLPSSARPPFPWAAPTCLPGYLGVTRHAWHPLLPGAALTRRRDSPWCTSREEERR

SEQ ID NO: 846360 - protein, 649 aa, Homo sapiens
MFSFEGDFKTRPKVSLGGASRKEEKASLLHRTQEERRKREEERRRLKNAIIIQSFIRGYRDRKQQYSIQRSAFDRCATLSQSGGAFPIANGPNLTLLVRQLLFFYKQNEDSKRLIWLYQNLIKHSSLFVKQLDGSERLTCLFQIKRLMSLCCRLLQNCNDDSLNVALPMRMLEVFSSENTYLPVLQDASYVVSVIEQILHYMIHNGYYRSLYLLINSKLPSSIEYSDLSRVPIAKILLENVLKPLHFTYNSCPEGARQQVFTAFTEEFLAAPFTDQIFHFIIPALADAQTVFPYEPFLNALLLIESRCSRKSGGAPWLFYFVLTVGENYLGALSEEGLLVYLRVLQTFLSQLPVSPASASCHDSASDSEEESEEADKPSSPEDGRLSVSYITEECLKKLDTKQQTNTLLNLVWRDSASEEVFTTMASVCHTLMVQHRMMVPKVRLLYSLAFNARFLRHLWFLISSMSTRMITGSMVPLLQVISRGSPMSFEDSSRIIPLFYLFSSLFSHSLISIHDNEFFGDPIEVVGQRQSSMMPFTLEELIMLSRCLRDACLGIIKLAYPETKPEVREEYITAFQSIGVTTSSEMQQCIQMEQKRWIQLFKVITNLVKMLKSRDTRRNFCPPNHWLSEQEDIKADKVLLKDLFNIYH

SEQ ID NO: 846361 - protein, 927 aa, Homo sapiens
MFSFEGDFKTRPKVSLGGASRKEEKASLLHRTQEERRKREEERRRLKNAIIIQSFIRGYRDRKQQYSIQRSAFDRCATLSQSGGAFPIANGPNLTLLVRQLLFFYKQNEDSKRLIWLYQNLIKHSSLFVKQLDGSERLTCLFQIKRLMSLCCRLLQNCNDDSLNVALPMRMLEVFSSENTYLPVLQDASYVVSVIEQILHYMIHNGYYRSLYLLINSKLPSSIEYSDLSRVPIAKILLENVLKPLHFTYNSCPEGARQQVFTAFTEEFLAAPFTDQIFHFIIPALADAQTVFPYEPFLNALLLIESRCSRKSGGAPWLFYFVLTVGENYLGALSEEGLLVYLRVLQTFLSQLPVSPASASCHDSASDSEEESEEADKPSSPEDGRLSVSYITEECLKKLDTKQQTNTLLNLVWRDSASEEVFTTMASVCHTLMVQHRMMVPKVRLLYSLAFNARFLRHLWFLISSMSTRMITGSMVPLLQVISRGSPMSFEDSSRIIPLFYLFSSLFSHSLISIHDNEFFGDPIEVVGQRQSSMMPFTLEELIMLSRCLRDACLGIIKLAYPETKPEVREEYITAFQSIGVTTSSEMQQCIQMEQKRWIQLFKVITNLVKMLKSRDTRRNFCPPNHWLSEQEDIKADKVTQLYVPASRHVWRFRRMGRIGPLQSTLDVGLESPPLSVSEERQLAVLTELPFVVPFEERVKIFQRLIYADKQEVQGDGPFLDGINVTIRRNYIYEDAYDKLSPENEPDLKKRIRVHLLNAHGLDEAGIDGGGIFREFLNELLKSGFNPNQGFFKTTNEGLLYPNPAAQMLVGDSFARHYYFLGRMLGKALYENMLVELPFAGFFLSKLLGTSADVDIHHLASLDPEVYKNLLFLKSYEDDVEELGLNFTVVNNDLGEAQVRGQEEDSHTCIASSSISLCVEVHLCYSV

SEQ ID NO: 846362 - protein, 829 aa, Homo sapiens [sequence omitted]

SEQ ID NO: 846363 - protein, 604 aa, Homo sapiens
MFSFEGDFKTRPKVSLGGASRKEEKASLLHRTQEERRKREEERRRLKNAIIIQSFIRGYRDRKQQYSIQRSAFDRCATLSQSGGAFPIANGPNLTLLVRQLLFFYKQNEDSKRLIWLYQNLIKHSSLFVKQLDGSERLTCLFQIKRLMSLCCRLLQNCNDDSLNVALPMRMLEVFSSENTYLPVLQDASYVVSVIEQILHYMIHNGYYRSLYLLINSKLPSSIEYSDLSRVPIAKILLENVLKPLHFTYNSCPEGARQQVFTAFTEEFLAAPFTDQIFHFIIPALADAQTVFPYEPFLNALLLIESRCSRKSGGAPWLFYFVLTVGENYLGALSEEGLLVYLRVLQTFLSQLPVSPASASCHDSASDSEEESEEADKPSSPEDGRLSVSYITEECLKKLDTKQQTNTLLNLVWRDSASEEVFTTMASVCHTLMVQHRMMVPKVRLLYSLAFNARFLRHLWFLISSMSTRMITGSMVPLLQVISRGSPMSFEDSSRIIPLFYLFSSLFSHSLISIHDNEFFGDPIEVVGQRQSSMMPFTLEELIMLSRCLRDACLGIIKLAYPETKPEVREEYITAFQSIGVTTSSEMQQCIQMEQKRWIQLFKV

SEQ ID NO: 846364 - protein, 1083 aa, Homo sapiens; identical to SEQ ID NO: 846351

SEQ ID NO: 846365 - protein, 1083 aa, Homo sapiens; identical to SEQ ID NO: 846351

SEQ ID NO: 846366 - protein, 1083 aa, Homo sapiens; identical to SEQ ID NO: 846351

SEQ ID NO: 846367 - protein, 428 aa, Homo sapiens [sequence omitted]

SEQ ID NO: 846368 - protein, 251 aa, Homo sapiens [sequence omitted]

SEQ ID NO: 846369 - protein, 1083 aa, Homo sapiens; identical to SEQ ID NO: 846351

SEQ ID NO: 846370 - protein, 1083 aa, Homo sapiens; identical to SEQ ID NO: 846351

SEQ ID NO: 846371 - protein, 1083 aa, Homo sapiens; identical to SEQ ID NO: 846351

SEQ ID NO: 846372 - protein, 989 aa, Homo sapiens
MFSFEGDFKTRPKVSLGGASRKEEKASLLHRTQEERRKREEERRRLKNAIIIQSFIRGYRDRKQQYSIQRSAFDRCATLSQSGGAFPIANGPNLTLLVRQLLFFYKQNEDSKRLIWLYQNLIKHSSLFVKQLDGSERLTCLFQIKRLMSLCCRLLQNCNDDSLNVALPMRMLEVFSSENTYLPVLQDASYVVSVIEQILHYMIHNGYYRSLYLLINSKLPSSIEYSDLSRVPIAKILLENVLKPLHFTYNSCPEGARQQVFTAFTEEFLAAPFTDQIFHFIIPALADAQTVFPYEPFLNALLLIESRCSRKSGGAPWLFYFVLTVGENYLGALSEEGLLVYLRVLQTFLSQLPVSPASASCHDSASDSEEESEEADKPSSPEDGRLSVSYITEECLKKLDTKQQTNTLLNLVWRDSASEEVFTTMASVCHTLMVQHRMMVPKVRLLYSLAFNARFLRHLWFLISSMSTRMITGSMVPLLQVISRGSPMSFEDSSRIIPLFYLFSSLFSHSLISIHDNEFFGDPIEVVGQRQSSMMPFTLEELIMLSRCLRDACLGIIKLAYPETKPEVREEYITAFQSIGVTTSSEMQQCIQMEQKRWIQLFKVITNLVKMLKSRDTRRNFCPPNHWLSEQEDIKADKVTQLYVPASRHVWRFRRMGRIGPLQSTLDVGLESPPLSVSEERQLAVLTELPFVVPFEERVKIFQRLIYADKQEVQGDGPFLDGINVTIRRNYIYEDAYDKLSPENEPDLKKRIRVHLLNAHGLDEAGIDGGGIFREFLNELLKSGFNPNQGFFKTTNEGLLYPNPAAQMLVGDSFARHYYFLGRMLGKALYENMLVELPFAGFFLSKLLGTSADVDIHHLASLDPEVYKNLLFLKSYEDDVEELGLNFTVVNNDLGEAQVVELKFGGKDIPVTSANRIAYIHLVADYRLNRQIRQHCLAFRQGLANVVSLEWLRMFDQQEIQVPYLLTFWDTLVTGNEQAFLKFTSNVII

SEQ ID NO: 846373 - protein, 925 aa, Homo sapiens
  misc_feature (923)..(923): Xaa can be any naturally occurring amino acid
MFSFEGDFKTRPKVSLGGASRKEEKASLLHRTQEERRKREEERRRLKNAIIIQSFIRGYRDRKQQYSIQRSAFDRCATLSQSGGAFPIANGPNLTLLVRQLLFFYKQNEDSKRLIWLYQNLIKHSSLFVKQLDGSERLTCLFQIKRLMSLCCRLLQNCNDDSLNVALPMRMLEVFSSENTYLPVLQDASYVVSVIEQILHYMIHNGYYRSLYLLINSKLPSSIEYSDLSRVPIAKILLENVLKPLHFTYNSCPEGARQQVFTAFTEEFLAAPFTDQIFHFIIPALADAQTVFPYEPFLNALLLIESRCSRKSGGAPWLFYFVLTVGENYLGALSEEGLLVYLRVLQTFLSQLPVSPASASCHDSASDSEEESEEADKPSSPEDGRLSVSYITEECLKKLDTKQQTNTLLNLVWRDSASEEVFTTMASVCHTLMVQHRMMVPKVRLLYSLAFNARFLRHLWFLISSMSTRMITGSMVPLLQVISRGSPMSFEDSSRIIPLFYLFSSLFSHSLISIHDNEFFGDPIEVVGQRQSSMMPFTLEELIMLSRCLRDACLGIIKLAYPETKPEVREEYITAFQSIGVTTSSEMQQCIQMEQKRWIQLFKVITNLVKMLKSRDTRRNFCPPNHWLSEQEDIKADKVTQLYVPASRHVWRFRRMGRIGPLQSTLDVGLESPPLSVSEERQLAVLTELPFVVPFEERVKIFQRLIYADKQEVQGDGPFLDGINVTIRRNYIYEDAYDKLSPENEPDLKKRIRVHLLNAHGLDEAGIDGGGIFREFLNELLKSGFNPNQGFFKTTNEGLLYPNPAAQMLVGDSFARHYYFLGRMLGKALYENMLVELPFAGFFLSKLLGTSADVDIHHLASLDPEVYKNLLFLKSYEDDVEELGLNFTVVNNDLGEAQVKDLYTVGIGAQSIEMVVLELNSSXRK

SEQ ID NO: 846374 - protein, 676 aa, Homo sapiens [sequence omitted]

SEQ ID NO: 846375 - protein, 95 aa, Homo sapiens
MEPNPATPLTLTTRRAPTKKHEHQTTSAAQATNRTGSEDNTEQQPGRARQQRSGMRKKRTKTQTAIGQDTKRTANDGQHTTRPRGKQEHETPSHN

SEQ ID NO: 846376 - protein, 110 aa, Homo sapiens
MLIKVKTLTGKEIEIDIEPTDKVERIKERVEEKEGIPPQQQRLIYSGKQMNDEKTAADYKMLSKMGWCGWVKAPTPWLPASRLDKAGGYFSLPSVPVFPLKACGIFPPSP

SEQ ID NO: 846377 - protein, 85 aa, Homo sapiens
MTTRRAPTKKHEHQTTSAAQATNRTGSEDNTEQQPGRARQQRSGMRKKRTKTQTAIGQDTKRTANDGQHTTRPRGKQEHETPSHN

SEQ ID NO: 846378 - protein, 72 aa, Homo sapiens
NQSGECVQSVPAFLSLASWTSLTSLAEARLVTAALVLATSHGFLHLHLSTPVVVLHQFPALVSPICCFLFCA

SEQ ID NO: 846379 - protein, 80 aa, Homo sapiens
REESSKQQGSKCKGPCRSELGILEGQREAGATGGSSETIKCQQGDYPSAPLKDCKKEDTKSMAFFPLGKKGDNEKPPLAN

SEQ ID NO: 846380 - protein, 477 aa, Homo sapiens
MAAPILRSFSWGRWSGTLNLSVLLPLGLRKAHSGAQGLLAAQKARGLFKDFFPETGTKIELPELFDRGTASFPQTIYCGFDPTADSLHVGHLLALLGLFHLQRAGHNVIALVGGATARLGDPSGRTKEREALETERVRANARALRLGLEALAANHQQLFTDGRSWGSFTVLDNSAWYQKQHLVDFLAAVGGHFRMGTLLSRQSVQLRLKSPEGMSLAEFFYQVLQAYDFYYLFQRYGCRVQLGGSDQLGNIMSGYEFINKLTGEDVFGITVPLITSTTGAKLGKSAGNAVWLNRDKTSPFELYQFFVRQPDDSVERYLKLFTFLPLPEIDHIMQLHVKEPERRGPQKRLAAEVTKLVHGREGLDSAKRCTQALYHSSIDALEVMSDQELKELFKEAPFSEFFLDPGTSVLDTCRKANAIPDGPRGYRMITEGGVSINHQQVTNPESVLIVGQHILKNGLSLLKIGKRNFYIIKWLQL

SEQ ID NO: 846381 - protein, 477 aa, Homo sapiens; identical to SEQ ID NO: 846380

SEQ ID NO: 846382 - protein, 477 aa, Homo sapiens; identical to SEQ ID NO: 846380

SEQ ID NO: 846383 - protein, 477 aa, Homo sapiens; identical to SEQ ID NO: 846380

SEQ ID NO: 846384 - protein, 401 aa, Homo sapiens
QARCPEPRRRQWPGRHRPEKSAAELGANPPPPTWGTGQVRPGEGGSAGREGEVSVRPAPTSFSVPSLPCLEAARLLSSEFYSAWVSAQCRWWPVLVVPLYLGKSGAAAMATARPPWMWVLCALITALLLGVTEHVLANNDVSCDHPSNTVPSGSNQDLGAGAGEDARSDDSSSRIINGSDCDMHTQPWQAALLLRPNQLYCGAVLVHPQWLLTAAHCRKKVFRVRLGHYSLSPVYESGQQMFQGVKSIPHPGYSHPGHSNDLMLIKLNRRIRPTKDVRPINVSSHCPSAGTKCLVSGWGTTKSPQVHFPKVLQCLNISVLSQKRCEDAYPRQIDDTMFCAGDKAGRDSCQGDSGGPVVCNGSLQGLVSWGDYPCARPNRPGVYTNLCKFTKWIQETIQANS

SEQ ID NO: 846385 - protein, 293 aa, Homo sapiens
MATARPPWMWVLCALITALLLGVTEHVLANNDVSCDHPSNTVPSGSNQDLGAGAGEDARSDDSSSRIINGSDCDMHTQPWQAALLLRPNQLYCGAVLVHPQWLLTAAHCRKKVFRVRLGHYSLSPVYESGQQMFQGVKSIPHPGYSHPGHSNDLMLIKLNRRIRPTKDVRPINVSSHCPSAGTKCLVSGWGTTKSPQVHFPKVLQCLNISVLSQKRCEDAYPRQIDDTMFCAGDKAGRDSCQGDSGGPVVCNGSLQGLVSWGDYPCARPNRPGVYTNLCKFTKWIQETIQANS

SEQ ID NO: 846386 - protein, 293 aa, Homo sapiens; identical to SEQ ID NO: 846385

SEQ ID NO: 846387 - protein, 401 aa, Homo sapiens; identical to SEQ ID NO: 846384

SEQ ID NO: 846388 - protein, 333 aa, Homo sapiens
RPGAQSPGGGSGQEGTGLRSLRLSWEQIPHPLPGGQGAAAMATARPPWMWVLCALITALLLGVTEHVLANNDVSCDHPSNTVPSGSNQDLGAGAGEDARSDDSSSRIINGSDCDMHTQPWQAALLLRPNQLYCGAVLVHPQWLLTAAHCRKKVFRVRLGHYSLSPVYESGQQMFQGVKSIPHPGYSHPGHSNDLMLIKLNRRIRPTKDVRPINVSSHCPSAGTKCLVSGWGTTKSPQVHFPKVLQCLNISVLSQKRCEDAYPRQIDDTMFCAGDKAGRDSCQGDSGGPVVCNGSLQGLVSWGDYPCARPNRPGVYTNLCKFTKWIQETIQANS

SEQ ID NO: 846389 - protein, 424 aa, Homo sapiens
KNCHDTESPHLRFSDADGKEYDFGTQLPSSSPGSLKVDDTGKKIFAVSGLISDGKPHRSPEDRNDRCKKKAAALFDSQAPICPICQVLLRPSELQEHMEQELEQLAQLPSSKNSLLKDAMAPGTPKSLLLSASIKREGESPTASPHSSATDDLHHSDRYQTFLRVRANRQTRLNARIGKMKRRKQDEGQREGSCMAEDDAVDIEHENNNRFEEYEWCGQKRIRATTLLEGGFRGSGFIMCSGKENPDSDADLDVDGDDTLEYGKPQYTEADVIPCTGEEPGEAKEREALRGAVLNGGPPSTRITPEFSKWASDEMPSTSNGESSKQEAMQKTCKNSDIEKITEDSAVTTFEALKARVRELERQLSRGDRYKCLICMDSYSMPLTSIQCWHVHCEECWLRTLGAKKLCPQCNTITAPGDLRRIYL

SEQ ID NO: 846390 - protein, 188 aa, Homo sapiens
MKRRKQDEGQREGSCMAEDDAVDIEHENNNRFEEYEWCGQKRIRATTLLEGGFRGSGFIMCSGKENPDSDADLDVDGDDTLEYGKPQYTEADVIPCTGEEPGEAKEREALRGAVLNGGPPSTRITPEFSKWASDEMPSTGNGEGTHSQRALRKDLQKQRLGNPRAFRVTRWGSRVGQTLTGYPWDRNA

SEQ ID NO: 846391 - protein, 245 aa, Homo sapiens
MKRRKQDEGQREGSCMAEDDAVDIEHENNNRFEEYEWCGQKRIRATTLLEGGFRGSGFIMCSGKENPDSDADLDVDGDDTLEYGKPQYTEADVIPCTGEEPGEAKEREALRGAVLNGGPPSTRITPEFSKWASDEMPSTSNGESSKQEAMQKTCKNSDIEKITEDSAVTTFEALKARVRELERQLSRGDRYKCLICMDSYSMPLTSIQCWHVHCEECWLRTLGAKKLCPQCNTITAPGDLRRIYL

SEQ ID NO: 846392 - protein, 290 aa, Homo sapiens
WGGGQDCRPRLTLSFLFLHLPAIFSQTFLRVRANRQTRLNARIGKMKRRKQDEGQREGSCMAEDDAVDIEHENNNRFEEYEWCGQKRIRATTLLEGGFRGSGFIMCSGKENPDSDADLDVDGDDTLEYGKPQYTEADVIPCTGEEPGEAKEREALRGAVLNGGPPSTRITPEFSKWASDEMPSTSNGESSKQEAMQKTCKNSDIEKITEDSAVTTFEALKARVRELERQLSRGDRYKCLICMDSYSMPLTSIQCWHVHCEECWLRTLVRWHGGRGMGGRSGHCPDVCAYA

SEQ ID NO: 846393 - protein, 245 aa, Homo sapiens; identical to SEQ ID NO: 846391

SEQ ID NO: 846394 - protein, 245 aa, Homo sapiens; identical to SEQ ID NO: 846391

SEQ ID NO: 846395 - protein, 450 aa, Homo sapiens
KNCHDTESPHLRFSDADGKEYDFGTQLPSSSPGSLKVDDTGKKIFAVSGLISDGKPHRSPEDRNDRCKKKAAALFDSQAPICPICQVLLRPSELQEHMEQELEQLAQLPSSKNSLLKDAMAPGTPKSLLLSASIKREGESPTASPHSSATDDLHHSDRYQTFLRVRANRQTRLNARIGKMKRRKQDEGQVCPLCNRPLAGSEQEMSRHVEHCLSKREGSCMAEDDAVDIEHENNNRFEEYEWCGQKRIRATTLLEGGFRGSGFIMCSGKENPDSDADLDVDGDDTLEYGKPQYTEADVIPCTGEEPGEAKEREALRGAVLNGGPPSTRITPEFSKWASDEMPSTSNGESSKQEAMQKTCKNSDIEKITEDSAVTTFEALKARVRELERQLSRGDRYKCLICMDSYSMPLTSIQCWHVHCEECWLRTLGAKKLCPQCNTITAPGDLRRIYL

SEQ ID NO: 846396 - protein, 213 aa, Homo sapiens
KATLVRPWMLRIGPPLSWKVASGSGFIMCSGKENPDSDADLDVDGDDTLEYGKPQYTEADVIPCTGEEPGEAKEREALRGAVLNGGPPSTRITPEFSKWASDEMPSTSNGESSKQEAMQKTCKNSDIEKITEDSAVTTFEALKARVRELERQLSRGDRYKCLICMDSYSMPLTSIQCWHVHCEECWLRTLGAKKLCPQCNTITAPGDLRRIYL

SEQ ID NO: 846397 - protein, 200 aa, Homo sapiens
MRAHLWKWFGSGFIMCSGKENPDSDADLDVDGDDTLEYGKPQYTEADVIPCTGEEPGEAKEREALRGAVLNGGPPSTRITPEFSKWASDEMPSTSNGESSKQEAMQKTCKNSDIEKITEDSAVTTFEALKARVRELERQLSRGDRYKCLICMDSYSMPLTSIQCWHVHCEECWLRTLGAKKLCPQCNTITAPGDLRRIYL

SEQ ID NO: 846398 - protein, 172 aa, Homo sapiens
MGQGDDTLEYGKPQYTEADVIPCTGEEPGEAKEREALRGAVLNGGPPSTRITPEFSKWASDEMPSTSNGESSKQEAMQKTCKNSDIEKITEDSAVTTFEALKARVRELERQLSRGDRYKCLICMDSYSMPLTSIQCWHVHCEECWLRTLGAKKLCPQCNTITAPGDLRRIYL

SEQ ID NO: 846399 - protein, 226 aa, Homo sapiens
MWSIAFLRGKAPAWLRMMLWTSSMRTTTALRSMSGVDRSGYGPPLSWKVASEALASSCAAAKRTRTVMLTWMWMGMTLWSMGSHTKEREALRGAVLNGGPPSTRITPEFSKWASDEMPSTSNGESSKQEAMQKTCKNSDIEKITEDSAVTTFEALKARVRELERQLSRGDRYKCLICMDSYSMPLTSIQCWHVHCEECWLRTLGAKKLCPQCNTITAPGDLRRIYL

SEQ ID NO: 846400 - protein, 245 aa, Homo sapiens; identical to SEQ ID NO: 846391

SEQ ID NO: 846401 - protein, 245 aa, Homo sapiens; identical to SEQ ID NO: 846391

SEQ ID NO: 846402 - protein, 281 aa, Homo sapiens
MKRRKQDEGQVCPLCNRPLAGSEQEMSRHVEHCLSKREGSCMAEDDAVDIEHENNNRFEEYEWCGQKRIRATTLLEGGFRGSGFIMCSGKENPDSDADLDVDGDDTLEYGKPQYTEADVIPCTGEEPGEAKEREALRGAVLNGGPPSTRITPEFSKWASDEMPSTSNGESSKQEAMQKTCKNSDIEKLTDEFKAVNHRIGGASETGLGANRSNPLARRTYSLVGTALQQVRNARHGPRQHEVAHKVILSVCHVHHPAATLRCSPPLSPNSDHEYTVQSARS

SEQ ID NO: 846403 - protein, 104 aa, Homo sapiens
MSFIGESNFSSDPIPSPWAPSALKQEGPGPSCSLLPLGSPQLLQRSVQGPAHLQCPPSSLEEQGLTPPTRSDSRIGWVPRVSDLLNSPALGRGKGELSASWPPA

SEQ ID NO: 846404 - protein, 245 aa, Homo sapiens
MKRRKQDEGQREGSCMAEDDAVDIEHENNNRFEEYEWCGQKRIRATTLLEGGFRGSGFIMCSGKENPDSDADLDVDGDDTLEYGKPQYTEADVIPCTGEEPGEAKEREALRGAVLNGGPPSTRITPEFSKWASDEMPSTSNGESSKQEAMQKTCKNSDIEKITEDSAVTTFEALKARVRELERQLSRGDRYKCLICMDSYSMPLTSIQCWHVHCEECWLRTLVRWHGGRGMGGRSGHCPDVCAYA

SEQ ID NO: 846405 - protein, 271 aa, Homo sapiens
MKRRKQDEGQVCPLCNRPLAGSEQEMSRHVEHCLSKREGSCMAEDDAVDIEHENNNRFEEYEWCGQKRIRATTLLEGGFRGSGFIMCSGKENPDSDADLDVDGDDTLEYGKPQYTEADVIPCTGEEPGEAKEREALRGAVLNGGPPSTRITPEFSKWASDEMPSTSNGESSKQEAMQKTCKNSDIEKITEDSAVTTFEALKARVRELERQLSRGDRYKCLICMDSYSMPLTSIQCWHVHCEECWLRTLGAKKLCPQCNTITAPGDLRRIYL

SEQ ID NO: 846406 - protein, 271 aa, Homo sapiens; identical to SEQ ID NO: 846405

SEQ ID NO: 846407 - protein, 186 aa, Homo sapiens
MCSGKENPDSDADLDVDGDDTLEYGKPQYTEADVIPCTGEEPGEAKEREALRGAVLNGGPPSTRITPEFSKWASDEMPSTSNGESSKQEAMQKTCKNSDIEKITEDSAVTTFEALKARVRELERQLSRGDRYKCLICMDSYSMPLTSIQCWHVHCEECWLRTLGAKKLCPQCNTITAPGDLRRIYL

SEQ ID NO: 846408 - protein, 186 aa, Homo sapiens; identical to SEQ ID NO: 846407

SEQ ID NO: 846409 - protein, 245 aa, Homo sapiens; identical to SEQ ID NO: 846391

SEQ ID NO: 846410 - protein, 245 aa, Homo sapiens; identical to SEQ ID NO: 846391

SEQ ID NO: 846411 - protein, 104 aa, Homo sapiens; identical to SEQ ID NO: 846403

SEQ ID NO: 846412 - protein, 598 aa, Homo sapiens
MKPTGTDPRILSIAAEVAKSPEQNVPVILLKLKEIINITPLGSSELKKIKQDIYCYDLIQYCLLVLSQDYSRIQGGWTTISQLTQILSHCCVGLEPGEDAEEFYNELLPSAAENFLVLGRQLQTCFINAAKAEEKDELLHFFQIVTDSLFWLLGGHVELIQNVLQSDHFLHLLQADNVQIGSAVMMMLQNILQINSGDLLRIGRKALYSILDEVIFKLFSTPSPVIRSTATKLLLLMAESHQEILILLRQSTCYKGLRRLLSKQETGTEFSQELRQLVGLLSPMVYQEVEEQKLHQAACLIQAYWKGFQTRKRLKKLPSAVIALQRSFRSKRSKMLLEINRQKEEEDLKLQLQLQRQRAMRLSRELQLSMLEIVHPGQVEKHYREMEEKSALIIQKHWRGYRERKNFHQQRQSLIEYKAAVTLQRAALKFLAKCRKKKKLFAPWRGLQELTDARRVELKKRVDDYVRRHLGSPMSDVVSRELHAQAQERLQHYFMGRALEERAQQHREALIAQISTNVEQLMKAPSLKEAEGKEPELFLSRSRPVAAKAKQAHLTTLKHIQAPWWKKLGEESGDEIDVPKDELSIELENLFIGGTKPP

SEQ ID NO: 846413 - protein, 466 aa, Homo sapiens
MKPTGTDPRILSIAAEVAKSPEQNVPVILLKLKEIINITPLGSSELKKIKQDIYCYDLIQYCLLVLSQDYSRIQGGWTTISQLTQILSHCCVGLEPGEDAEEFYNELLPSAAENFLVLGRQLQTCFINAAKAEEKDELLHFFQIVTDSLFWLLGGHVELIQNVLQSDHFLHLLQADNVQIGSAVMMMLQNILQINSRSKRSKMLLEINRQKEEEDLKLQLQLQRQRAMRLSRELQLSMLEIVHPGQVEKHYREMEEKSALIIQKHWRGYRERKNFHQQRQSLIEYKAAVTLQRAALKFLAKCRKKKKLFAPWRGLQELTDARRVELKKRVDDYVRRHLGSPMSDVVSRELHAQAQERLQHYFMGRALEERAQQHREALIAQISTNVEQLMKAPSLKEAEGKEPELFLSRSRPVAAKAKQAHLTTLKHIQAPWWKKLGEESGDEIDVPKDELSIELENLFIGGTKPP

SEQ ID NO: 846414 - protein, 598 aa, Homo sapiens; identical to SEQ ID NO: 846412

SEQ ID NO: 846415 - protein, 414 aa, Homo sapiens
MMMLQNILQINSGDLLRIGRKALYSILDEVIFKLFSTPSPVIRSTATKLLLLMAESHQEILILLRQSTCYKGLRRLLSKQETGTEFSQELRQLVGLLSPMVYQEVEEQKLHQAACLIQAYWKGFQTRKRLKKLPSAVIALQRSFRSKRSKMLLEINRQKEEEDLKLQLQLQRQRAMRLSRELQLSMLEIVHPGQVEKHYREMEEKSALIIQKHWRGYRERKNFHQQRQSLIEYKAAVTLQRAALKFLAKCRKKKKLFAPWRGLQELTDARRVELKKRVDDYVRRHLGSPMSDVVSRELHAQAQERLQHYFMGRALEERAQQHREALIAQISTNVEQLMKAPSLKEAEGKEPELFLSRSRPVAAKAKQAHLTTLKHIQAPWWKKLGEESGDEIDVPKDELSIELENLFIGGTKPP

SEQ ID NO: 846416 - protein, 598 aa, Homo sapiens; identical to SEQ ID NO: 846412

SEQ ID NO: 846417 - protein, 414 aa, Homo sapiens; identical to SEQ ID NO: 846415

SEQ ID NO: 846418 - protein, 573 aa, Homo sapiens
FVAVLLITGLGVEKSLKITSSKIEYRAFLPILSKSPLLICNIFCSIIMLQILFGHCQLAQILSHCCVGLEPGEDAEEFYNELLPSAAENFLVLGRQLQTCFINAAKAEEKDELLHFFQIVTDSLFWLLGGHVELIQNVLQSDHFLHLLQADNVQIGSAVMMMLQNILQINSGDLLRIGRKALYSILDEVIFKLFSTPSPVIRSTATKLLLLMAESHQEILILLRQSTCYKGLRRLLSKQETGTEFSQELRQLVGLLSPMVYQEVEEQKLHQAACLIQAYWKGFQTRKRLKKLPSAVIALQRSFRSKRSKMLLEINRQKEEEDLKLQLQLQRQRAMRLSRELQLSMLEIVHPGQVEKHYREMEEKSALIIQKHWRGYRERKNFHQQRQSLIEYKAAVTLQRAALKFLAKCRKKKKLFAPWRGLQELTDARRVELKKRVDDYVRRHLGSPMSDVVSRELHAQAQERLQHYFMGRALEERAQQHREALIAQISTNVEQLMKAPSLKEAEGKEPELFLSRSRPVAAKAKQAHLTTLKHIQAPWWKKLGEESGDEIDVPKDELSIELENLFIGGTKPP

SEQ ID NO: 846419 - protein, 140 aa, Homo sapiens
PWSLVFCTSRDGFSLQSLYRRMEGCSGPVLLVLRDQDGQIFGAFSSSAIRLSKGFYGTGETFLFSFSPQLKVFKWTGSNSFFVKGDLDSLMMGSGSGRFGLWLDGDLFRGGSSPCPTFNNEVLARQEQFCIQELEAWLLS

SEQ ID NO: 846420 - protein, 140 aa, Homo sapiens; identical to SEQ ID NO: 846419

SEQ ID NO: 846421 - protein, 98 aa, Homo sapiens
PWSLVFCTSRDGFSLQSLYRRMEGCSGPVLLVLRDQDGQIFGAFSSSAIRLSKGFYGTGETFLFSFSPQLKVFKWTGSNSFFVKGDLDSLMMGSGRIL

SEQ ID NO: 846422 - protein, 137 aa, Homo sapiens
MVHLTTLLCKAYRGGHLTIRLALGGCTNRPFYRIVAAHNKCPRDGRFVEQLGSYDPLPNSHGEKLVALNLDRIRHWIGCGAHLSKPMEKLLGLAGFFPLHPMMITNAERLRRKRAREVLLASQKTDAEATDTEATET

SEQ ID NO: 846423 - protein, 137 aa, Homo sapiens; identical to SEQ ID NO: 846422

SEQ ID NO: 846424 - protein, 137 aa, Homo sapiens; identical to SEQ ID NO: 846422

SEQ ID NO: 846425 - protein, 137 aa, Homo sapiens; identical to SEQ ID NO: 846422

SEQ ID NO: 846426 - protein, 137 aa, Homo sapiens; identical to SEQ ID NO: 846422

SEQ ID NO: 846427 - protein, 120 aa, Homo sapiens
SGRQAEEAWRADHPLPESRFSGLYRLAVRPGVGLQVLSVFVLCPAKAVELVRAGSGALRGAARRRHHGPPHYSPLQGLPWGPLNHPPCPGWLHQSAVLPHCGCSQQVSQGWPFRRAAGLL

SEQ ID NO: 846428 - protein, 137 aa, Homo sapiens; identical to SEQ ID NO: 846422

SEQ ID NO: 846429 - protein, 137 aa, Homo sapiens; identical to SEQ ID NO: 846422

SEQ ID NO: 846430 - protein, 137 aa, Homo sapiens; identical to SEQ ID NO: 846422

SEQ ID NO: 846431 - protein, 137 aa, Homo sapiens; identical to SEQ ID NO: 846422

SEQ ID NO: 846432 - protein, 137 aa, Homo sapiens; identical to SEQ ID NO: 846422

SEQ ID NO: 846433 - protein, 327 aa, Homo sapiens [sequence omitted]

SEQ ID NO: 846434 - protein, 310 aa, Homo sapiens
MAFAPPKNTDGPKMQTKMSTWTPLNHQLLNDRVFEERRALLGKWFDKWTDSQRRRILTGLLERCSLSQQKFCCRKLQEKIPAEALDFTTKLPRVLSLYIFSFLDPRSLCRCAQVCWHWKNLAELDQLWMLKCLRFNWYINFSPTPFEQGIWKKHYIQMVKELHITKPKTPPKDGFVIADVQLVTSNSPEEKQSPLSAFRSSSSLRKKNNSGEKALPPWRSSDKHPTDIIRFNYLDNRDPMETVQQGRRKRNQMTPDFSRQSHDKKNKLQDRTRLRKAQSMVSIVYERFITITLMKISRSLILFAKLNSFI

SEQ ID NO: 846435 - protein, 315 aa, Homo sapiens
MAFAPPKNTDGPKMQTKMSTWTPLNHQLLNDRFDKWTDSQRRRILTGLLERCSLSQQKFCCRKLQEKIPAEALDFTTKLPRVLSLYIFSFLDPRSLCRCAQVCWHWKNLAELDQLWMLKCLRFNWYINFSPTPFEQGIWKKHYIQMVKELHITKPKTPPKDGFVIADVQLVTSNSPEEKQSPLSAFRSSSSLRKKNNSGEKALPPWRSSDKHPTDIIRFNYLDNRDPMETVQQGRRKRNQMTPDFSRQSHDKKNKLQDRTRLRKAQSMMSLSASSPLKVPAHLAWPPPESVGLPDTATTAEILMQHPHRHPGPQA

SEQ ID NO: 846436 - protein, 186 aa, Homo sapiens
MAFAPPKNTDGPKMQTKMSTWTPLNHQLLNDRVFEERRALLGKWFDKWTDSQRRRILTGLLERCSLSQQKFCCRKLQEKIPAEALDFTTKLPRVLSLYIFSFLDPRSLCRCAQVCWHWKNLAELDQLWMLKCLRFNWYINFSPTPFEQGIWKKHYIQMVKELHITKPKVNFRQKATSLQTLALCKF

SEQ ID NO: 846437 - protein, 116 aa, Homo sapiens [sequence omitted]

SEQ ID NO: 846438 - protein, 854 aa, Homo sapiens
GRGLGTVGAAVCGEAAAGVMAELSEEALLSVLPTIRVPKAGDRVHKDECAFSFDTPESEGGLYICMNTFLGFGKQYVERHFNKTGQRVYLHLRRTRRPKEEDPATGTGDPPRKKPTRLAIGVEGGFDLSEEKFELDEDVKIVILPDYLEIARDGLGGLPDIVRDRVTSAVEALLSADSASRKQEVQAWDGEVRQVSKHAFSLKQLDNPARIPPCGWKCSKCDMRENLWLNLTDGSILCGRRYFDGSGGNNHAVEHYRETGYPLAVKLGTITPDGADVYSYDEDDMVLDPSLAEHLSHFGIDMLKMQKTDKTMTELEIDMNQRIGEWELIQESGVPLKPLFGPGYTGIRNLGNSCYLNSVVQVLFSIPDFQRKYVDKLEKIFQNAPTDPTQDFSTQVAKLGHGLLSGEYSKPVPESGDGERVPEQKEVQDGIAPRMFKALIGKGHPEFSTNRQQDAQEFFLHLINMVERNCRSSENPNEVFRFLVEEKIKCLATEKVKYTQRVDYIMQLPVPMDAALNKEELLEYEEKKRQAEEEKMALPELVRAQVPFSSCLEAYGAPEQVDDFWSTALQAKSVAVKTTRFASFPDYLVIQIKKFTFGLDWVPKKLDVSIEMPEELDISQLRGTGLQPGEEELPDIAPPLVTPDEPKAPMLDESVIIQLVEMGFPMDACRKAVYYTGNSGAEAAMNWVMSHMDDPDFANPLILPGSSGPGSTSAAADPPPEDCVTTIVSMGFSRDQALKALRATNNSLERAVDWIFSHIDDLDAEAAMDISEGRSAADSISESVPVGPKVRDGPGKYQLFAFISHMGTSTMCGHYVCHIKKEGRWVIYNDQKVCASEKPPKDLGYIYFYQRVAS

SEQ ID NO: 846439 - protein, 854 aa, Homo sapiens; identical to SEQ ID NO: 846438

SEQ ID NO: 846440 - protein, 854 aa, Homo sapiens; identical to SEQ ID NO: 846438

SEQ ID NO: 846441 - protein, 349 aa, Homo sapiens
MQLPVPMDAALNKEELLEYEEKKRQAEEEKMALPELVRAQVPFSSCLEAYGAPEQVDDFWSTALQAKSVAVKTTRFASFPDYLVIQIKKFTFGLDWVPKKLDVSIEMPEELDISQLRGTGLQPGEEELPDIAPPLVTPDEPKAPMLDESVIIQLVEMGFPMDACRKAVYYTGNSGAEAAMNWVMSHMDDPDFANPLILPGSSGPGSTSAAADPPPEDCVTTIVSMGFSRDQALKALRATNNSLERAVDWIFSHIDDLDAEAAMDISEGRSAADSISESVPVGPKVRDGPGKYQLFAFISHMGTSTMCGHYVCHIKKEGRWVIYNDQKVCASEKPPKDLGYIYFYQRVAS

SEQ ID NO: 846442 - protein, 343 aa, Homo sapiens
MDAALNKEELLEYEEKKRQAEEEKMALPELVRAQVPFSSCLEAYGAPEQVDDFWSTALQAKSVAVKTTRFASFPDYLVIQIKKFTFGLDWVPKKLDVSIEMPEELDISQLRGTGLQPGEEELPDIAPPLVTPDEPKAPMLDESVIIQLVEMGFPMDACRKAVYYTGNSGAEAAMNWVMSHMDDPDFANPLILPGSSGPGSTSAAADPPPEDCVTTIVSMGFSRDQALKALRATNNSLERAVDWIFSHIDDLDAEAAMDISEGRSAADSISESVPVGPKVRDGPGKYQLFAFISHMGTSTMCGHYVCHIKKEGRWVIYNDQKVCASEKPPKDLGYIYFYQRVAS

SEQ ID NO: 846443 - protein, 377 aa, Homo sapiens
MCQGCFGRVEELKYGHRASRERLRRQRSSTLRRIHQPILSPEELLEYEEKKRQAEEEKMALPELVRAQVPFSSCLEAYGAPEQVDDFWSTALQAKSVAVKTTRFASFPDYLVIQIKKFTFGLDWVPKKLDVSIEMPEELDISQLRGTGLQPGEEELPDIAPPLVTPDEPKAPMLDESVIIQLVEMGFPMDACRKAVYYTGNSGAEAAMNWVMSHMDDPDFANPLILPGSSGPGSTSAAADPPPEDCVTTIVSMGFSRDQALKALRATNNSLERAVDWIFSHIDDLDAEAAMDISEGRSAADSISESVPVGPKVRDGPGKYQLFAFISHMGTSTMCGHYVCHIKKEGRWVIYNDQKVCASEKPPKDLGYIYFYQRVAS

SEQ ID NO: 846444 - protein, 161 aa, Homo sapiens
STDFANPLILPGSSGPGSTSAAADPPPEDCVTTIVSMGFSRDQALKALRATNNSLERAVDWIFSHIDDLDAEAAMDISEGRSAADSISESVPVGPKVRDGPGKYQLFAFISHMGTSTMCGHYVCHIKKEGRWVIYNDQKVCASEKPPKDLGYIYFYQRVAS

SEQ ID NO: 846445 - protein, 72 aa, Homo sapiens
EVPLLTQTDKTMTELEIDMNQRIGEWELIQESGVPLKPLFGPGYTGIRNLGNSCYLNSVVQVLFSIPDFQRK

SEQ ID NO: 846446 - protein, 877 aa, Homo sapiens
GRGLGTVGAAVCGEAAAGVMAELSEEALLSVLPTIRVPKAGDRVHKDECAFSFDTPESEGGLYICMNTFLGFGKQYVERHFNKTGQRVYLHLRRTRRPKEEDPATGTGDPPRKKPTRLAIGVEGGFDLSEEKFELDEDVKIVILPDYLEIARDGLGGLPDIVRDRVTSAVEALLSADSASRKQEVQAWDGEVRQVSKHAFSLKQLDNPARIPPCGWKCSKCDMRENLWLNLTDGSILCGRRYFDGSGGNNHAVEHYRETGYPLAVKLGTITPDGADVYSYDEDDMVLDPSLAEHLSHFGIDMLKMQKTDKTMTELEIDMNQRIGEWELIQESGVPLKPLFGPGYTGIRNLGNSCYLNSVVQVLFSIPDFQRKYVDKLEKIFQNAPTDPTQDFSTQVAKLGHGLLSGEYSKPVPESGDGERVPEQKEVQDGIAPRMFKALIGKGHPEFSTNRQQDAQEFFLHLINMVERNCRSSENPNEVFRFLVEEKIKCLATEKVKYTQRVDYIMQLPVPMDAALNKEELLEYEEKKRQAEEEKMALPELVRAQVPFSSCLEAYGAPEQVDDFWSTALQAKSVAVKTTRFASFPDYLVIQIKKFTFGLDWVPKKLDVSIEMPEELDISQLRGTGLQPGEEELPDIAPPLVTPDEPKGSLGFYGNEDEDSFCSPHFSSPTSPMLDESVIIQLVEMGFPMDACRKAVYYTGNSGAEAAMNWVMSHMDDPDFANPLILPGSSGPGSTSAAADPPPEDCVTTIVSMGFSRDQALKALRATNNSLERAVDWIFSHIDDLDAEAAMDISEGRSAADSISESVPVGPKVRDGPGKYQLFAFISHMGTSTMCGHYVCHIKKEGRWVIYNDQKVCASEKPPKDLGYIYFYQRVAS

SEQ ID NO: 846447 - protein, 854 aa, Homo sapiens; identical to SEQ ID NO: 846438

SEQ ID NO: 846448 - protein, 661 aa, Homo sapiens
ASRGLGVNSPRVGHLRRILPGGWKCSKCDMRENLWLNLTDGSILCGRRYFDGSGGNNHAVEHYRETGYPLAVKLGTITPDGADVYSYDEDDMVLDPSLAEHLSHFGIDMLKMQKTDKTMTELEIDMNQRIGEWELIQESGVPLKPLFGPGYTGIRNLGNSCYLNSVVQVLFSIPDFQRKYVDKLEKIFQNAPTDPTQDFSTQVAKLGHGLLSGEYSKPVPESGDGERVPEQKEVQDGIAPRMFKALIGKGHPEFSTNRQQDAQEFFLHLINMVERNCRSSENPNEVFRFLVEEKIKCLATEKVKYTQRVDYIMQLPVPMDAALNKEELLEYEEKKRQAEEEKMALPELVRAQVPFSSCLEAYGAPEQVDDFWSTALQAKSVAVKTTRFASFPDYLVIQIKKFTFGLDWVPKKLDVSIEMPEELDISQLRGTGLQPGEEELPDIAPPLVTPDEPKAPMLDESVIIQLVEMGFPMDACRKAVYYTGNSGAEAAMNWVMSHMDDPDFANPLILPGSSGPGSTSAAADPPPEDCVTTIVSMGFSRDQALKALRATNNSLERAVDWIFSHIDDLDAEAAMDISEGRSAADSISESVPVGPKVRDGPGKYQLFAFISHMGTSTMCGHYVCHIKKEGRWVIYNDQKVCASEKPPKDLGYIYFYQRVAS

SEQ ID NO: 846449 - protein, 343 aa, Homo sapiens; identical to SEQ ID NO: 846442

SEQ ID NO: 846450 - protein, 189 aa, Homo sapiens
QKQGPFCENGQGPTLQLCGHFGFGIRCQSMGEKCMEWVIGRGLGPGGGRRSKQWPNQSVRVPTIPITAPMLDESVIIQLVEMGFPMDACRKAVYYTGNSGAEAAMNWVMSHMDDPGGWGGEQGGAGPPSSPKHINPFTSTDFANPLILPGSSGPGSTSAAADPPPEDCVTTIVSMGFSRDQALKALRAT

SEQ ID NO: 846451 - protein, 381 aa, Homo sapiens
MSRHEGVSCDACLKGNFRGRRYKCLICYDYDLCASCYESGATTTRHTTDHPMQCILTRVDFDLYYGGEAFSVEQPQSFTCPYCGKMGYTETSLQEHVTSEHAETSTEVICPICAALPGGDPNHVTDDFAAHLTLEHRAPRDLDESSGVRHVRRMFHPGRGLGGPRARRSNMHFTSSSTGGLSSSQSSYSPSNREAMDPIAELLSQLSGVRRSAGGQLNSSGPSASQLQQLQMQLQLERQHAQAARQQLETARNATRRTNTSSVTTTITQSTATTNIANTESSQQTLQNSQFLLTRLNDPKMSETERQSMESERADRSLFVQELLLSTLVREESSSSDEDDRGEMADFGAMGCVDIMPLDVALENLNLKESNKGNEPPPPPL

SEQ ID NO: 846452 - protein, 381 aa, Homo sapiens; identical to SEQ ID NO: 846451

SEQ ID NO: 846453 - protein, 211 aa, Homo sapiens
MHFTSSSTGGLSSSQSSYSPSNREAMDPIAELLSQLSGVRRSAGGQLNSSGPSASQLQQLQMQLQLERQHAQAARQQLETARNATRRTNTSSVTTTITQSTATTNIANTESSQQTLQNSQFLLTRLNDPKMSETERQSMESERADRSLFVQELLLSTLVREESSSSDEDDRGEMADFGAMGCVDIMPLDVALENLNLKESNKGNEPPPPPL

SEQ ID NO: 846454 - protein, 112 aa, Homo sapiens
  misc_feature (11)..(11): Xaa can be any naturally occurring amino acid
MRSPVVAVLPXHAAVLAAAASAVVVTEKRKGQRNEAVLLQNVSLLITEKKLSYRIHGFPIAWRNVLCAVFANESGQQLSWVCLVIVISGLSLLLHCVHSKGREKIYMIIIST

SEQ ID NO: 846455 - protein, 171 aa, Homo sapiens
AGERRPPAEWARERRWGRVGARGTGLAAGRRPLISMRTKAAGCAERRPLQPRTEAAAAPAGRGVSCDACLKGNFRGRRYKCLICYDYDLCASCYESGATTTRHTTDHPMQCILTRVDFDLYYGGEAFSVEQPQSFTCPYCGKMGYTETSLQEHVTSEHAETSTEVVKLWGP

SEQ ID NO: 846456 - protein, 233 aa, Homo sapiens
MIYLNFELPVAPEIPSWVRRSNMHFTSSSTGGLSSSQSSYSPSNREAMDPIAELLSQLSGVRRSAGGQLNSSGPSASQLQQLQMQLQLERQHAQAARQQLETARNATRRTNTSSVTTTITQSTATTNIANTESSQQTLQNSQFLLTRLNDPKMSETERQSMESERADRSLFVQELLLSTLVREESSSSDEDDRGEMADFGAMGCVDIMPLDVALENLNLKESNKGNEPPPPPL

SEQ ID NO: 846457 - protein, 284 aa, Homo sapiens
MSRHEGVSCDACLKGNFRGRRYKCLICYDYDLCASCYESGATTTRHTTDHPMQCILTRVDFDLYYGGEAFSVEQPQSFTCPYCGKMGYSSYSPSNREAMDPIAELLSQLSGVRRSAGGQLNSSGPSASQLQQLQMQLQLERQHAQAARQQLETARNATRRTNTSSVTTTITQSTATTNIANTESSQQTLQNSQFLLTRLNDPKMSETERQSMESERADRSLFVQELLLSTLVREESSSSDEDDRGEMADFGAMGCVDIMPLDVALENLNLKESNKGNEPPPPPL

SEQ ID NO: 846458 - protein, 41 aa, Homo sapiens
MRPRHSRHSGASPDPPSKCVAQIPDPDVSTVAQAPASIPAR

SEQ ID NO: 846459 - protein, 866 aa, Homo sapiens
QNSSDHANEEWETASESSDFSERRERREGPGSEPDSQVDGGLSGASLGEKKELAKRSFSSQRPVVDRQSRKLEPGGFGEKPVRPGGGDTSPRYESQQNGTPLKVKRSPDEALPGGLSGCSSGSGHSPYALERAAHASADLPEASSKKAEKEAKLAAPRAGEQGEAMKQFDLNYGSAIIENCGSSPGEESEVGSMVGEGFIEVLTKKQRRLLEEERRKKEQAVQVPVKGRGLSSRIPPRFAKKQNNLCLEQGDVTVPGSSLGTEIWESSSQALPVQAPANDSWRKAVTAFSSTETGSAEQGFKSSQGDSGVDLSAESRESSATSSQRSSPYGTLKPEEMSGPGLAEPKADSHKEQAPKPSEQKDSEQGSGQSKEHRPGPIGNERSLKNRKGSEGAERLQGAVVPPVNGVEIHVDSVLPVPPIEFGVSPKDSDFSLPPGSASGPTGSPVVKLQDALASNAGLTQSIPILRRDHHIQRAIGLSPMSFPTADLTLKMESARKAWENSPSLPEQSSPGGAGSGIQPPSSVGASSGVNYSSFGGVSMPPMPVASVAPSASMPGSHLPPLYLDGHVFASQPRLVPQTIPQQQSYQQAAAAQQIPISLHTSLQAQAQLGLRGGLPVSQSQEIFSSLQPFRSQVYMHPSLSPPSTMILSGGTALKPPYSAFPGMQPLEMVKPQSGSPYQPMSGNQALVYEGQLSQAAGLGASQMLDSQLPQLTMPLPRYGSGQQPLILPQSIQLPPGQSLSVGAPRRIPPPGSQPPVLNTSREPSQMEMKGFHFADSKQNVPSGGPVPSPQTYRPSSASPSGKPSGSAVNMGSVQGHYVQQAKQRVDEKPSLGAVKLQEAPSAASQMKRTGAIKPRAVKVEESKA

SEQ ID NO: 846460 - protein, 808 aa, Homo sapiens
QNSSDHANEEWETASESSDFSERRERREGPGSEPDSQVDGGLSGASLGEKKELAKRSFSSQRPVVDRQSRKLEPGGFGEKPVRPGGGDTSPRYESQQNGTPLKVKRSPDEALPGGLSGCSSGSGHSPYALERAAHASADLPEASSKKAEKEAKLAAPRAGEQGEAMKQFDLNYGSAIIENCGSSPGEESEVGSMVGEGFIEVLTKKQRRLLEEERRKKEQAVQVPVKGRGLSSRIPPRFAKKQNNLCLEQGDVTVPGSSLGTEIWESSSQALPVQAPANDSWRKAVTAFSSTETGSAEQGFKSSQGDSGVDLSAESRESSATSSQRSSPYGTLKPEEMSGPGLAEPKADSHKEQAPKPSEQKDSEQGSGQSKEHRPGPIGNERSLKNRKGSEGAERLQGAVVPPVNGVEIHVDSVLPVPPIEFGVSPKDSDFSLPPGSASGPTGSPVVKLQDALASNAGLTQSIPILRRDHHIQRAIGLSPMSFPTADLTLKMESARKAWENSPSLPEQSSPGGAGSGIQPPSSVGASSGVNYSSFGGVSMPPMPVASVAPSASMPGSHLPPLYLDGHVFASQPRLVPQTIPQQQSYQQAAAAQQIPISLHTSLQAQAQLGLRGGLPVSQSQEIFSSLQPFRSQVYMHPSLSPPSTMILSGGTALKPPYSAFPGMQPLEMVKPQSGSPYQPMSGNQALVYEGQLSQAAGLGASQMLDSQLPQLTMPLPRYGSGQQPLILPQSIQLPPGQSLSVGAPRRIPPPGSQPPVLNTSREPSQMEMKGFHFADSKQNVPSGGPVPSPQTYRQNNEWMRNPAWEP

SEQ ID NO: 846461 - protein, 162 aa, Homo sapiens
MILSGGTALKPPYSAFPGMQPLEMVKPQSGSPYQPMSGNQALVYEGQLSQAAGLGASQMLDSQLPQLTMPLPRYGSGQQPLILPQSIQLPPGQSLSVGAPRRIPPPGSQPPVLNTSREPSQMEMKGFHFADSKQNVPSGGPVPSPQTYRQNNEWMRNPAWEP

SEQ ID NO: 846462 - protein, 122 aa, Homo sapiens
MCGRSLVRLGFLHSIIPPPDFIVAQQLTMPLPRYGSGQQPLILPQSIQLPPGQSLSVGAPRRIPPPGSQPPVLNTSREPSQMEMKGFHFADSKQNVPSGGPVPSPQTYRQNNEWMRNPAWEP

SEQ ID NO: 846463 - protein, 808 aa, Homo sapiens; identical to SEQ ID NO: 846460

SEQ ID NO: 846464 - protein, 203 aa, Homo sapiens
QFWLSVRLLGLLSGALHRVGPDPETASVAFCTAGQPCPSVQGLSLPLLRCVSLSSVLEVPGWSVTATPSPFCVLGCLRSVVVFHPRDPRTVPSERLWPQALPSLCLLHVLGFDSISVVTRCVFSTPAFGFFRPSSASPSGKPSGSAVNMGSVQGHYVQQAKQRVDEKPSLGAVKLQEAPSAASQMKRTGAIKPRAVKVEESKA

SEQ ID NO: 846465 - protein, 808 aa, Homo sapiens; identical to SEQ ID NO: 846460

SEQ ID NO: 846466 - protein, 866 aa, Homo sapiens; identical to SEQ ID NO: 846459

SEQ ID NO: 846467 - protein, 808 aa, Homo sapiens; identical to SEQ ID NO: 846460

SEQ ID NO: 846468 - protein, 132 aa, Homo sapiens
VSELVRLSVVSVIDAARWWCARSGALPAFRHILAPTDIGFLAGPCLNTLANRCAHIESGPRPGVYTRLRPWLFGPPPPGLCAQSSLAFCNLSFSFLPLPEPAAFSGPVSTSHTAHREHHLVMEGVDPCVVPK

SEQ ID NO: 846469 - protein, 866 aa, Homo sapiens; identical to SEQ ID NO: 846459

SEQ ID NO: 846470 - protein, 186 aa, Homo sapiens
RWMMMPSYMDPRITPTRTPVDFYPSALHPSGLMKPMMPQESLNGTGCRSEDQNCVPPLQERKVTPIDSPPVWSPEGYMALQSKGYPLPHPKSSDTLAMDMRVRNESSFSASLGRAGGVSAQRDLFEERGEEYLSAFDKKAQADFDSCISSQRIGQELLFPPQENVQDAVKMYPSGEPGIRPTVLAV

SEQ ID NO: 846471 - protein, 86 aa, Homo sapiens
PGLQEFGMAALVEPSPLPFGSPVPSSCRLPLKSSFVPFHFLQNKPGLEGLLEMAFEDQGYQDVCTLSCSVMNGKRRLPESQLSSEM

SEQ ID NO: 846472 - protein, 577 aa, Homo sapiens
QNSSDHANEEWETASESSDFSERRERREGPGSEPDSQVDGGLSGASLGEKKELAKRSFSSQRPVVDRQSRKLEPGGFGEKPVRPGGGDTSPRYESQQNGTPLKVKRSPDEALPGGLSGCSSGSGHSPYALERAAHASADLPEASSKKAEKEAKLAAPRAGEQGEAMKQFDLNYGSAIIENCGSSPGEESEVGSMVGEGFIEVLTKKQRRLLEEERRKKEQAVQVPVKGRGLSSRIPPRFAKKQNNLCLEQGDVTVPGSSLGTEIWESSSQALPVQAPANDSWRKAVTAFSSTETGSAEQGFKSSQGDSGVDLSAESRESSATSSQRSSPYGTLKPEEMSGPGLAEPKADSHKEQAPKPSEQKDSEQGSGQSKEHRPGPIGNERSLKNRKGSEGAERLQGAVVPPVNGVEIHVDSVLPVPPIEFGVSPKDSDFSLPPGSASGPTGSPVVKLQDALASNAGLTQSIPILRRDHHIQRAIGLSPMSFPTADLTLKMESARKAWENSPSLPEQSSPGGAGSGIQPPSSVGASSGVNYSSFGGVSMPPMPVASVAPSASMPGISSPEQGLGVLLHLLSRKTD

SEQ ID NO: 846473 - protein, 234 aa, Homo sapiens
RWMMMPSYMDPRITPTRTPVDFYPSALHPSGLMKPMMPQESLNGTGCRSEDQNCVPPLQERKVTPIDSPPVWSPEGYMALQSKGYPLPHPKSSDTLAMDMRVRNESSFSASLGRAGGVSAQRDLFEERGEEYLSAFDKKAQADFDSCISSQRIGQELLFPPQENVQDAGAPGGHTQNLRCSPLEPDFVPDEKKPECGSWDVSHQPETADTAHGVERETPREGTAFNISSWDKNG

SEQ ID NO: 846474 - protein, 172 aa, Homo sapiens
QFWLSVRLLGLLSGALHRVGPDPETASVAFCTAGQPCPSVQGLSLPLLRCVSLSSVLEVPGWSVTATPSPFCVLGCLRSVVVFHPRDPRTVPSERLWPQALPSLCLLHVLGFDSISVVTRCVFSTPAFGFFRPSSASPSGKPSGSAVNMGSVQGHYVQQVEDGFPDPSALDT

SEQ ID NO: 846475 - protein, 828 aa, Homo sapiens
QNSSDHANEEWETASESSDFSERRERREGPGSEPDSQVDGGLSGASLGEKKELAKRSFSSQRPVVDRQSRKLEPGGFGEKPVRPGGGDTSPRYESQQNGTPLKVKRSPDEALPGGLSGCSSGSGHSPYALERAAHASADLPEASSKKAEKEAKLAAPRAGEQGEAMKQFDLNYGSAIIENCGSSPGEESEVGSMVGEGFIEVLTKKQRRLLEEERRKKEQAVQVPVKGRGLSSRIPPRFAKKQNNLCLEQGDVTVPGSSLGTEIWESSSQALPVQAPANDSWRKAVTAFSSTETGSAEQGFKSSQGDSGVDLSAESRESSATSSQRSSPYGTLKPEEMSGPGLAEPKADSHKEQAPKPSEQKDSEQGSGQSKEHRPGPIGNERSLKNRKGSEGAERLQGAVVPPVNGVEIHVDSVLPVPPIEFGVSPKDSDFSLPPGSASGPTGSPVVKLQDALASNAGLTQSIPILRRDHHIQRAIGLSPMSFPTADLTLKMESARKAWENSPSLPEQSSPGGAGSGIQPPSSVGASSGVNYSSFGGVSMPPMPVASVAPSASMPGSHLPPLYLDGHVFASQPRLVPQTIPQQQSYQQDPSDEEKKGLNSQAWMHLKEAAAAQQIPISLHTSLQAQAQLGLRGGLPVSQSQEIFSSLQPFRSQVYMHPSLSPPSTMILSGGTALKPPYSAFPGMQPLEMVKPQSGSPYQPMSGNQALVYEGQLSQAAGLGASQMLDSQLPQLTMPLPRYGSGQQPLILPQSIQLPPGQSLSVGAPRRIPPPGSQPPVLNTSREPSQMEMKGFHFADSKQNVPSGGPVPSPQTYRQNNEWMRNPAWEP

SEQ ID NO: 846476 - protein, 234 aa, Homo sapiens
LLGRGGLLVTLLLRYRLRNQPGLTCKHTSLQAQAQLGLRGGLPVSQSQEIFSSLQPFRSQVYMHPSLSPPSTMILSGGTALKPPYSAFPGMQPLEMVKPQSGSPYQPMSGNQALVYEGQLSQAAGLGASQMLDSQLPQLTMPLPRYGSGQQPLILPQSIQLPPGQSLSVGAPRRIPPPGSQPPVLNTSREPSQMEMKGFHFADSKQNVPSGGPVPSPQTYRQNNEWMRNPAWEP

SEQ ID NO: 846477 - protein, 866 aa, Homo sapiens; identical to SEQ ID NO: 846459

SEQ ID NO: 846478 - protein, 866 aa, Homo sapiens; identical to SEQ ID NO: 846459

SEQ ID NO: 846479 - protein, 866 aa, Homo sapiens; identical to SEQ ID NO: 846459

SEQ ID NO: 846480 - protein, 808 aa, Homo sapiens; identical to SEQ ID NO: 846460

SEQ ID NO: 846481 - protein, 866 aa, Homo sapiens; identical to SEQ ID NO: 846459

SEQ ID NO: 846482 - protein, 808 aa, Homo sapiens; identical to SEQ ID NO: 846460

SEQ ID NO: 846483 - protein, 852 aa, Homo sapiens
QNSSDHANEEWETASESSDFSERRERREGPGSEPDSQVDGGLSGASLGEKKELAKRSFSSQRPVVDRQSRKLEPGGFGEKPVRPGGGDTSPRYESQQNGTPLKVKRSPDEALPGGLSGCSSGSGHSPYALERAAHASADLPEASSKKAEKEAKLAAPRAGEQGEAMKQFDLNYGSAIIENCGSSPGEESEVGSMVGEGFIEVLTKKQRRLLEEERRKKEQAVQVPVKGRGLSSRIPPRFAKKQNNLCLEQGDVTVPGSSLGTEIWESSSQALPVQAPANDSWRKAVTAFSSTETGSAEQGFKSSQGDSGVDLSAESRESSATSSQRSSPYGTLKPEEMSGPGLAEPKADSHKEQAPKPSEQKDSEQGSGQSKEHRPGPIGNERSLKNRKGSEGAERLQGAVVPPVNGVEIHVDSVLPVPPIEFGVSPKDSDFSLPPGSASGPTGSPVVKLQDALASNAGLTQSIPILRRDHHIQRAIGLSPMSFPTADLTLKMESARKAWENSPSLPEQSSPGGAGSGIQPPSSVGASSGVNYSSFGGVSMPPMPVASVAPSASMPGSHLPPLYLDGHVFASQPRLVPQTIPQQQSYQQAAAAQQIPISLHTSLQAQAQLGLRGGLPVSQSQEIFSSLQPFRSQVYMHPSLSPPSTMILSGGTALKPPYSAFPGMQPLEMVKPQSGSPYQPMSGNQALVYEGQLSQAAGLGASQMLDSQLPQLTMPLPRYGSGQQPLILPQSIQLPPGQSLSVGAPRRIPPPGSQPPVLNTSREPSQMEMKGFHFADSKQNVPSGGPVPSPQTYREQRLGYEGLLGNGLSKTKASQACASHSCRAPADRLGQPLSFPVKRPDTPPSPDRHRN

SEQ ID NO: 846484 - protein, 148 aa, Homo sapiens
RWMMMPSYMDPRITPTRTPVDFYPSALHPSGLMKPMMPQESLNGTGCRSEDQNCVPPLQERKVTPIDSPPVWSPEGYMALQSKGYPLPHPKSSDTLAMDMRVRNESSFSASLGRAGGVSAQRDLFEERGEEYLSAFDKKAQAERWLEV

SEQ ID NO: 846485 - protein, 213 aa, Homo sapiens
LQDPVMYPQHKERIGHRYIEIFRSSRSEIKGFYDPPRRLLGQRPGPYDRPIGGRGGYYGAGREGSMYDRMRRGGDGYDGGYGGFDDYGGYNNYGYGNDGFDDRMRDGRGMGGHGYGGAGDASSGFHGGHFVHMRGLPFRATENDIANFFSPLNPIRVHIDIGADGRATGEADVEFVTHEDAVAAMSKDKNNMQRSGDYGRYHLHPAFQGLFKP

SEQ ID NO: 846486 - protein, 347 aa, Homo sapiens
MDWVMKHNGPNDASDGTVRLRGLPFGCSKEEIVQFFQGLEIVPNGITLTMDYQGRSTGEAFVQFASKEIAENALGKHKERIGHRYIEIFRSSRSEIKGFYDPPRRLLGQRPGPYDRPIGGRGGYYGAGREGSMYDRMRRGGDGYDGGYGGFDDYGGYNNYGYGNDGFDDRMRDGRGMGGHGYGGAGDASSGFHGGHFVHMRGLPFRATENDIANFFSPLNPIRVHIDIGADGRATGEADVEFVTHEDAVAAMSKDKNNMQHRYIELFLNSTPGGGSGMGGSGMGGYGRDGMDNQGGYGSVGRMGMGNNYSGGYGTPDGLGGYGRGGGGSGGYYGQGGMSGGGWRGMY

SEQ ID NO: 846487 - protein, 174 aa, Homo sapiens
MDWVMKHNGPNDASDGTVRLRGLPFGCSKEEIVQFFQGLEIVPNGITLTMDYQGRSTGEAFVQFASKEIAENALGKHKERIGHRYIEIFRSSRSEIKGFYDPPRRLLGQRPGPYDRPIGGRGGYYGAGREGSMYDRMRRGGDGYDGGYVYLMNKGSVVIFLMFLTLCQEIQKWQ

SEQ ID NO: 846488 - protein, 347 aa, Homo sapiens; identical to SEQ ID NO: 846486

SEQ ID NO: 846489 - protein, 347 aa, Homo sapiens; identical to SEQ ID NO: 846486

SEQ ID NO: 846490 - protein, 347 aa, Homo sapiens; identical to SEQ ID NO: 846486

SEQ ID NO: 846491 - protein, 145 aa, Homo sapiens
MYDRMRRGGDGYDGGYGGFDDYGGYNNYGYGNDGFDDRMRDGRGMGGHGYGGAGDASSGFHGGHFVHMRGLPFRATENDIANFFSPLNPIRVHIDIGADGRATGEADVEFVTHEDAVAAMSKDKNNMRKWCLWHTILFPKREFIK

SEQ ID NO: 846492 - protein, 228 aa, Homo sapiens
MDWVMKHNGPNDASDGTVRLRGLPFGCSKEEIVQFFQGLEIVPNGITLTMDYQGRSTGEAFVQFASKEIAENALGKHKERIGHRYIEIFRSSRSEIKGFYDPPRRLLGQRPGPYDRPIGGRGGYYGAGREGSMYDRMRRGGDGYDGGYGGFDDYGGYNNYGYGNDGFDDRMRDGRGMGGHGYGGAGDASSGFHGGHFVHMRGLPFRATENDIANLILELMAEPQEKQM

SEQ ID NO: 846493 - protein, 174 aa, Homo sapiens; identical to SEQ ID NO: 846487

SEQ ID NO: 846494 - protein, 315 aa, Homo sapiens
MDWVMKHNGPNDASDGTVRLRGLPFGCSKEEIVQFFQGLEIVPNGITLTMDYQGRSTGEAFVQFASKEIAENALGKHKERIGHRYIEIFRSSRSEIKGFYDPPRRLLGQRPGPYDRPIGGRGGYYGAGREGSMYDRMRRGGDGYDGGYGGFDDYGGYNNYGYGNDGFDDRMRDGRGMGGHGYGGAGDASSGFHGGHFVHMRGLPFRATENDIANFFSPLNPIRVHIDIGADGRATGEADVEFVTHEDAVAAMSKDKNNMHNQGGYGSVGRMGMGNNYSGGYGTPDGLGGYGRGGGGSGGYYGQGGMSGGGWRGMY

SEQ ID NO: 846495 - protein, 323 aa, Homo sapiens
MDWVMKHNGPNDASDGTVRLRGLPFGCSKEEIVQFFQGLEIVPNGITLTMDYQGRSTGEAFVQFASKEIAENALGKHKERIGHRYIEIFRSSRSEIKGFYDPPRRLLGQRPGPYDRPIGGRGGYYGAGREGSMYDRMRRGGDGYDGGYGGFDDYGGYNNYGYGNDGFDDRMRDGRGMGGHGYGGAGDASSGFHGGHFVHMRGLPFRATENDIANFFSPLNPIRVHIDIGADGRATGEADVEFVTHEDAVAAMSKDKNNMQHRYIELFLNSTPGGGSGMGGSGMGGYGRDGMDNQGGYGSVGRMGMGNNYSGGYGTPDGLGGYG

SEQ ID NO: 846496 - protein, 347 aa, Homo sapiens; identical to SEQ ID NO: 846486

SEQ ID NO: 846497 - protein, 277 aa, Homo sapiens
MDWVMKHNGPNDASDGTVRLRGLPFGCSKEEIVQFFQGLEIVPNGITLTMDYQGRSTGEAFVQFASKEIAENALGKHKERIGHRYIEIFRSSRSEIKGFYDPPRRLLGQRPGPYDRPIGGRGGYYGAGREGSMYDRMRRGGDGYDGGYGGFDDYGGYNNYGYGNDGFDDRMRDGRGMGGHGYGGAGDASSGFHGGHFVHMRGLPFRATENDIANFFSPLNPIRVHIDIGADGRATGEADVEFVTHEDAVAAMSKDKNNMRKWCLWHTILFPKREFIK

SEQ ID NO: 846498 - protein, 336 aa, Homo sapiens
MDWVMKHNGPNDASDGTVRLRGLPFGCSKEEIVQFFQGLEIVPNGITLTMDYQGRSTGEAFVQFASKEIAENALGKHKERIGHRYIEIFRSSRSEIKGFYDPPRRLLGQRPGPYDRPIGGRGGYYGAGREGSMYDRMRRGGDGYDGGYGGFDDYGGYNNYGYGNDGFDDRMRDGRGMGGHGYGGAGDASSGFHGGHFVHMRGLPFRATENDIANFFSPLNPIRVHIDIGADGRATGEADVEFVTHEDAVAAMSKDKNNMQHRYIELFLNSTPGGGSGMGGSGMGGYGRDGMDNQGGYGSVGRMGMGNNYSGGYGTPDGLGGYDSGGDSGGVGYRAK

SEQ ID NO: 846499 - protein, 311 aa, Homo sapiens
MDWVMKHNGPNDASDGTVRLRGLPFGCSKEEIVQFFQGLEIVPNGITLTMDYQGRSTGEAFVQFASKEIAENALGKHKERIGHRYIEIFRSSRSEIKGFYDPPRRLLGQRPGPYDRPIGGRGGYYGAGREGSMYDRMRRGGDGYDGGYGGFDDYGGYNNYGYGNDGFDDRMRDGRGMGGHGYGGAGDASSGFHGGHFVHMRGLPFRATENDIANFFSPLNPIRVHIDIGADGRATGEADVEFVTHEDAVAAMSKDKNNMQHRYIELFLNSTPGGGSGMGGSGMGGYGRDGMDNQGGYDQLTKGDDTDPQSH

SEQ ID NO: 846500 - protein, 154 aa, Homo sapiens
MDWVMKHNGPNDASDGTVRLRGLPFGCSKEEIVQFFQGLEIVPNGITLTMDYQGRSTGEAFVQFASKEIAENALGKHKERIGHRYIEIFRSSRSEIKGFYDPPRRLLGQRPGPYDRPIGGRGGYYGAGREVMEVLMTMVAIIITAMGMMALMTE

SEQ ID NO: 846501 - protein, 298 aa, Homo sapiens
MDYQGRSTGEAFVQFASKEIAENALGKHKERIGHRYIEIFRSSRSEIKGFYDPPRRLLGQRPGPYDRPIGGRGGYYGAGREGSMYDRMRRGGDGYDGGYGGFDDYGGYNNYGYGNDGFDDRMRDGRGMGGHGYGGAGDASSGFHGGHFVHMRGLPFRATENDIANFFSPLNPIRVHIDIGADGRATGEADVEFVTHEDAVAAMSKDKNNMQHRYIELFLNSTPGGGSGMGGSGMGGYGRDGMDNQGGYGSVGRMGMGNNYSGGYGTPDGLGGYGRGGGGSGGYYGQGGMSGGGWRGMY

SEQ ID NO: 846502 - protein, 347 aa, Homo sapiens; identical to SEQ ID NO: 846486

SEQ ID NO: 846503 - protein, 154 aa, Homo sapiens; identical to SEQ ID NO: 846500

SEQ ID NO: 846504 - protein, 220 aa, Homo sapiens
GRSLQRLQEEGVLSELGSGSYGGFDDYGGYNNYGYGNDGFDDRMRDGRGMGGHGYGGAGDASSGFHGGHFVHMRGLPFRATENDIANFFSPLNPIRVHIDIGADGRATGEADVEFVTHEDAVAAMSKDKNNMQHRYIELFLNSTPGGGSGMGGSGMGGYGRDGMDNQGGYGSVGRMGMGNNYSGGYGTPDGLGGYGRGGGGSGGYYGQGGMSGGGWRGMY

SEQ ID NO: 846505 - protein, 347 aa, Homo sapiens; identical to SEQ ID NO: 846486

SEQ ID NO: 846506 - protein, 347 aa, Homo sapiens; identical to SEQ ID NO: 846486

SEQ ID NO: 846507 - protein, 306 aa, Homo sapiens
MDWVMKHNGPNDASDGTVRLRGLPFGCSKEEIVQFFQGLEIVPNGITLTMDYQGRSTGEAFVQFASKEIAENALGKHKERIGHRYIEIFRSSRSEIKGFYDPPRRLLGQRPGPYDRPIGGRGGYYGAGREGSMYDRMRRGGDGYDGGYGGFDDYGGYNNYGYGNDGFDDRMRDGRGMGGHGYGGAGDASSGFHGGHFVHMRGLPFRATENDIANFFSPLNPIRVHIDIGADGRATGEADVEFVTHEDAVAAMSKDKNNMQHRYIELFLNSTPGGGSGMGGSGMGGYGRDGMGYVKFLKYAGLAAYR

SEQ ID NO: 846508 - protein, 266 aa, Homo sapiens
MDWVMKHNGPNDASDGTVRLRGLPFGCSKEEIVQFFQGLEIVPNGITLTMDYQGRSTGEAFVQFASKEIAENALGKHKERIGHRYIEIFRSSRSEIKGFYDPPRRLLGQRPGPYDRPIGGRGGYYGAGREGSMYDRMRRGGDGYDGGYGGFDDYGGYNNYGYGNDGFDDRMRDGRGMGGHGYGGAGDASSGFHGGHFVHMRGLPFRATENDIANFFSPLNPIRVHIDIGADGPWWWRQWRLLWARRHEWRWMAWDVLKAKTPTYKS

SEQ ID NO: 846509 - protein, 338 aa, Homo sapiens
MDWVMKHNGPNDASDGTVRLRGLPFGCSKEEIVQFFQGLEIVPNGITLTMDYQGRSTGEAFVQFASKEIAENALGKHKERIGHRYIEIFRSSRSEIKGFYDPPRRLLGQRPGPYDRPIGGRGGYYGAGREGSMYDRMRRGGDGYDGGYGGFDDYGGYNNYGYGNDGFDDRMRDGRGMGGHGYGGAGDASSGFHGGHFVHMRGLPFRATENDIANFFSPLNPIRVHIDIGADGRATGEADVEFVTHEDAVAAMSKDKNNMQHRYIELFLNSTPGGGSGMGGSGMGGYGRDGMGRRCGVGAAGAACSRGVFDAWADAGLGSSSFTFPEPDFLSQVRASVD

SEQ ID NO: 846510 - protein, 280 aa, Homo sapiens
MDWVMKHNGPNDASDGTVRLRGLPFGCSKEEIVQFFQGLEIVPNGITLTMDYQGRSTGEAFVQFASKEIAENALGKHKERIGHRYIEIFRSSRSEIKGFYDPPRRLLGQRPGPYDRPIGGRGGYYGAGREGSMYDRMRRGGDGYDGGYGGFDDYGGYNNYGYGNDGFDDRMRDGRGMGGHGYGGAGDASSGFHGGHFVHMRGLPFRATENDIANFFSPLNPIRVHIDIGADGRATGEADVEFVTHEDAVAAMSKDKNNMQRSGDYGRYHLHPAFQGLFKP

SEQ ID NO: 846511 - protein, 154 aa, Homo sapiens; identical to SEQ ID NO: 846500

SEQ ID NO: 846512 - protein, 620 aa, Homo sapiens
MNLERLRKRVRQYLDQQQYQSALFWADKVASLSREEPQDIYWLAQCLYLTAQYHRAAHALRSRKLDKLYEACRYLAARCHYAAKEHQQALDVLDMEEPINKRLFEKYLKDESGFKDPSSDWEMSQSSIKSSICLLRGKIYDALDNRTLATYSYKEALKLDVYCFEAFDLLTSHHMLTAQEEKELLESLPLSKLCNEEQELLRFLFENKLKKYNKPSETVIPESVDGLQENLDVVVSLAERHYYNCDFKMCYKLTSVVMEKDPFHASCLPVHIGTLVELNKANELFYLSHKLVDLYPSNPVSWFAVGCYYLMVGHKNEHARRYLSKATTLEKTYGPAWIAYGHSFAVESEHDQAMAAYFTAAQLMKGCHLPMLYIGLEYGLTNNSKLAERFFSQALSIAPEDPFVMHEVGVVAFQNGEWKTAEKWFLDALEKIKAIGNEVTVDKWEPLLNNLGHVCRKLKKYAEALDYHRQALVLIPQNASTYSAIGYIHSLMGNFENAVDYFHTALGLRRDDTFSVTMLGHCIEMYIGDSEAYIGADIKDKLKCYDFDVHTMKTLKNIISPPWDFREFEVEKQTAEETGLTPLETSRKTPDSRPSLEETFEIEMNESDMMLETSMSDHST

SEQ ID NO: 846513 - protein, 620 aa, Homo sapiens; identical to SEQ ID NO: 846512

SEQ ID NO: 846514 - protein, 569 aa, Homo sapiens
MNLERLRKRVRQYLDQQQYQSALFWADKVASLSREEPQDIYWLAQCLYLTAQYHRAAHALRSRKLDKLYEACRYLAARCHYAAKEHQQALDVLDMEEPINKRLFEKYLKDESGFKDPSSDWEMSQSSIKSSICLLRGKIYDALDNRTLATYSYKEALKLDVYCFEAFDLLTSHHMLTAQEEKELLESLPLSKLCNEEQELLRFLFENKLKKYNKPSETVIPESVDGLQENLDVVVSLAERHYYNCDFKMCYKLTSVVMEKDPFHASCLPVHIGTLVELNKANELFYLSHKLVDLYPSNPVSWFAVGCYYLMVGHKNEHARRYLSKATTLEKTYGPAWIAYGHSFAVESEHDQAMAAYFTAAQLMKGWKTAEKWFLDALEKIKAIGNEVTVDKWEPLLNNLGHVCRKLKKYAEALDYHRQALVLIPQNASTYSAIGYIHSLMGNFENAVDYFHTALGLRRDDTFSVTMLGHCIEMYIGDSEAYIGADIKDKLKCYDFDVHTMKTLKNIISPPWDFREFEVEKQTAEETGLTPLETSRKTPDSRPSLEETFEIEMNESDMMLETSMSDHST

SEQ ID NO: 846515 - protein, 459 aa, Homo sapiens
MNLERLRKRVRQYLDQQQYQSALFWADKVASLSREEPQDIYWLAQCLYLTAQYHRAAHALRSRKLDKLYEACRYLAARCHYAAKEHQQALDVLDMEEPINKRLFEKYLKDESGFKDPSSDWEMSQSSIKSSICLLRGKIYDALDNRTLATYSYKEALKLDVYCFEAFDLLTSHHMLTAQEEKELLESLPLSKLCNEEQELLRFLFENKLKKYNKPSETVIPESVDGLQENLDVVVSLAERHYYNCDFKMCYKLTSVVMEKDPFHASCLPVHIGTLVELNKANELFYLSHKLVDLYPSNPVSWFAVGCYYLMVGHKNEHARRYLSKATTLEKTYGPAWIAYGHSFAVESEHDQAMAAYFTAAQLMKGCHLPMLYIGLEYGLTNNSKLAERFFSQALSIAPEDPFVMHEVGVVAFQNGEWKTAEKWFLDALEKIKAIGNEVTVDKWEPLLNNLGHVCRKLK

SEQ ID NO: 846516 - protein, 526 aa, Homo sapiens
MEEPINKRLFEKYLKDESGFKDPSSDWEMSQSSIKSSICLLRGKIYDALDNRTLATYSYKEALKLDVYCFEAFDLLTSHHMLTAQEEKELLESLPLSKLCNEEQELLRFLFENKLKKYNKPSETVIPESVDGLQENLDVVVSLAERHYYNCDFKMCYKLTSVVMEKDPFHASCLPVHIGTLVELNKANELFYLSHKLVDLYPSNPVSWFAVGCYYLMVGHKNEHARRYLSKATTLEKTYGPAWIAYGHSFAVESEHDQAMAAYFTAAQLMKGCHLPMLYIGLEYGLTNNSKLAERFFSQALSIAPEDPFVMHEVGVVAFQNGEWKTAEKWFLDALEKIKAIGNEVTVDKWEPLLNNLGHVCRKLKKYAEALDYHRQALVLIPQNASTYSAIGYIHSLMGNFENAVDYFHTALGLRRDDTFSVTMLGHCIEMYIGDSEAYIGADIKDKLKCYDFDVHTMKTLKNIISPPWDFREFEVEKQTAEETGLTPLETSRKTPDSRPSLEETFEIEMNESDMMLETSMSDHST

SEQ ID NO: 846517 - protein, 363 aa, Homo sapiens
MEKDPFHASCLPVHIGTLVELNKANELFYLSHKLVDLYPSNPVSWFAVGCYYLMVGHKNEHARRYLSKATTLEKTYGPAWIAYGHSFAVESEHDQAMAAYFTAAQLMKGCHLPMLYIGLEYGLTNNSKLAERFFSQALSIAPEDPFVMHEVGVVAFQNGEWKTAEKWFLDALEKIKAIGNEVTVDKWEPLLNNLGHVCRKLKKYAEALDYHRQALVLIPQNASTYSAIGYIHSLMGNFENAVDYFHTALGLRRDDTFSVTMLGHCIEMYIGDSEAYIGADIKDKLKCYDFDVHTMKTLKNIISPPWDFREFEVEKQTAEETGLTPLETSRKTPDSRPSLEETFEIEMNESDMMLETSMSDHST

SEQ ID NO: 846518 - protein, 539 aa, Homo sapiens
MNLERLRKRVRQYLDQQQYQSALFWADKVASLSREEPQDIYWLAQCLYLTAQYHRAAHALRSRKLDKLYEACRYLAARCHYAAKEHQQALDVLDMEEPINKRLFEKYLKDESGFKDPSSDWEMSQSSIKSSICLLRGKIYDALDNRTLATYSYKEALKLDVYCFEAFDLLTSHHMLTAQEEKELLESLPLSKLCNEEQELLRFLFENKLKKYNKPSETVIPESVDGLQENLDVVVSLAERHYYNCDFKMCYKLTSVVMEKDPFHASCLPVHIGTLVELNKANELFYLSHKLVDLYPSNPVSWFAVGCYYLMVGHKNEHARRYLSKATTLEKTYGPAWIAYGHSFAVESEHDQAMAAYFTAAQLMKGCHLPMLYIGLEYGLTNNSKLAERFFSQALSIAPEDPFVMHEVGVVAFQNGEWKTAEKWFLDALEKIKAIGNEVTVDKWEPLLNNLGHVCRKLKKYAEALDYHRQALVLIPQNASTYSAIGYIHSLMGNFENAVDYFHTALGLRRDDTFSVTMLGHCIEMYIGDSEAYIAPNWK

SEQ ID NO: 846519 - protein, 511 aa, Homo sapiens
MNLERLRKRVRQYLDQQQYQSALFWADKVASLSREEPQDIYWLAQCLYLTAQYHRAAHALRSRKLDKLYEACRYLAARCHYAAKEHQQALDVLDMEEPINKRLFEKYLKDESGFKDPSSDWEMSQSSIKSSICLLRGKIYDALDNRTLATYSYKEALKLDVYCFEAFDLLTSHHMLTAQEEKELLESLPLSKLCNEEQELLRFLFENKLKKYNKPSETVIPESVDGLQENLDVVVSLAERHYYNCDFKMCYKLTSVVMEKDPFHASCLPVHIGTLVELNKANELFYLSHKLVDLYPSNPVSWFAVGCYYLMVGHKNEHARRYLSKATTLEKTYGPAWIAYGHSFAVESEHDQAMAAYFTAAQLMKGCHLPMLYIGLEYGLTNNSKLAERFFSQALSIAPEDPFVMHEVGVVAFQNGEWKTAEKWFLDALEKIKAIGNEVTVDKWEPLLNNLGHVCRKLKKYAEALDYHRQALVLIPQNASTYSAIGYIHSLMGNFENAVDYFHTEQTLKTN

SEQ ID NO: 846520 - protein, 620 aa, Homo sapiens; identical to SEQ ID NO: 846512

SEQ ID NO: 846521 - protein, 620 aa, Homo sapiens; identical to SEQ ID NO: 846512

SEQ ID NO: 846522 - protein, 191 aa, Homo sapiens
MNLERLRKRVRQYLDQQQYQSALFWADKVASLSREEPQDIYWLAQCLYLTAQYHRAAHALRSRKLDKLYEACRYLAARCHYAAKEHQQALDVLDMEEPINKRLFEKYLKDESGFKDPSSDWEMSQSSIKSSICLLRGKIYDALDNRTLATYSYKEALKLDVYCFEAFDLLTSHHMLTAQEGLETQAFLFYV

SEQ ID NO: 846523 - protein, 620 aa, Homo sapiens; identical to SEQ ID NO: 846512

SEQ ID NO: 846524 - protein, 526 aa, Homo sapiens; identical to SEQ ID NO: 846516

SEQ ID NO: 846525 - protein, 441 aa, Homo sapiens
MNLERLRKRVRQYLDQQQYQSALFWADKVASLSREEPQDIYWLAQCLYLTAQYHRAAHALRSRKLDKLYEACRYLAARCHYAAKEHQQALDVLDMEEPINKRLFEKYLKDESGFKDPSSDWEMSQSSIKSSICLLRGKIYDALDNRTLATYSYKEALKLDVYCFEAFDLLTSHHMLTAQEEKELLESLPLSKLCNEEQELLRFLFENKLKKYNKPSETVIPESVDGLQENLDVVVSLAERHYYNCDFKMCYKLTSVVMEKDPFHASCLPVHIGTLVELNKANELFYLSHKLVDLYPSNPVSWFAVGCYYLMVGHKNEHARRYLSKATTLEKTYGPAWIAYGHSFAVESEHDQAMAAYFTAAQLMKGCHLPMLYIGLEYGLTNNSKLAERFFSQALSIAPEDPFVMHEVGVVAFQNGEWKTAEKWFLDALEKIKAIGNEKVC

SEQ ID NO: 846526 - protein, 372 aa, Homo sapiens [sequence omitted]

SEQ ID NO: 846527 - protein, 447 aa, Homo sapiens
EEKKTQQFLFFITQLAKGKLCNEEQELLRFLFENKLKKYNKPSETVIPESVDGLQENLDVVVSLAERHYYNCDFKMCYKLTSVVMEKDPFHASCLPVHIGTLVELNKANELFYLSHKLVDLYPSNPVSWFAVGCYYLMVGHKNEHARRYLSKATTLEKTYGPAWIAYGHSFAVESEHDQAMAAYFTAAQLMKGCHLPMLYIGLEYGLTNNSKLAERFFSQALSIAPEDPFVMHEVGVVAFQNGEWKTAEKWFLDALEKIKAIGNEVTVDKWEPLLNNLGHVCRKLKKYAEALDYHRQALVLIPQNASTYSAIGYIHSLMGNFENAVDYFHTALGLRRDDTFSVTMLGHCIEMYIGDSEAYIGADIKDKLKCYDFDVHTMKTLKNIISPPWDFREFEVEKQTAEETGLTPLETSRKTPDSRPSLEETFEIEMNESDMMLETSMSDHST

SEQ ID NO: 846528 - protein, 526 aa, Homo sapiens; identical to SEQ ID NO: 846516

SEQ ID NO: 846529 - protein, 216 aa, Homo sapiens
MHEVGVVAFQNGEWKTAEKWFLDALEKIKAIGNEVTVDKWEPLLNNLGHVCRKLKKYAEALDYHRQALVLIPQNASTYSAIGYIHSLMGNFENAVDYFHTALGLRRDDTFSVTMLGHCIEMYIGDSEAYIGADIKDKLKCYDFDVHTMKTLKNIISPPWDFREFEVEKQTAEETGLTPLETSRKTPDSRPSLEETFEIEMNESDMMLETSMSDHST

SEQ ID NO: 846530 - protein, 538 aa, Homo sapiens
MNLERLRKRVRQYLDQQQYQSALFWADKVASLSREEPQDIYWLAQCLYLTAQYHRAAHALRSRKLDKLYEACRYLAARCHYAAKEHQQALDVLDMEEPINKRLFEKYLKDESGFKDPSSDWEMSQSSIKSSICLLRGKIYDALDNRTLATYSYKEALKLDVYCFEAFDLLTSHHMLTAQEEKELLESLPLSKLCNEEQELLRFLFENKLKKYNKPSETVIPESVDGLQENLDVVVSLAERHYYNCDFKMCYKLTSVVMEKDPFHASCLPVHIGTLVELNKANELFYLSHKLVDLYPSNPVSWFAVGCYYLMVGHKNEHARRYLSKATTLEKTYGPAWIAYGHSFAVESEHDQAMAAYFTAAQLMKGCHLPMLYIGLEYGLTNNSKLAERFFSQALSIAPEDPFVMHEVGVVAFQNGEWKTAEKWFLDALEKIKAIGNEVTVDKWEPLLNNLGHVCRKLKKYAEALDYHRQALVLIPQNASTYSAIGYIHSLMGNFENAVDYFHTALGLRRDDTFSVTMLGHCIEMYIGDSEAYIGNLK

SEQ ID NO: 846531 - protein, 339 aa, Homo sapiens
MNGLEVAPPGLITNFSLATAEQCGQETPLENMLFASFYLLDFILALVGNTLALWLFIRDHKSGTPANVFLMHLAVADLSCVLVLPTRLVYHFSGNHWPFGEIACRLTGFLFYLNMYASIYFLTCISADRFLAIVHPVKSLKLRRPLYAHLACAFLWVVVAVAMAPLLVSPQTVQTNHTVVCLQLYREKASHHALVSLAVAFTFPFITTVTCYLLIIRSLRQGLRVEKRLKTKAVRMIAIVLAIFLVCFVPYHVNRSVYVLHYRSHGASCATQRILALANRITSCLTSLNGALDPIMYFFVAEKFRHALCNLLCGKRLKGPPPSFEGKTNESSLSAKSEL

SEQ ID NO: 846532 - protein, 339 aa, Homo sapiens; identical to SEQ ID NO: 846531

SEQ ID NO: 846533 - protein, 339 aa, Homo sapiens; identical to SEQ ID NO: 846531

SEQ ID NO: 846534 - protein, 339 aa, Homo sapiens; identical to SEQ ID NO: 846531

SEQ ID NO: 846535 - protein, 110 aa, Homo sapiens
MGSTQEGWQVCREGLWPSPLWPNTATSPAGILHKAQVSQLHITQLAAEAARVPVVVHGLDDAANDELTWKKTGPCWLGSTCLSPLRTLPSPVHLALRLLSAWPMGSLVGW

SEQ ID NO: 846536 - protein, 148 aa, Homo sapiens
MNGLEVAPPGLITNFSLATAEQCGQETPLENMLFASFYLLDFILALVGNTLALWLFIRDHKSGTPANVFLMHLAVADLSCVLVLPTRLVYHFSGNHWPFGEIACRLTGFLFYLNMYASIYFLTCISADRFLAIVHPVKSLKLRRPLSA

SEQ ID NO: 846537 - protein, 339 aa, Homo sapiens; identical to SEQ ID NO: 846531

SEQ ID NO: 846538 - protein, 367 aa, Homo sapiens
MSKRSWWAGSRKPPREMLKLSGSDSSQSMNGLEVAPPGLITNFSLATAEQCGQETPLENMLFASFYLLDFILALVGNTLALWLFIRDHKSGTPANVFLMHLAVADLSCVLVLPTRLVYHFSGNHWPFGEIACRLTGFLFYLNMYASIYFLTCISADRFLAIVHPVKSLKLRRPLYAHLACAFLWVVVAVAMAPLLVSPQTVQTNHTVVCLQLYREKASHHALVSLAVAFTFPFITTVTCYLLIIRSLRQGLRVEKRLKTKAVRMIAIVLAIFLVCFVPYHVNRSVYVLHYRSHGASCATQRILALANRITSCLTSLNGALDPIMYFFVAEKFRHALCNLLCGKRLKGPPPSFEGKTNESSLSAKSEL

SEQ ID NO: 846539 - protein, 339 aa, Homo sapiens; identical to SEQ ID NO: 846531

SEQ ID NO: 846540 - protein, 148 aa, Homo sapiens; identical to SEQ ID NO: 846536

SEQ ID NO: 846541 - protein, 69 aa, Homo sapiens
GQKDQNCILRFEFLSQVMSSSSLAGLFLGASGVKESRFIKNHQLQIIWMETLPNHRDVCYHPHTKQLGN

SEQ ID NO: 846542 - protein, 69 aa, Homo sapiens; identical to SEQ ID NO: 846541

SEQ ID NO: 846543 - protein, 162 aa, Homo sapiens
MATERSRSAMDSPVPASMFAPEPSSPGAARAAAAAARLHGGFDSDCSEDGEALNGEPELDLTSKLVLVSPTSEQYDSLLRQMWERMDEGCGETIYVIGQGSDGTEYGLSEADMEASYATVKSMAEQIEADVILLRERQEAGGRVRDYLVRKRVGDNDFLEVR

SEQ ID NO: 846544 - protein, 669 aa, Homo sapiens
MATERSRSAMDSPVPASMFAPEPSSPGAARAAAAAARLHGGFDSDCSEDGEALNGEPELDLTSKLVLVSPTSEQYDSLLRQMWERMDEGCGETIYVIGQGSDGTEYGLSEADMEASYATVKSMAEQIEADVILLRERQEAGGRVRDYLVRKRVGDNDFLEVRVAVVGNVDAGKSTLLGVLTHGELDNGRGFARQKLFRHKHEIESGRTSSVGNDILGFDSEGNVVNKPDSHGGSLEWTKICEKSTKVITFIDLAGHEKYLKTTVFGMTGHLPDFCMLMVGSNAGIVGMTKEHLGLALALNVPVFVVVTKIDMCPANILQETLKLLQRLLKSPGCRKIPVLVQSKDDVIVTASNFSSERMCPIFQISNVTGENLDLLKMFLNLLSPRTSYREEEPAEFQIDDTYSVPGVGTVVSGTTLRGLIKLNDTLLLGPDPLGNFLSIAVKSIHRKRMPVKEVRGGQTASFALKKIKRSSIRKGMVMVSPRLNPQASWEFEAEILVLHHPTTISPRYQAMVHCGSIRQTATILSMDKDCLRTGDKATVHFRFIKTPEYLHIDQRLVFREGRTKAVGTITKLLQTTNNSPMNSKPQQIKMQSTKKGPLTKRDEGGPSGGPAVGAPPPGDEASSVGAGQPAASSNLQPQPKPSSGGRRRGGQRHKVKSQGACVTPASGC

SEQ ID NO: 846545 - protein, 557 aa, Homo sapiens
MEASYATVKSMAEQIEADVILLRERQEAGGRVRDYLVRKRVGDNDFLEVRVAVVGNVDAGKSTLLGVLTHGELDNGRGFARQKLFRHKHEIESGRTSSVGNDILGFDSEGNVVNKPDSHGGSLEWTKICEKSTKVITFIDLAGHEKYLKTTVFGMTGHLPDFCMLMVGSNAGIVGMTKEHLGLALALNVPVFVVVTKIDMCPANILQETLKLLQRLLKSPGCRKIPVLVQSKDDVIVTASNFSSERMCPIFQISNVTGENLDLLKMFLNLLSPRTSYREEEPAEFQIDDTYSVPGVGTVVSGTTLRGLIKLNDTLLLGPDPLGNFLSIAVKSIHRKRMPVKEVRGGQTASFALKKIKRSSIRKGMVMVSPRLNPQASWEFEAEILVLHHPTTISPRYQAMVHCGSIRQTATILSMDKDCLRTGDKATVHFRFIKTPEYLHIDQRLVFREGRTKAVGTITKLLQTTNNSPMNSKPQQIKMQSTKKGPLTKRDEGGPSGGPAVGAPPPGDEASSVGAGQPAASSNLQPQPKPSSGGRRRGGQRHKVKSQGACVTPASGC

SEQ ID NO: 846546 - protein, 505 aa, Homo sapiens
GQGWIMHETRFWGFCRLECWPVGVGSGRRILLLAALVKSWSGRTSSVGNDILGFDSEGNVVNKPDSHGGSLEWTKICEKSTKVITFIDLAGHEKYLKTTVFGMTGHLPDFCMLMVGSNAGIVGMTKEHLGLALALNVPVFVVVTKIDMCPANILQETLKLLQRLLKSPGCRKIPVLVQSKDDVIVTASNFSSERMCPIFQISNVTGENLDLLKMFLNLLSPRTSYREEEPAEFQIDDTYSVPGVGTVVSGTTLRGLIKLNDTLLLGPDPLGNFLSIAVKSIHRKRMPVKEVRGGQTASFALKKIKRSSIRKGMVMVSPRLNPQASWEFEAEILVLHHPTTISPRYQAMVHCGSIRQTATILSMDKDCLRTGDKATVHFRFIKTPEYLHIDQRLVFREGRTKAVGTITKLLQTTNNSPMNSKPQQIKMQSTKKGPLTKRDEGGPSGGPAVGAPPPGDEASSVGAGQPAASSNLQPQPKPSSGGRRRGGQRHKVKSQGACVTPASGC

SEQ ID NO: 846547 - protein, 671 aa, Homo sapiens
MATERSRSAMDSPVPASMFAPEPSSPGAARAAAAAARLHGGFDSDCSEDGEALNGEPELDLTSKLVLVSPTSEQYDSLLRQMWERMDEGCGETIYVIGQGSDGTEYGLSEADMEASYATVKSMAEQIEADVILLRERQEAGGRVRDYLVRKRVGDNDFLEVRVAVVGNVDAGKSTLLGVLTHGELDNGRGFARQKLFRHKHEIESGRTSSVGNDILGFDSEGNVVNKPDSHGGSLEWTKICEKSTKVITFIDLAGHEKYLKTTVFGMTGHLPDFCMLMVGSNAGIVGMTKEHLGLALALNVPVFVVVTKIDMCPANILQETLKLLQRLLKSPGCRKIPVLVQSKDDVIVTASNFSSERMCPIFQISNVTGENLDLLKMFLNLLSPRTSYREEEPAEFQIDDTYSVPGVGTVVSGTTLRGLIKLNDTLLLGPDPLGNFLSIAVKSIHRKRMPVKEVRGGQTASFALKKIKRSSIRKGMVMVSPRLNPQASWEFEAEILVLHHPTTISPRYQAMVHCGSIRQTATILSMDKDCLRTGDKATVHFRFIKTPEYLHIDQRLVFREGRTKAVGTITKLLLADCWSPLLPSFQLFLVTTYPWPWTDQTSIQNKSLFQVDSVVLPAQPLQVEVLPRERSCSACPGAPGDSWEQGSAVRSPAFPVRQAWLPCSGSLTSW

SEQ ID NO: 846548 - protein, 669 aa, Homo sapiens; identical to SEQ ID NO: 846544

SEQ ID NO: 846549 - protein, 669 aa, Homo sapiens; identical to SEQ ID NO: 846544

SEQ ID NO: 846550 - protein, 638 aa, Homo sapiens
MLCLMERSVALSCFNLVCAQVFSQVERTPVPLQCWGRGVVAFVRWGSWLAGWQAGWSGLPLLLMSGLLSPDGTEYGLSEADMEASYATVKSMAEQIEADVILLRERQEAGGRVRDYLVRKRVGDNDFLEVRVAVVGNVDAGKSTLLGVLTHGELDNGRGFARQKLFRHKHEIESGRTSSVGNDILGFDSEGNVVNKPDSHGGSLEWTKICEKSTKVITFIDLAGHEKYLKTTVFGMTGHLPDFCMLMVGSNAGIVGMTKEHLGLALALNVPVFVVVTKIDMCPANILQETLKLLQRLLKSPGCRKIPVLVQSKDDVIVTASNFSSERMCPIFQISNVTGENLDLLKMFLNLLSPRTSYREEEPAEFQIDDTYSVPGVGTVVSGTTLRGLIKLNDTLLLGPDPLGNFLSIAVKSIHRKRMPVKEVRGGQTASFALKKIKRSSIRKGMVMVSPRLNPQASWEFEAEILVLHHPTTISPRYQAMVHCGSIRQTATILSMDKDCLRTGDKATVHFRFIKTPEYLHIDQRLVFREGRTKAVGTITKLLQTTNNSPMNSKPQQIKMQSTKKGPLTKRDEGGPSGGPAVGAPPPGDEASSVGAGQPAASSNLQPQPKPSSGGRRRGGQRHKVKSQGACVTPASGC

SEQ ID NO: 846551 - protein, 372 aa, Homo sapiens
TLSVGAGNQLRQQSPASASALQETLKLLQRLLKSPGCRKIPVLVQSKDDVIVTASNFSSERMCPIFQISNVTGENLDLLKMFLNLLSPRTSYREEEPAEFQIDDTYSVPGVGTVVSGTTLRGLIKLNDTLLLGPDPLGNFLSIAVKSIHRKRMPVKEVRGGQTASFALKKIKRSSIRKGMVMVSPRLNPQASWEFEAEILVLHHPTTISPRYQAMVHCGSIRQTATILSMDKDCLRTGDKATVHFRFIKTPEYLHIDQRLVFREGRTKAVGTITKLLQTTNNSPMNSKPQQIKMQSTKKGPLTKRDEGGPSGGPAVGAPPPGDEASSVGAGQPAASSNLQPQPKPSSGGRRRGGQRHKVKSQGACVTPASGC

SEQ ID NO: 846552 - protein, 113 aa, Homo sapiens
  misc_feature (4)..(4): Xaa can be any naturally occurring amino acid
LRQXRAGPGKRRIVSKGKPTSCLGIIGLSPSRALTLTLATNPKTAGGFPLGDNPAFAWAGPGCPQLSLICPAWSLPSPRFLLGLRHWLPEGGLGLLRIMFCSTSCWRGGGMFP

SEQ ID NO: 846553 - protein, 235 aa, Homo sapiens
MEQDDPVEALTELRERRLGALELLQAAAGSGLAAYAVWALLLQPGFRRVPLRLQVPYVGASARQVEHVLSLLRGRPGKTVDLGSGDGRIVLAAHRCGLRPAVGYELNPWLVALARLHAWRAGCAGSVCYRRKDLWKVSLRDCRNVSVFLAPSVLPLLEDKLRTELPAGARVVSGRFPLPTWQPVTAVGEGLDRVWAYDVPEGGQAGEAASSRIPIQAAPGPSSAPIPGGLISQAS

SEQ ID NO: 846554 - protein, 289 aa, Homo sapiens
MEQDDPVEALTELRERRLGALELLQAAAGSGLAAYAVWALLLQPGFRRVPLRLQVRGGARPGRGARLPLRVSRSGRGRGELRPAVWSVRAGLRAGRERPVDSRRHPVQVPYVGASARQVEHVLSLLRGRPGKTVDLGSGDGRIVLAAHRCGLRPAVGYELNPWLVALARLHAWRAGCAGSVCYRRKDLWKVSLRDCRNVSVFLAPSVLPLLEDKLRTELPAGARVVSGRFPLPTWQPVTAVGEGLDRVWAYDVPEGGQAGEAASSRIPIQAAPGPSSAPIPGGLISQAS

SEQ ID NO: 846555 - protein, 174 aa, Homo sapiens
MEQDDPVEALTELRERRLGALELLQAAAGSGLAAYAVWALLLQPGFRRVPLRLQVPYVGASARQVEHVLSLLRGRPGKTVDLGSGDGRIVLAAHRCGLRPAVGYELNPWLVALARLHAWRAGCAGSVCYRRKDLWKVSLRDCRNVSVFLAPSVVGAGLPAPLGSPSHTPGCLLL

SEQ ID NO: 846556 - protein, 199 aa, Homo sapiens
MEQDDPVEALTELRERRLGALELLQAAAGSGLAAYAVWALLLQPGFRRVPLRLQVRGGARPGRGARLPLRVSRSGRGRGELRPAVVVVRAGLRAGRERPVDSRRHPVQVPYVGASARQVEHVLSLLRGRPGKTVDLGSGDGRIVLAAHRCGLRPAVGYELNPWLVALARLHAWRAGCAGSVCYRRKDLWKVTWGSLATR

SEQ ID NO: 846557 - protein, 230 aa, Homo sapiens
MEQDDPVEALTELRERRLGALELLQAAAGSGLAAYAVWALLLQPGFRRVPLRLQVRGGARPGRGARLPLRVSRSGRGRGELRPAVVVVRAGLRAGRERPVDSRRHPVQVPYVGASARQVEHVLSLLRGRPGKTVDLGSGDGRIVSACVWVFAAPPPPTCWRAPLPTSWFPHSRCPQVLAAHRCGLRPAVGYELNPWLVALARLHAWRAGCAGSVCYRRKDLWKVTWGSLA

SEQ ID NO: 846558 - protein, 218 aa, Homo sapiens
MEQDDPVEALTELRERRLGALELLQAAAGSGLAAYAVWALLLQPGFRRVPLRLQVPYVGASARQVEHVLSLLRGRPGKTVDLGSGDGRIVLAAHRCGLRPAVGYELNPWLVALARLHAWRAGCAGSVCYRRKDLWKLPLLEDKLRTELPAGARVVSGRFPLPTWQPVTAVGEGLDRVWAYDVPEGGQAGEAASSRIPIQAAPGPSSAPIPGGLISQAS

SEQ ID NO: 846559 - protein, 145 aa, Homo sapiens [sequence omitted]

SEQ ID NO: 846560 - protein, 145 aa, Homo sapiens [sequence omitted]

SEQ ID NO: 846561 - protein, 320 aa, Homo sapiens
SITGPVACIGAWHPARVAFSVARAGQKGYHHRTEINKKIYKIGQGYLIKDGKLIKNNASTVNELMAVMSHRKVLAFADMGPSGFLPRKRRQEAVGGKVKSVSAKDDAMPLRVSTSQPSWDDKAGMIHIVRGKLDRPGSKVNKKEVVEAVTCWVERTTMDGWWGWMGVCGKATRLAVRRLVEDLSYKVMYISDECKRRFYKTLDKSKKKGLTKVLEEMEDEDGKKQLGKDFSEACKKYAQVIRVMAHNQMCGPPGAKEGHLMEIPGTEAGAENGRAGELSRGPGPRWRERRRPGARAGPRGHGAKRAQHRARGWGTRPARE

SEQ ID NO: 846562 - protein, 130 aa, Homo sapiens
MPAAALPRQEAEGPMSGSGELSVRHHAIKFSVARAGQKGYHHRTEINKKIYKIGQGYLIKDGKLIKNNASTDYDLSDKSINPLGGFVHYGEVTNDFVMLKGCVVGTKKRVLTLRKSLLVQTKPPRGLMLL

SEQ ID NO: 846563 - protein, 169 aa, Homo sapiens
MPAAALPRQEAEGPMSGSGELSVRHHAIKFSVARAGQKGYHHRTEINKKIYKIGQGYLIKDGKLIKNNASTDYDLSDKSINPLGGFVHYGEVTNDFVMLKGCVVGTKKRVLTLRKSLLVQTKRRALEKIDLKFIDTTSKFGHGRFQTMEEKKAFMGPLKKDRIAKEEGA

SEQ ID NO: 846564 - protein, 158 aa, Homo sapiens
SITGPVACIGAWHPARVAFSVARAGQKGYHHRTEINKKIYKIGQGYLIKDGKLIKNNASTDYDLSDKSINPLGGFVHYGEVTNDFVMLKGCVVGTKKRVLTLRKSLLVQTKRRALEKIDLKFIDTTSKFGHGRFQTMEEKKAFMGPLKKDRIAKEEGA

SEQ ID NO: 846565 - protein, 169 aa, Homo sapiens; identical to SEQ ID NO: 846563

SEQ ID NO: 846566 - protein, 129 aa, Homo sapiens
MPAAALPRQEAEGPMSGSGELSVRHHAIKFSVARAGQKGYHHRTEINKKIYKIGQGYLIKDGKLIKNNASTDYDLSDKSINPLGGFVHYGEVTNDFVMLKGCVVGTKKRVQVWDFQVQVWDYQVQVWDY

SEQ ID NO: 846567 - protein, 160 aa, Homo sapiens
  misc_feature (10)..(10): Xaa can be any naturally occurring amino acid
  misc_feature (14)..(14): Xaa can be any naturally occurring amino acid
SQTWVPRLPXSEAXSRHRGKVKSFPKDDPSKPVHLTAFLGYKAGMTHIVREVTGLIKNNASTDYDLSDKSINPLGGFVHYGEVTNDFVMLKGCVVGTKKRVLTLRKSLLVQTKRRALEKIDLKFIDTTSKFGHGRFQTMEEKKAFMGPLKKDRIAKEEGA

SEQ ID NO: 846568 - protein, 183 aa, Homo sapiens
RGGAGVTTGVEGEARVPRSPGRPTAASEPRGERAALGAGAGVRPGSVPAHRVRAAERARLVSPGRAQEPDLGFAGWGAGLGGSGQAPPPLTPAPPADPRVAAGRVAQPWRPPPPHLHLHTLRRKPWSQVDRGMPCSAPSPPGLHPAMRASALLLMPFLQRRHRVPHAPAQAWFRLHGEEVKGS

SEQ ID NO: 846569 - protein, 344 aa, Homo sapiens
RGGAGVTTGVEGEARVPRSPGRPTAASEPRGERAALGAGAGVRPGSVPAHRVRAAERARLVSPGRAQEPDLGFAGWGAGLGGSGQAPPPLTPAPPADPRVAAGRVAQPWRPPPPHLHLRPAPCAPGQRLLPASLMALPQMCDGSHLASTLRYCMTVSGTVVLVAGTLCFAWWSEGDATAQPGQLAPPTEYPVPEGPSPLLRSVSFVCCGAGGLLLLIGLLWSVKASIPGPPRWDPYHLSRDLYYLTVESSEKESCRTPKVVDIPTYEEAVSFPVAEGPPTPPAYPTEEALEPSGSRDALLSTQPAWPPPSYESISLALDAVSAETTPSATRSCSGLVQTARGGS

SEQ ID NO: 846570 - protein, 121 aa, Homo sapiens
  misc_feature (5)..(5): Xaa can be any naturally occurring amino acid
  misc_feature (28)..(28): Xaa can be any naturally occurring amino acid
LLKLXAKWFLDTNKSWKLKACSDFFFNXPPRYRTPKVVDIPTYEEAVSFPVAEGPPTPPAYPTEEALEPSGSRDALLSTQPAWPPPSYESISLALDAVSAETTPSATRSCSGLVQTARGGS

SEQ ID NO: 846571 - protein, 118 aa, Homo sapiens [sequence omitted]

SEQ ID NO: 846572 - protein, 212 aa, Homo sapiens
MKRQLRRLRELHLYSTWKKYQEAMKTSLGVPQRERDEGSLGKPLCPPEILSETLPGSVKKRVCFPSEDHLEEFIAEHLPEASNQSLLTVAHADAGTQTNGDLEDLEEHGPGQTVSEEATEVHMMLTGDPDTLRELLIRACTLSELSKTQPANRATDPTRERGRTILSGTYNNVGEPRTEPEKEHVAKAKTEIKTKRTGGTPVERGTQAERKE

SEQ ID NO: 846573 - protein, 144 aa, Homo sapiens
MVDKDTERDIEMKRQLRRLRELHLYSTWKKYQEAMKTSLGVPQRGDLEDLEEHVPGQTVSEEATGVHMMQVDPATLAKKLEDSTITGSHQQMSASPSSAPAEEATEKTKVEEEVKTRKPKKKTRKPSKKSRWNVLKCWDIFNIF

SEQ ID NO: 846574 - protein, 144 aa, Homo sapiens; identical to SEQ ID NO: 846573

SEQ ID NO: 846575 - protein, 144 aa, Homo sapiens; identical to SEQ ID NO: 846573

SEQ ID NO: 846576 - protein, 342 aa, Homo sapiens
MELKKKILKTYNPDYDEDLVQEASSEDVLGVHMVDKDTERDIEMKRQLRRLRELHLYSTWKKYQEAMKTSLGVPQRERDEGSLGKPLCPPEILSETLPGSVKKRVCFPSEDHLEEFIAEHLPEASNQSLLTVAHADAGTQTNGDLEDLEEHGPGQTVSEEATEVHMMEGDPDTLAELLIRDVLQELSSYNGEEEDPEEVKTSLGVPQRGDLEDLEEHVPGQTVSEEATGVHMMQVDPATLAKSDLEDLEEHVPEQTVSEEATGVHMMQVDPATLAKQLEDSTITGSHQQMSASPSSAPAEEATEKTKVEEEVKTRKPKKKTRKPSKKSRWNVLKCWDIFNIF

SEQ ID NO: 846577 - protein, 387 aa, Homo sapiens
MGCAYSCCLEVCCGEDEIVYPRMPGESTVCHREREKPITYHWYHWHPGHIYPRIASMEDYDEDLVQEASSEDVLGVHMVDKDTERDIEMKRQLRRLRELHLYSTWKKYQEAMKTSLGVPQRERDEGSLGKPLCPPEILSETLPGSVKKRVCFPSEDHLEEFIAEHLPEASNQSLLTVAHADAGTQTNGDLEDLEEHGPGQTVSEEATEVHMMEGDPDTLAELLIRDVLQELSSYNGEEEDPEEVKTSLGVPQRGDLEDLEEHVPGQTVSEEATGVHMMQVDPATLAKSDLEDLEEHVPEQTVSEEATGVHMMQVDPATLAKQLEDSTITGSHQQMSASPSSAPAEEATEKTKVEEEVKTRKPKKKTRKPSKKSRWNVLKCWDIFNIF

SEQ ID NO: 846578 - protein, 144 aa, Homo sapiens; identical to SEQ ID NO: 846573

SEQ ID NO: 846579 - protein, 144 aa, Homo sapiens; identical to SEQ ID NO: 846573

SEQ ID NO: 846580 - protein, 113 aa, Homo sapiens
MASTLTNCVSTGIFLKRNSFFLRRIWNCQRKTIENVAQKSCAFPGMSSRYRGHCLNHCLPSGFLTSTSEDLCTQETAWSDPHSVFFFSRCRWTQPHWQSVRILGSSLCLGVKS

SEQ ID NO: 846581 - protein, 326 aa, Homo sapiens
MEKDGLCRADQQYECVAEIGEGAYGKVFKARDLKNGGRFVALKRVRVQTGEEGMPLSTIREVAVLRHLETFEHPNVVRLFDVCTVSRTDRETKLTLVFEHVDQDLTTYLDKVPEPGVPTETIKDMMFQLLRGLDFLHSHRVVHRDLKPQNILVTSSGQIKLADFGLARIYSFQMALTSVVVTLWYRAPEVLLQSSYATPVDLWSVGCIFAEMFRRKPLFRGSSDVDQLGKILDVIGLPGEEDWPRDVALPRQAFHSKSAQPIEKFVTDIDELGKDLLLKCLTFNPAKRISAYSALSHPYFQDLERCKENLDSHLPPSQNTSELNTA

SEQ ID NO: 846582 - protein, 326 aa, Homo sapiens; identical to SEQ ID NO: 846581

SEQ ID NO: 846583 - protein, 124 aa, Homo sapiens
MEKDGLCRADQQYECVAEIGEGAYGKVFKARDLKNGGRFVALKRVRVQTGEEGMPLSTIREVAVLRHLETFEHPNVVRLSQGAAPSPSGASRARGGPSRESSGPERCGAEGDWGGPARPVGLTE

SEQ ID NO: 846584 - protein, 326 aa, Homo sapiens; identical to SEQ ID NO: 846581

SEQ ID NO: 846585 - protein, 216 aa, Homo sapiens
MEKDGLCRADQQYECVAEIGEGAYGKVFKARDLKNGGRFVALKRVRVQTGEEGMPLSTIREVAVLRHLETFEHPNVVRLFDVCTVSRTDRETKLTLVFEHVDQDLTTYLDKVPEPGVPTETIKDMMFQLLRGLDFLHSHRVVHRDLKPQNILVTSSGQIKLADFGLARIYSFQMALTSVVVTLWYRAPEVLLQSSYATPVDLWSVGCIFAEMFRRK

SEQ ID NO: 846586 - protein, 1077 aa, Homo sapiens
MDLHMMNCELLATCSALGYLEGDTYHKEPDCLESVKDLIRYLRHEDETRDVRQQLGAAQILQSDLLPILTQHHQDKPLFDAVIRLMVNLTQPALLCFGNLPKEPSFRHHFLQVLTYLQAYKEAFASEKAFGVLSETLYELLQLGWEERQEEDNLLIERILLLVRNILHVPADLDQEKKIDDDASAHDQLLWAIHLSGLDDLLLFLASSSAEEQWSLHVLEIVSLMFRDQNPEQLAGVGQGRLAQERSADFAELEVLRQREMAEKKTRALQRGNRHSRFGGSYIVQGLKSIGERDLIFHKGLHNLRNYSSDLGKQPKKVPKRRQAARELSIQRRSALNVRLFLRDFCSEFLENCYNRLMGSVKDHLLREKAQQHDETYYMWALAFFMAFNRAASFRPGLVSETLSVRTFHFIEQNLTNYYEMMLTDRKEAASWARRMHLALKAYQELLATVNEMDLSPDEAVRESSRIIKNNIFYVMEYRELFLALFRKFDERCQPRSFLRDLVETTHLFLKMLERFCRSRGNLVVQNKQKKKKEEEEEEEEEEEEEELQVVQVSEKEFNFLDYLKRFACSTVVRAYVLLLRSYQQNSAHTNHCIVKMLHRLAHDLKMEALLFQLSVFCLFNRLLSDPAAGAYKELVTFAKYILGKFFALAAVNQKAFVELLFWKNTAVVREMTEGYGSLDDRSSSRRAPTWSPEEEAHLRELYLANKDVEGQDVVEAILAHLNTVPRTRKQIIHHLVQMGLADSVKDFQRKGTHIVLWTGDQELELQRLFEEFRDSDDVLGHIMKNITAKRSRARIVDKLLALGLVAERRELYKKRQKKLASSILPNGAESLKDFCQEDLEEEENLPEEDSEEEEEGGSEAEQVQGSLVLSNENLGQSLHQEGFSIPLLWLQNCLIRAADDREEDGCSQAVPLVPLTEENEEAMENEQFQQLLRKLGVRPPASGQETFWRIPAKLSPTQLRRAAASLSQPEEEQKLQPELQPKVPGEQGSDEEHCKEHRAQALRALLLAHKKKAGLASPEEEDAVGKEPLKAAPKKRQLLDSDEEQEEDEGRNRAPELGAPGIQKKKRYQIEDDEDD

SEQ ID NO: 846587 - protein, 1208 aa, Homo sapiens
MDLHMMNCELLATCSALGYLEGDTYHKEPDCLESVKDLIRYLRHEDETRDVRQQLGAAQILQSDLLPILTQHHQDKPLFDAVIRLMVNLTQPALLCFGNLPKEPSFRHHFLQVLTYLQAYKEAFASEKAFGVLSETLYELLQLGWEERQEEDNLLIERILLLVRNILHVPADLDQEKKIDDDASAHDQLLWAIHLSGLDDLLLFLASSSAEEQWSLHVLEIVSLMFRDQNPEQLAGVGQGRLAQERSADFAELEVLRQREMAEKKTRALQRGNRHSRFGGSYIVQGLKSIGERDLIFHKGLHNLRNYSSDLGKQPKKVPKRRQAARELSIQRRSALNVRLFLRDFCSEFLENCYNRLMGSVKDHLLREKAQQHDETYYMWALAFFMAFNRAASFRPGLVSETLSVRTFHFIEQNLTNYYEMMLTDRKEAASWARRMHLALKAYQELLATVNEMDLSPDEAVRESSRIIKNNIFYVMEYRELFLALFRKFDERCQPRSFLRDLVETTHLFLKMLERFCRSRGNLVVQNKQKKRRKKKKKVLDQAIVSGNVPSSPEEVEAVWPALAEQLQCCAQNSELSMDSVVPFDAASEVPVEEQRAEAMVRIQDCLLAGQAPQALTLLRSAREVWPEGDVFGSQDISPEEEIQLLKQILSAPLPRQQGPEERGAEEEEEEEEEEEEELQVVQVSEKEFNFLDYLKRFACSTVVRAYVLLLRSYQQNSAHTNHCIVKMLHRLAHDLKMEALLFQLSVFCLFNRLLSDPAAGAYKELVTFAKYILGKFFALAAVNQKAFVELLFWKNTAVVREMTEGYGSLDDRSSSRRAPTWSPEEEAHLRELYLANKDVEGQDVVEAILAHLNTVPRTRKQIIHHLVQMGLADSVKDFQRKGTHIVLWTGDQELELQRLFEEFRDSDDVLGHIMKNITAKRSRARIVDKLLALGLVAERRELYKKRQKKLASSILPNGAESLKDFCQEDLEEEENLPEEDSEEEEEGGSEAEQVQGSLVLSNENLGQSLHQEGFSIPLLWLQNCLIRAADDREEDGCSQAVPLVPLTEENEEAMENEQFQQLLRKLGVRPPASGQETFWRIPAKLSPTQLRRAAASLSQPEEEQKLQPELQPKVPGEQGSDEEHCKEHRAQALRALLLAHKKKAGLASPEEEDAVGKEPLKAAPKKRQLLDSDEEQEEDEGRNRAPELGAPGIQKKKRYQIEDDEDD

SEQ ID NO: 846588 - protein, 1157 aa, Homo sapiens
MDLHMMNCELLATCSALGYLEGDTYHKEPDCLESVKDLIRYLRHEDETRDVRQQLGAAQILQSDLLPILTQHHQDKPLFDAVIRLMVNLTQPALLCFGNLPKEPSFRHHFLQVLTYLQAYKEAFASEKAFGVLSETLYELLQLGWEERQEEDNLLIERILLLVRNILHVPADLDQEKKIDDDASAHDQLLWAIHLSGLDDLLLFLASSSAEEQWSLHVLEIVSLMFRDQNPEQLAGVGQGRLAQERSADFAELEVLRQREMAEKKTRALQRGNRHSRFGGSYIVQGLKSIGERDLIFHKGLHNLRNYSSDLGKQPKKVPKRRQAARELSIQRRSALNVRLFLRDFCSEFLENCYNRLMGSVKDHLLREKAQQHDETYYMWALAFFMAFNRAASFRPGLVSETLSVRTFHFIEQNLTNYYEMMLTDRKEAASWARRMHLALKAYQELLATVNEMDLSPDEAVRESSRIIKNNIFYVMEYRELFLALFRKFDERCQPRSFLRDLVETTHLFLKMLERFCRSRGNLVVQNKQKKRRKKKKKVLDQAIVSGNVPSSPEEVEAVWPALAEQLQCCAQNSELSMDSVVPFDAASEVPVEEQRAEAMVRIQDCLLAGQAPQALTLLRSAREVWPEGDVFGSQDISPEEEIQLLKQILSAPLPRQQGPEERGAEEEEEEEEEEEEELQVVQVSEKEFNFLDYLKRFACSTVVRAYVLLLRSYQQNSAHTNHCIVKMLHRLAHDLKMEALLFQLSVFCLFNRLLSDPAAGAYKELVTFAKYILGKFFALAAVNQKAFVELLFWKNTAVVREMTEGYGSLDDRSSSRRAPTWSPEEEAHLRELYLANKDVEGQDVVEAILAHLNTVPRTRKQIIHHLVQMGLADSVKDFQRKGTHIVLWTGDQELELQRLFEEFRDSDDVLGHIMKNITAKRSRARIVDKLLALGLVAERRELYKKRQKKLASSILPNGAESLKDFCQEDLEEEENLPEEDSEEEEEGGSEAEQVQGSLVLSNENLGQSLHQEGFSIPLLWLQNCLIRAADDREEDGCSQAVPLVPLTEENEEAMENEQFQQLLRKLGVRPPASGQETFWRIPAKLSPTQLRRAAASLSQPEEEQKLQPELQPKVPGEQGSDEEHCKEHRAQALRALLLAHKKKAGLASPEGNSATA

SEQ ID NO: 846589 - protein, 1208 aa, Homo sapiens; identical to SEQ ID NO: 846587

SEQ ID NO: 846590 - protein, 1280 aa, Homo sapiens
MDLHMMNCELLATCSALGYLEGDTYHKEPDCLESVKDLIRYLRHEDETRDVRQQLGAAQILQSDLLPILTQHHQDKPLFDAVIRLMVNLTQPALLCFGNLPKEPSFRHHFLQVLTYLQAYKEAFASEKAFGVLSETLYELLQLGWEERQEEDNLLIERILLLVRNILHVPADLDQEKKIDDDASAHDQLLWAIHLSGLDDLLLFLASSSAEEQWSLHVLEIVSLMFRDQNPEQLAGVGQGRLAQERSADFAELEVLRQREMAEKKTRALQRGNRHSRFGGSYIVQGLKSIGERDLIFHKGLHNLRNYSSDLGKQPKKVPKRRQAARELSIQRRSALNVRLFLRDFCSEFLENCYNRLMGSVKDHLLREKAQQHDETYYMWALAFFMAFNRAASFRPGLVSETLSVRTFHFIEQNLTNYYEMMLTDRKEAASWARRMHLALKAYQELLATVNEMDLSPDEAVRESSRIIKNNIFYVMEYRELFLALFRKFDERCQPRSFLRDLVETTHLFLKMLERFCRSRGNLVVQNKQKKRRKKKKKVLDQAIVSGNVPSSPEEVEAVWPALAEQLQCCAQNSELSMDSVVPFDAASEVPVEEQRAEAMVRIQDCLLAGQAPQALTLLRSAREVWPEGDVFGSQDISPEEEIQLLKQILSAPLPRQQGPEERGAEEEEEEEEEEEEELQVVQVSEKEFNFLDYLKRFACSTVVRAYVLLLRSYQQNSAHTNHCIVKMLHRLAHDLKMEALLFQLSVFCLFNRLLSDPAAGAYKELVTFAKYILGKFFALAAVNQKAFVELLFWKNTAVVREMTEGYGSLDDRSSSRRAPTWSPEEEAHLRELYLANKDVEGQDVVEAILAHLNTVPRTRKQIIHHLVQMGLADSVKDFQRKGTHIVLWTGDQELELQRLFEEFRDSDDVLGHIMKNITAKRSRARIVDKLLALGLVAERRELYKKRQKKLASSILEQSDPSSAGMGSLPLKWSLGAVHLDSSCLRLFCPGPSERAGAGGCGGQERGDSTKFLVLPSFSFPQPPMNFEPNGAESLKDFCQEDLEEEENLPEEDSEEEEEGGSEAEQVQGSLVLSNENLGQSLHQEGFSIPLLWLQNCLIRAADDREEDGCSQAVPLVPLTEENEEAMENEQFQQLLRKLGVRPPASGQETFWRIPAKLSPTQLRRAAASLSQPEEEQKLQPELQPKVPGEQGSDEEHCKEHRAQALRALLLAHKKKAGLASPEEEDAVGKEPLKAAPKKRQLLDSDEEQEEDEGRNRAPELGAPGIQKKKRYQIEDDEDD

SEQ ID NO: 846591 - protein, 1209 aa, Homo sapiens
MDLHMMNCELLATCSALGYLEGDTYHKEPDCLESVKDLIRYLRHEDETRDVRQQLGAAQILQSDLLPILTQHHQDKPLFDAVIRLMVNLTQPALLCFGNLPKEPSFRHHFLQVLTYLQAYKEAFASEKAFGVLSETLYELLQLGWEERQEEDNLLIERILLLVRNILHVPADLDQEKKIDDDASAHDQLLWAIHLSGLDDLLLFLASSSAEEQWSLHVLEIVSLMFRDQNPEQLAGVGQGRLAQERSADFAELEVLRQREMAEKKTRALQRGNRHSRFGGSYIVQGLKSIGERDLIFHKGLHNLRNYSSDLGKQPKKVPKRRQAARELSIQRRSALNVRLFLRDFCSEFLENCYNRLMGSVKDHLLREKAQQHDETYYMWALAFFMAFNRAASFRPGLVSETLSVRTFHFIEQNLTNYYEMMLTDRKEAASWARRMHLALKAYQELLATVNEMDLSPDEAVRESSRIIKNNIFYVMEYRELFLALFRKFDERCQPRSFLRDLVETTHLFLKMLERFCRSRGNLVVQNKQKKRRKKKKKVLDQAIVSGNVPSSPEEVEAVWPALAEQLQCCAQNSELSMDSVVPFDAASEVPVEEQRAEAMVRIQDCLLAGQAPQALTLLRSAREVWPEGDVFGSQDISPEEEIQLLKQILSAPLPRQQGPEERGAEEEEEEEEEEEEELQVVQVSEKEFNFLDYLKRFACSTVVRAYVLLLRSYQQNSAHTNHCIVKMLHRLAHDLKMEALLFQLSVFCLFNRLLSDPAAGAYKELVTFAKYILGKFFALAAVNQKAFVELLFWKNTAVVREMTEGYGSLDDRSSSRRAPTWSPEEEAHLRELYLANKDVEGQDVVEAILAHLNTVPRTRKQIIHHLVQMGLADSVKDFQRKGTHIVLWTGDQELELQRLFEEFRDSDDVLGHIMKNITAKRSRARIVDKLLALGLVAERRELYKKRQKKLASSILPNGAESLKDFCQEDLEEEENLPEEDSEEEEEGGSEAEQVQGSLVLSNENLGQSLHQEGFSIPLLWLQNCLIRAADDREEDGCSQAVPLVPLTEENEEAMENEQFQQLLRKLGVRPPASGQETFWRIPAKLSPTQLRRAAASLSQPEEEQKLQPELQPKVPGEQGSDEEHCKEHRAQALRALLLAHKKKAGLASPEEEDAVGKEPLKAAPKKRQLLDSDEEQEEDEGRNRGREFDGTFFFFSNPEDKLYHVLTP

SEQ ID NO: 846592 - protein, 558 aa, Homo sapiens
MYRYLGEALLLSRAGPAALGSASADSAALLGWARGQPAAAPQPGLALAARRHYSEAVADREDDPNFFKMVEGFFDRGASIVEDKLVEDLRTRESEEQKRNRVRGILRIIKPCNHVLSLSFPIRRDDGSWEVIEGYRAQHSQHRTPCKGGIRYSTDVSVDEVKALASLMTYKCAVVDVPFGGAKAGVKINPKNYTDNELEKITRRFTMELAKKGFIGPGIDVPAPDMSTGEREMSWIADTYASTIGHYDINAHACVTGKPISQGGIHGRISATGRGVFHGIENFINEASYMSILGMTPGFGDKTFVVQGFGNVGLHSMRYLHRFGAKCIAVGESDGSIWNPDGIDPKELEDFKLQHGSILGFPKAKPYEGSILEADCDILIPAASEKQLTKSNAPRVKAKIIAEGANGPTTPEADKIFLERNIMVIPDLYLNAGGVTVSYFEWLKNLNHVSYGRLTFKYERDSNYHLLMSVQESLERKFGKHGGTIPIVPTAEFQDRISGASEKDIVHSGLAYTMERSARQIMRTAMKYNLGLDLRTAAYVNAIEKVFKVYNEAGVTFT

SEQ ID NO: 846593 - protein, 269 aa, Homo sapiens
MSILGMTPGFGDKTFVVQGFGNVGLHSMRYLHRFGAKCIAVGESDGSIWNPDGIDPKELEDFKLQHGSILGFPKAKPYEGSILEADCDILIPAASEKQLTKSNAPRVKAKIIAEGANGPTTPEADKIFLERNIMVIPDLYLNAGGVTVSYFEWLKNLNHVSYGRLTFKYERDSNYHLLMSVQESLERKFGKHGGTIPIVPTAEFQDRISGASEKDIVHSGLAYTMERSARQIMRTAMKYNLGLDLRTAAYVNAIEKVFKVYNEAGVTFT

SEQ ID NO: 846594 - protein, 269 aa, Homo sapiens; identical to SEQ ID NO: 846593

SEQ ID NO: 846595 - protein, 290 aa, Homo sapiens
NVLSPNPGVIPKMLMYTCFSMMSILGMTPGFGDKTFVVQGFGNVGLHSMRYLHRFGAKCIAVGESDGSIWNPDGIDPKELEDFKLQHGSILGFPKAKPYEGSILEADCDILIPAASEKQLTKSNAPRVKAKIIAEGANGPTTPEADKIFLERNIMVIPDLYLNAGGVTVSYFEWLKNLNHVSYGRLTFKYERDSNYHLLMSVQESLERKFGKHGGTIPIVPTAEFQDRISGASEKDIVHSGLAYTMERSARQIMRTAMKYNLGLDLRTAAYVNAIEKVFKVYNEAGVTFT

SEQ ID NO: 846596 - protein, 374 aa, Homo sapiens
MYRYLGEALLLSRAGPAALGSASADSAALLGWARGQPAAAPQPGLALAARRHYSEAVADREDDPNFFKMVEGFFDRGASIVEDKLVEDLRTRESEEQKRNRVRGILRIIKPCNHVLSLSFPIRRDDGSWEVIEGYRAQHSQHRTPCKGGIRYSTDVSVDEVKALASLMTYKCAVVDVPFGGAKAGVKINPKNYTDNELEKITRRFTMELAKKGFIGPGIDVPAPDMSTGEREMSWIADTYASTIGHYDINAHACVTGKPISQGGIHGRISATGRGVFHGIENFINEASYMSILGMTPGFGDKTFVVQGFGNVGLHSMRYLHRFGAKCIAVGESDGSIWNPDGIDPKELEDFKLVLIHFYSIDTKYKYLKLWCSY

SEQ ID NO: 846597 - protein, 558 aa, Homo sapiens; identical to SEQ ID NO: 846592

SEQ ID NO: 846598 - protein, 288 aa, Homo sapiens
MGNCSSQGFGNVGLHSMRYLHRFGAKCIAVGESDGSIWNPDGIDPKELEDFKLVLIHFYSIDTKYKYLKLLVQLLIVIFNQWQQHGSILGFPKAKPYEGSILEADCDILIPAASEKQLTKSNAPRVKAKIIAEGANGPTTPEADKIFLERNIMVIPDLYLNAGGVTVSYFEWLKNLNHVSYGRLTFKYERDSNYHLLMSVQESLERKFGKHGGTIPIVPTAEFQDRISGASEKDIVHSGLAYTMERSARQIMRTAMKYNLGLDLRTAAYVNAIEKVFKVYNEAGVTFT

SEQ ID NO: 846599 - protein, 558 aa, Homo sapiens; identical to SEQ ID NO: 846592

SEQ ID NO: 846600 - protein, 558 aa, Homo sapiens; identical to SEQ ID NO: 846592

SEQ ID NO: 846601 - protein, 540 aa, Homo sapiens
MYRYLGEALLLSRAGPAALGSASADSAALLGWARGQPAAAPQPGLALAARRHYSEAVADREDDPNFFKMVEGFFDRGASIVEDKLVEDLRTRESEEQKRNRVRGILRIIKPCNHVLSLSFPIRRDDGSWEVIEGYRAQHSQHRTPCKGGIRYSTDVSVDEVKALASLMTYKCAVVDVPFGGAKAGVKINPKNYTDNELEKITRRFTMELAKKGFIGPGIDVPAPDMSTGEREMSWIADTYASTIGHYDINAHACVTGKPISQGGIHGRISATGRGVFHGIENFINEASYMSILGMTPGFGDKTFVVQGFGNVGLHSMRYLHRFGAKCIAVGESDGSIWNPDGIDPKELEDFKLQHGSILGFPKAKPYEGSILEADCDILIPAASEKQLTKSNAPRVKAKIIAEGANGPTTPEADKIFLERNIMVIPDLYLNAGGVTVSYFEWLKNLNHVSYGRLTFKYERDSNYHLLMSVQESLERDRISGASEKDIVHSGLAYTMERSARQIMRTAMKYNLGLDLRTAAYVNAIEKVFKVYNEAGVTFT

SEQ ID NO: 846602 - protein, 558 aa, Homo sapiens; identical to SEQ ID NO: 846592

SEQ ID NO: 846603 - protein, 571 aa, Homo sapiens
MYRYLGEALLLSRAGPAALGSASADSAALLGWARGQPAAAPQPGLALAARRHYSEAVADREDDPNFFKMVEGFFDRGASIVEDKLVEDLRTRESEEQKRNRVRGILRIIKPCNHVLSLSFPIRRDDGSWEVIEGYRAQHSQHRTPCKGGIRYSTDVSVDEVKALASLMTYKCAVVDVPFGGAKAGVKINPKNYTDNELEKITRRFTMELAKKGFIGPGIDVPAPDMSTGEREMSWIADTYASTIGHYDINAHACVTGKPISQGGIHGRISATGRGVFHGIENFINEASYMSILGMTPGFGDKTFVVQGFGNVGLHSMRYLHRFGAKCIAVGESDGSIWNPDGIDPKELEDFKLQHGSILGFPKAKPYEGSILEADCDILIPAASEKQLTKSNAPRVKAKIIAEGANGPTTPEADKIFLERNIMVIPDLYLNAGGVTVSYFEWLKNLNHVSYGRLTFKYERDSNYHLLMSVQESLERKFGKHGGTIPIVPTAEFQDRISGASEKDIVHSGLAYTMERSARQIMRTAMKYNLGLDLRTAAYVNAIEKVFKVYKLSVKVEITYTREPFWYFAFK

SEQ ID NO: 846604 - protein, 528 aa, Homo sapiens
MYRYLGEALLLSRAGPAALGSASADSAALLGWARGQPAAAPQPGLALAARRHYSEAVADREDDPNFFKMVEGFFDRGASIVEDKLVEDLRTRESEEQKRNRVRGILRIIKPCNHVLSLSFPIRRDDGSWEVIEGYRAQHSQHRTPCKGGIRYSTDVSVDEVKALASLMTYKCAVVDVPFGGAKAGVKINPKNYTDNELEKITRRFTMELAKKGFIGPGIDVPAPDMSTGEREMSWIADTYASTIGHYDINAHACVTGKPISQGGIHGRISATGRGVFHGIENFINEASYMSILGMTPGFGDKTFVVQGFGNVGLHSMRYLHRFGAKCIAVGESDGSIWNPDGIDPKELEDFKLQHGSILGFPKAKPYEGSILEADCDILIPAASEKQLTKSNAPRVKAKIIAEGANGPTTPEADKIFLERNIMVIPDLYLNAGGVTVSYFEWLKNLNHVSYGRLTFKYERDSNYHLLMSVQESLERKFGKHGGTIPIVPTAEFQDRISVSVVTPQLYFTHAPCSFLQTELVRWISSAA

SEQ ID NO: 846605 - protein, 346 aa, Homo sapiens
MYRYLGEALLLSRAGPAALGSASADSAALLGWARGQPAAAPQPGLALAARRHYSEAVADREDDPNFFKMVEGFFDRGASIVEDKLVEDLRTRESEEQKRNRVRGILRIIKPCNHVLSLSFPIRRDDGSWEVIEGYRAQHSQHRTPCKGGIRYSTDVSVDEVKALASLMTYKCAVVDVPFGGAKAGVKINPKNYTDNELEKITRRFTMELAKKGFIGPGIDVPAPDMSTGEREMSWIADTYASTIGHYDINAHACVTGKPISQGGIHGRISATGRGVFHGIENFINEASYMSILGMTPGFGDKTFVVQGFGNVGLHSMRYLHRFGAKCIAVGESDGSIWNPASLTVG

SEQ ID NO: 846606 - protein, 333 aa, Homo sapiens
MSTGEREMSWIADTYASTIGHYDINAHACVTGKPISQGGIHGRISATGRGVFHGIENFINEASYMSILGMTPGFGDKTFVVQGFGNVGLHSMRYLHRFGAKCIAVGESDGSIWNPDGIDPKELEDFKLQHGSILGFPKAKPYEGSILEADCDILIPAASEKQLTKSNAPRVKAKIIAEGANGPTTPEADKIFLERNIMVIPDLYLNAGGVTVSYFEWLKNLNHVSYGRLTFKYERDSNYHLLMSVQESLERKFGKHGGTIPIVPTAEFQDRISGASEKDIVHSGLAYTMERSARQIMRTAMKYNLGLDLRTAAYVNAIEKVFKVYNEAGVTFT

SEQ ID NO: 846607 - protein, 306 aa, Homo sapiens
MGEDWGPISQGGIHGRISATGRGVFHGIENFINEASYMSILGMTPGFGDKTFVVQGFGNVGLHSMRYLHRFGAKCIAVGESDGSIWNPDGIDPKELEDFKLQHGSILGFPKAKPYEGSILEADCDILIPAASEKQLTKSNAPRVKAKIIAEGANGPTTPEADKIFLERNIMVIPDLYLNAGGVTVSYFEWLKNLNHVSYGRLTFKYERDSNYHLLMSVQESLERKFGKHGGTIPIVPTAEFQDRISGASEKDIVHSGLAYTMERSARQIMRTAMKYNLGLDLRTAAYVNAIEKVFKVYNEAGVTFT

SEQ ID NO: 846608 - protein, 403 aa, Homo sapiens
MYRYLGEALLLSRAGPAALGSASADSAALLGWARGQPAAAPQPGLALAARRHYSEAVADREDDPNFFKMVEGFFDRGASIVEDKLVEDLRTRESEEQKRNRVRGILRIIKPCNHVLSLSFPIRRDDGSWEVIEGYRAQHSQHRTPCKGGIRYSTDVSVDEVKALASLMTYKCAVVDVPFGGAKAGVKINPKNYTDNELEKITRRFTMELAKKGFIGPGIDVPAPDMSTGEREMSWIADTYASTIGHYDINAHACVTGKPISQGGIHGRISATGRGVFHGIENFINEASYMSILGMTPGFGDKTFVVQGFGNVGLHSMRYLHRFGAKCIAVGESDGSIWNPDGIDPKELEDFKLQHGSILGFPKAKPYEGSILEADCDILIPAASEKQLTKSNAPRVKAKVTTL

SEQ ID NO: 846609 - protein, 512 aa, Homo sapiens
MYRYLGEALLLSRAGPAALGSASADSAALLGWARGQPAAAPQPGLALAARRHYSEAVADREDDPNFFKMVEGFFDRGASIVEDKLVEDLRTRESEEQKRNRVRGILRIIKPCNHVLSLSFPIRRDDGSWEVIEGYRAQHSQHRTPCKGGIRYSTDVSVDEVKALASLMTYKCAVVDVPFGGAKAGVKINPKNYTDNELEKITRRFTMELAKKGFIGPGIDVPAPDMSTGEREMSWIADTYASTIGHYDINAHACVTGKPISQGGIHGRISATGRGVFHGIENFINEASYMSILGMTPGFGDKTFVVQGFGNVGLHSMRYLHRFGAKCIAVGESDGSIWNPDGIDPKELEDFKLIIAEGANGPTTPEADKIFLERNIMVIPDLYLNAGGVTVSYFEWLKNLNHVSYGRLTFKYERDSNYHLLMSVQESLERKFGKHGGTIPIVPTAEFQDRISGASEKDIVHSGLAYTMERSARQIMRTAMKYNLGLDLRTAAYVNAIEKVFKVYNEAGVTFT

SEQ ID NO: 846610 - protein, 558 aa, Homo sapiens; identical to SEQ ID NO: 846592

SEQ ID NO: 846611 - protein, 558 aa, Homo sapiens; identical to SEQ ID NO: 846592

SEQ ID NO: 846612 - protein, 558 aa, Homo sapiens; identical to SEQ ID NO: 846592

SEQ ID NO: 846613 - protein, 558 aa, Homo sapiens; identical to SEQ ID NO: 846592

SEQ ID NO: 846614 - protein, 448 aa, Homo sapiens
MYRYLGEALLLSRAGPAALGSASADSAALLGWARGQPAAAPQPGLALAARRHYSEAVADREDDPNFFKMVEGFFDRGASIVEDKLVEDLRTRESEEQKRNRVRGILRIIKPCNHVLSLSFPIRRDDGSWEVIEGYRAQHSQHRTPCKGGIRYSTDVSVDEVKALASLMTYKCAVVDVPFGGAKAGVKINPKNYTDNELEKITRRFTMELAKKGFIGPGIDVPAPDMSTGEREMSWIADTYASTIGHYDINAHACVTGKPISQGGIHGRISATGRGVFHGIENFINEASYMSILGMTPGFGDKTFVVQGFGNVGLHSMRYLHRFGAKCIAVGESDGSIWNPDGIDPKELEDFKLQHGSILGFPKAKPYEGSILEADCDILIPAASEKQLTKSNAPRVKAKIIAEGANGPTTPEADKIFLERNIMVIPGSFNLERLGGRWPSNSLLLEVG

SEQ ID NO: 846615 - protein, 322 aa, Homo sapiens
MYRYLGEALLLSRAGPAALGSASADSAALLGWARGQPAAAPQPGLALAARRHYSEAVADREDDPNFFKMVEGFFDRGASIVEDKLVEDLRTRESEEQKRNRVRGILRIIKPCNHVLSLSFPIRRDDGSWEVIEGYRAQHSQHRTPCKGGIRYSTDVSVDEVKALASLMTYKCAVVDVPFGGAKAGVKINPKNYTDNELEKITRRFTMELAKKGFIGPGIDVPAPDMSTGEREMSWIADTYASTIGHYDINAHACVTGKPISQGGIHGRISATGRGVFHGIENFINEASYMSILGMTPGFGDKTFVVQVKTKTKKVSLITDRH

SEQ ID NO: 846616 - protein, 239 aa, Homo sapiens
MEKEKGNDDGIPDQENSLDFSEHFNQLELLETHGHLIPTGTQSLWVGNSDEDEEQDDKNEEWYRLQEKKMEKDPSRLLLWAAEKNRLTTVRRLLSEKATHVNTRDEDEYTPLHRAAYSGHLDIVQELIAQGADVHAVTVDGWTPLHSACKWNNTRVASFLLQHDADINAQTKGLLTPLHLAAGNRDSKDTLELLLMNRYVKPGLKNNLEETAFDIARRTSIYHYLFEIVEGCTNSSPQS

SEQ ID NO: 846617 - protein, 124 aa, Homo sapiens
GFRLGTCRNRRRMRFLNYPTAGLFEAPQSRPKAVFFSGRKGRIREKKTTRSELASENPQGRKPEFRGRERRPFLSRHFMDNVDASSPVRLSLATARSEGAGKVAARPRPHAGANPEQARRRTRK

SEQ ID NO: 846618 - protein, 124 aa, Homo sapiens; identical to SEQ ID NO: 846617

SEQ ID NO: 846619 - protein, 239 aa, Homo sapiens; identical to SEQ ID NO: 846616

SEQ ID NO: 846620 - protein, 198 aa, Homo sapiens [sequence omitted]

SEQ ID NO: 846621 - protein, 478 aa, Homo sapiens
MGRKKKKQLKPWCWYCNRDFDDEKILIQHQKAKHFKCHICHKKLYTGPGLAIHCMQVHKETIDAVPNAIPGRTDIELEIYGMEGIPEKDMDERRRLLEQKTQESQKKKQQDDSDEYDDDDSAASTSFQPQPVQPQQGYIPPMAQPGLPPVPGAPGMPPGIPPLMPGVPPLMPGMPPVMPGMPPGMMPMGGMMPPGPGIPPLMPGMPPGMPPPVPRPGIPPMTQAQAVSAPGILNRPPAPTATVPAPQPPVTKPLFPSAGQMGTPVTSSSTASSNSESLSASSKALFPSTAQAQAAVQGPVGTDFKPLNSTPATTTEPPKPTFPAYTQSTASTTSTTNSTAAKPAASITSKPATLTTTSATSKLIHPDEDISLEERRAQLPKYQRNLPRPGQAPIGNPPVGPIGGMMPPQPGIPQQQGMRPPMPPHGQYGGHHQGMPGYLPGAMPPYGQGPPMVPPYQGGPPRPPMGMRPPVMSQGGRY

SEQ ID NO: 846622 - protein, 478 aa, Homo sapiens; identical to SEQ ID NO: 846621

SEQ ID NO: 846623 - protein, 463 aa, Homo sapiens
MGRKKKKQLKPWCWYCNRDFDDEKILIQHQKAKHFKCHICHKKLYTGPGLAIHCMQVHKETIDAVPNAIPGRTDIELEIYGMEGIPEKDMDERRRLLEQKTQESQKKKQQDDSDEYDDDDSAASTSFQPQPVQPQQGYIPPMAQPGLPPVPGAPGMPPGIPPLMPGVPPLMPGMPPVMPGMPPGLHHQRKYTQSFCGENIMMPMGGMMPPGPGIPPLMPGMPPGMPPPVPRPGIPPMTQAQAVSAPGILNRPPAPTATVPAPQPPVTKPLFPSAGQAQAAVQGPVGTDFKPLNSTPATTTEPPKPTFPAYTQSTASTTSTTNSTAAKPAASITSKPATLTTTSATSKLIHPDEDISLEERRAQLPKYQRNLPRPGQAPIGNPPVGPIGGMMPPQPGIPQQQGMRPPMPPHGQYGGHHQGMPGYLPGAMPPYGQGPPMVPPYQGGPPRPPMGMRPPVMSQGGRY

SEQ ID NO: 846624 - protein, 463 aa, Homo sapiens; identical to SEQ ID NO: 846623

SEQ ID NO: 846625 - protein, 463 aa, Homo sapiens; identical to SEQ ID NO: 846623

SEQ ID NO: 846626 - protein, 463 aa, Homo sapiens; identical to SEQ ID NO: 846623

SEQ ID NO: 846627 - protein, 494 aa, Homo sapiens
MGRKKKKQLKPWCWYCNRDFDDEKILIQHQKAKHFKCHICHKKLYTGPGLAIHCMQVHKETIDAVPNAIPGRTDIELEIYGMEGIPEKDMDERRRLLEQKTQESQKKKQQDDSDEYDDDDSAASTSFQPQPVQPQQGYIPPMAQPGLPPVPGAPGMPPGIPPLMPGVPPLMPGMPPVMPGMPPGLHHQRKYTQSFCGENIMMPMGGMMPPGPGIPPLMPGMPPGMPPPVPRPGIPPMTQAQAVSAPGILNRPPAPTATVPAPQPPVTKPLFPSAGQMGTPVTSSSTASSNSESLSASSKALFPSTAQAQAAVQGPVGTDFKPLNSTPATTTEPPKPTFPAYTQSTASTTSTTNSTAAKPAASITSKPATLTTTSATSKLIHPDEDISLEERRAQLPKYQRNLPRPGQAPIGNPPVGPIGGMMPPQPGIPQQQGMRPPMPPHGQYGGHHQGMPGYLPGAMPPYGQGPPMVPPYQGGPPRPPMGMRPPVMSQGGRY

SEQ ID NO: 846628 - protein, 463 aa, Homo sapiens; identical to SEQ ID NO: 846623

SEQ ID NO: 846629 - protein, 494 aa, Homo sapiens; identical to SEQ ID NO: 846627

SEQ ID NO: 846630 - protein, 184 aa, Homo sapiens
MGRKKKKQLKPWCWYCNRDFDDEKILIQHQKAKHFKCHICHKKLYTGPGLAIHCMQVHKETIDAVPNAIPGRTDIELEIYGMEGIPEKDMDERRRLLEQKTQESQKKKQQDDSDEYDDDDSAASTSFQPQPVQPQQGYIPPMAQPGLPPVPGAPGMPPGIPPLMPGVPPLMPGMPPVMPGMPPG

SEQ ID NO: 846631 - protein, 380 aa, Homo sapiens
MGRKKKKQLKPWCWYCNRDFDDEKILIQHQKAKHFKCHICHKKLYTGPGLAIHCMQVHKETIDAVPNAIPGRTDIELEIYGMEGIPEKDMDERRRLLEQKTQESQKKKQQDDSDEYDDDDSAASTSFQPQPVQPQQGYIPPMAQPGLPPVPGAPGMPPGIPPLMPGVPPLMPGMPPVMPGMPPGLHHQRKYTQSFCGENIMMPMGGMMPPGPGIPPLMPGMPPGMPPPVPRPGIPPMTQAQAVSAPGILNRPPAPTATVPAPQPPVTKPLFPSAGQAQAAVQGPVGTDFKPLNSTPATTTEPPKPTFPAYTQSTASTTSTTNSTAAKPAASITSKPATLTTTSATSKLELEWKKGLPKFFLQTSCLQGFFERLKNFKSII

SEQ ID NO: 846632 - protein, 361 aa, Homo sapiens [sequence omitted]

SEQ ID NO: 846633 - protein, 380 aa, Homo sapiens
VAEMKLRLQSRHHHIHQNHLVASFFDFLVSSVQEGVRFASMSFSGIPPLMPGVPPLMPGMPPVMPGMPPGLHHQRKYTQSFCGENIMMPMGGMMPPGPGIPPLMPGMPPGMPPPVPRPGIPPMTQAQAVSAPGILNRPPAPTATVPAPQPPVTKPLFPSAGQMGTPVTSSSTASSNSESLSASSKALFPSTAQAQAAVQGPVGTDFKPLNSTPATTTEPPKPTFPAYTQSTASTTSTTNSTAAKPAASITSKPATLTTTSATSKLIHPDEDISLEERRAQLPKYQRNLPRPGQAPIGNPPVGPIGGMMPPQPGIPQQQGMRPPMPPHGQYGGHHQGMPGYLPGAMPPYGQGPPMVPPYQGGPPRPPMGMRPPVMSQGGRY

SEQ ID NO: 846634 - protein, 294 aa, Homo sapiens
MMPMGGMMPPGPGIPPLMPGMPPGMPPPVPRPGIPPMTQAQAVSAPGILNRPPAPTATVPAPQPPVTKPLFPSAGQMGTPVTSSSTASSNSESLSASSKALFPSTAQAQAAVQGPVGTDFKPLNSTPATTTEPPKPTFPAYTQSTASTTSTTNSTAAKPAASITSKPATLTTTSATSKLIHPDEDISLEERRAQLPKYQRNLPRPGQAPIGNPPVGPIGGMMPPQPGIPQQQGMRPPMPPHGQYGGHHQGMPGYLPGAMPPYGQGPPMVPPYQGGPPRPPMGMRPPVMSQGGRY

SEQ ID NO: 846635 - protein, 277 aa, Homo sapiens
MGRKKKKQLKPWCWYCNRDFDDEKILIQHQKAKHFKCHICHKKLYTGPGLAIHCMQVHKETIDAVPNAIPGRTDIELEIYGMEGIPEKDMDERRRLLEQKTQESQKKKQQDDSDEYDDDDSAASTSFQPQPVQPQQGYIPPMAQPGLPPVPGAPGMPPGIPPLMPGVPPLMPGMPPVMPGMPPGLHHQRKYTQSFCGENIMMPMGGMMPPGPGIPPLMPGMPPGMPPPVPRPGIPPMTQAQAVSAPGILNRPPAPTATVPAPQPPVTKPLFPSAGQK

SEQ ID NO: 846636 - protein, 263 aa, Homo sapiens
YKACRNNQSSNFGPMKEEILEAAGMPPPVPRPGIPPMTQAQAVSAPGILNRPPAPTATVPAPQPPVTKPLFPSAGQAQAAVQGPVGTDFKPLNSTPATTTEPPKPTFPAYTQSTASTTSTTNSTAAKPAASITSKPATLTTTSATSKLIHPDEDISLEERRAQLPKYQRNLPRPGQAPIGNPPVGPIGGMMPPQPGIPQQQGMRPPMPPHGQYGGHHQGMPGYLPGAMPPYGQGPPMVPPYQGGPPRPPMGMRPPVMSQGGRY

SEQ ID NO: 846637 - protein, 218 aa, Homo sapiens [sequence omitted]

SEQ ID NO: 846638 - protein, 128 aa, Homo sapiens
MPLCLVSLCIRVFSPCAYFYSQEERRAQLPKYQRNLPRPGQAPIGNPPVGPIGGMMPPQPGIPQQQGMRPPMPPHGQYGGHHQGMPGYLPGAMPPYGQGPPMVPPYQGGPPRPPMGMRPPVMSQGGRY

SEQ ID NO: 846639 - protein, 256 aa, Homo sapiens
MGRKKKKQLKPWCWYCNRDFDDEKILIQHQKAKHFKCHICHKKLYTGPGLAIHCMQVHKETIDAVPNAIPGRTDIELEIYGMEGIPEKDMDERRRLLEQKTQESQKKKQQDDSDEYDDDDSAASTSFQPQPVQPQQGYIPPMAQPGLPPVPGAPGMPPGIPPLMPGVPPLMPGMPPVMPGMPPGMMPMGGMMPPGPGIPPLMPGMPPGMPPPVPRPGIPPMTQAQGSAADLIDTDTEVSCQAQYSLSRGSQEAAGA

SEQ ID NO: 846640 - protein, 75 aa, Homo sapiens
ESKQCSESKQCPESKQCPESKQGSESKQCPESKQCPKSKQCSESKQCPESKQCPESKQCPPMGMRPPVMSQGGRY

SEQ ID NO: 846641 - protein, 463 aa, Homo sapiens; identical to SEQ ID NO: 846623

SEQ ID NO: 846642 - protein, 463 aa, Homo sapiens; identical to SEQ ID NO: 846623

SEQ ID NO: 846643 - protein, 463 aa, Homo sapiens; identical to SEQ ID NO: 846623

SEQ ID NO: 846644 - protein, 463 aa, Homo sapiens; identical to SEQ ID NO: 846623

SEQ ID NO: 846645 - protein, 494 aa, Homo sapiens; identical to SEQ ID NO: 846627

SEQ ID NO: 846646 - protein, 494 aa, Homo sapiens; identical to SEQ ID NO: 846627

SEQ ID NO: 846647 - protein, 494 aa, Homo sapiens; identical to SEQ ID NO: 846627

SEQ ID NO: 846648 - protein, 494 aa, Homo sapiens; identical to SEQ ID NO: 846627

SEQ ID NO: 846649 - protein, 395 aa, Homo sapiens
MGRKKKKQLKPWCWYCNRDFDDEKILIQHQKAKHFKCHICHKKLYTGLPPVPGAPGMPPGIPPLMPGVPPLMPGMPPVMPGMPPGLHHQRKYTQSFCGENIMMPMGGMMPPGPGIPPLMPGMPPGMPPPVPRPGIPPMTQAQAVSAPGILNRPPAPTATVPAPQPPVTKPLFPSAGQMGTPVTSSSTASSNSESLSASSKALFPSTAQAQAAVQGPVGTDFKPLNSTPATTTEPPKPTFPAYTQSTASTTSTTNSTAAKPAASITSKPATLTTTSATSKLIHPDEDISLEERRAQLPKYQRNLPRPGQAPIGNPPVGPIGGMMPPQPGIPQQQGMRPPMPPHGQYGGHHQGMPGYLPGAMPPYGQGPPMVPPYQGGPPRPPMGMRPPVMSQGGRY

SEQ ID NO: 846650 - protein, 331 aa, Homo sapiens
MPGVPPLMPGMPPVMPGMPPGLHHQRKYTQSFCGENIMMPMGGMMPPGPGIPPLMPGMPPGMPPPVPRPGIPPMTQAQAVSAPGILNRPPAPTATVPAPQPPVTKPLFPSAGQMGTPVTSSSTASSNSESLSASSKALFPSTAQAQAAVQGPVGTDFKPLNSTPATTTEPPKPTFPAYTQSTASTTSTTNSTAAKPAASITSKPATLTTTSATSKLIHPDEDISLEERRAQLPKYQRNLPRPGQAPIGNPPVGPIGGMMPPQPGIPQQQGMRPPMPPHGQYGGHHQGMPGYLPGAMPPYGQGPPMVPPYQGGPPRPPMGMRPPVMSQGGRY

SEQ ID NO: 846651 - protein, 293 aa, Homo sapiens
MPMGGMMPPGPGIPPLMPGMPPGMPPPVPRPGIPPMTQAQAVSAPGILNRPPAPTATVPAPQPPVTKPLFPSAGQMGTPVTSSSTASSNSESLSASSKALFPSTAQAQAAVQGPVGTDFKPLNSTPATTTEPPKPTFPAYTQSTASTTSTTNSTAAKPAASITSKPATLTTTSATSKLIHPDEDISLEERRAQLPKYQRNLPRPGQAPIGNPPVGPIGGMMPPQPGIPQQQGMRPPMPPHGQYGGHHQGMPGYLPGAMPPYGQGPPMVPPYQGGPPRPPMGMRPPVMSQGGRY

SEQ ID NO: 846652 - protein, 142 aa, Homo sapiens
MGRKKKKQLKPWCWYCNRDFDDEKILIQHQKAKHFKCHICHKKLYTGPGLAIHCMQVHKETIDAVPNAIPGRTDIELEIYGMEGIPEKDMDERRRLLEQKTQESQKKKQQDNPQSLHSLLIHSLQLQQLVQQIVLQLNQRLQ

SEQ ID NO: 846653 - protein, 194 aa, Homo sapiens [sequence omitted]

SEQ ID NO: 846654 - protein, 287 aa, Homo sapiens
MGRKKKKQLKPWCWYCNRDFDDEKILIQHQKAKHFKCHICHKKLYTGPGLAIHCMQVHKETIDAVPNAIPGRTDIELEIYGMEGIPEKDMDERRRLLEQKTQESQKKKQQDDSDEYDDDDSAASTSFQPQPVQPQQGYIPPMAQPGLPPVPGAPGMPPGIPPLMPGVPPLMPGMPPVMPGMPPGLHHQRKYTQSFCGENIMMPWVDDATWTGYNSDAGCTRYAHCTVLDPPWSGKCQRRIYDTLQKRLPNSDKLSGDGLAHSSIRSFQVPKLRRRDTCANHVVAKRN

SEQ ID NO: 846655 - protein, 89 aa, Homo sapiens
VEHSYGSQEEEAAEAVVLVSFVGLKSRSRWGAGCWGLGLGGLDLAYGVERLYLGVCVGGLVAGIGLGKASRKMGFRGRQAFAVVGRVTL

SEQ ID NO: 846656 - protein, 157 aa, Homo sapiens
GRMEGPGMWASGHQWHHRRGATDILGTACPQVNTPAAEVLYTVIQDWAQLDAGSMVLDVCCGTGTIGLALARVSPPALLRAPSPHPKTPIDPSSKSPQLTPSCPRPSSSLLPTGPHVLPSLGGATPRFPVSEGKEGHWGRAMPRGCGGRPGERPGQW

SEQ ID NO: 846657 - protein, 687 aa, Homo sapiens
MSENLDNEGPKPMESCGQESSSALSCPTVSVPPAAPAALEEVEKEGAGAATGPGPQPGLYSYIRDDLFTSEIFKLELQNVPRHASFSDVRRFLGRFGLQPHKTKLFGQPPCAFVTFRSAAERDKALRVLHGALWKGRPLSVRLARPKADPMARRRRQEGESEPPVTRVADVVTPLWTVPYAEQLERKQLECEQVLQKLAKEIGSTNRALLPWLLEQRHKHNKACCPLEGVRPSPQQTEYRNKCEFLVGVGVDGEDNTVGCRLGKYKGGTCAVAAPFDTVHIPEATKQVVKAFQEFIRLRTCDGAPGKSYAVWEQRVVILPREFWSACHFSQMKEGVARGESRGTACPVVGTWASCDSHRSTPYSAYDPETYTGHWKQLTVRTSRRHQAMAIAYFHPQKLSPEELAELKTSLAQHFTAGPGRASGVTCLYFVEEGQRKTPSQEGLPLEHVAGDRCIHEDLLGLTFRISPHAFFQVNTPAAEVLYTVIQDWAQLDAGSMVLDVCCGTGTIGLALARKVKRVIGVELCPEAVEDARVNAQDNELSNVEFHCGRAEDLVPTLVSRLASQHLVAILDPPRAGLHSKVILAIRRAKNLRRLLYVSCNPRAAMGNFVDLCRAPSNRVKGIPFRPVKAVAVDLFPQTPHCEMLILFERVEHPNGTGVLGPHSPPAQPTPGPPDNTLQETGTFPSS

SEQ ID NO: 846658 - protein, 625 aa, Homo sapiens
MSENLDNEGPKPMESCGQESSSALSCPTVSVPPAAPAALEEVEKEGAGAATGPGPQPGLYSYIRDDLFTSEIFKLELQNVPRHASFSDVRRFLGRFGLQPHKTKLFGQPPCAFVTFRSAAERDKALRVLHGALWKGRPLSVRLARPKADPMARRRRQEGESEPPVTRVADVVTPLWTVPYAEQLERKQLECEQVLQKLAKEIGSTNRALLPWLLEQRHKHNKACCPLEGVRPSPQQTEYRNKCEFLVGVGVDGEDNTVGCRLGKYKGGTCAVAAPFDTVHIPEATKQVVKAFQEFIRSTPYSAYDPETYTGHWKQLTVRTSRRHQAMAIAYFHPQKLSPEELAELKTSLAQHFTAGPGRASGVTCLYFVEEGQRKTPSQEGLPLEHVAGDRCIHEDLLGLTFRISPHAFFQVNTPAAEVLYTVIQDWAQLDAGSMVLDVCCGTGTIGLALARKVKRVIGVELCPEAVEDARVNAQDNELSNVEFHCGRAEDLVPTLVSRLASQHLVAILDPPRAGLHSKVILAIRRAKNLRRLLYVSCNPRAAMGNFVDLCRAPSNRVKGIPFRPVKAVAVDLFPQTPHCEMLILFERVEHPNGTGVLGPHSPPAQPTPGPPDNTLQETGTFPSS

SEQ ID NO: 846659 - protein, 335 aa, Homo sapiens
MSENLDNEGPKPMESCGQESSSALSCPTVSVPPAAPAALEEVEKEGAGAATGPGPQPGLYSYIRDDLFTSEIFKLELQNVPRHASFSDVRRFLGRFGLQPHKTKLFGQPPCAFVTFRSAAERDKALRVLHGALWKGRPLSVRLARPKADPMARRRRQEGESEPPVTRVADVVTPLWTVPYAEQLERKQLECEQVLQKLAKEIGSTNRALLPWLLEQRHKHNKACCPLEGVRPSPQQTEYRNKCEFLVGVGVDGEDNTVGCRLGKYKGGTCAVAAPFDTVHIPEATKQVVKAFQEFIRSTPYSAYDPETYTGHWKQLTVRTSRRHQAWLAGQDIQR

SEQ ID NO: 846660 - protein, 177 aa, Homo sapiens
LWATKVQIFNDVHICPQSKKDARVNLRTIELSNVEFHCGRAEDLVPTLVSRLASQHLVAILDPPRAGLHSKVILAIRRAKNLRRLLYVSCNPRAAMGNFVDLCRAPSNRVKGIPFRPVKAVAVDLFPQTPHCEMLILFERVEHPNGTGVLGPHSPPAQPTPGPPDNTLQETGTFPSS

SEQ ID NO: 846661 - protein, 41 aa, Homo sapiens
MLILFERVEHPNGTGVLGPHSPPAQPTPGPPDNTLQETGTF

SEQ ID NO: 846662 - protein, 625 aa, Homo sapiens; identical to SEQ ID NO: 846658

SEQ ID NO: 846663 - protein, 625 aa, Homo sapiens; identical to SEQ ID NO: 846658

SEQ ID NO: 846664 - protein, 625 aa, Homo sapiens; identical to SEQ ID NO: 846658

SEQ ID NO: 846665 - protein, 477 aa, Homo sapiens
ARGWNTHADFADECPKPELLAIRFLDPGTVATCVGLQLHHRRDVVVGTDLQGLVPPHEEADGPFLLVLQELDVTSASLLPFWEIVLRGTEYRNKCEFLVGVGVDGEDNTVGCRLGKYKGGTCAVAAPFDTVHIPEATKQVVKAFQEFIRSTPYSAYDPETYTGHWKQLTVRTSRRHQAMAIAYFHPQKLSPEELAELKTSLAQHFTAGPGRASGVTCLYFVEEGQRKTPSQEGLPLEHVAGDRCIHEDLLGLTFRISPHAFFQVNTPAAEVLYTVIQDWAQLDAGSMVLDVCCGTGTIGLALARKVKRVIGVELCPEAVEDARVNAQDNELSNVEFHCGRAEDLVPTLVSRLASQHLVAILDPPRAGLHSKVILAIRRAKNLRRLLYVSCNPRAAMGNFVDLCRAPSNRVKGIPFRPVKAVAVDLFPQTPHCEMLILFERVEHPNGTGVLGPHSPPAQPTPGPPDNTLQETGTFPSS

SEQ ID NO: 846666 - protein, 208 aa, Homo sapiens
  misc_feature (201)..(201): Xaa can be any naturally occurring amino acid
MSENLDNEGPKPMESCGQESSSALSCPTVSVPPAAPAALEEVDDKMCAAECAWWAYQCGRGLSPGLYSLNHPVGIELFGLPLRSLNLVRLCTENLVASAQPVPMGVFQWQTVPGLPLPIWGGPLAYFGGSVANVRPPKPIVERRKEASVLVVAKRHRPRQLTMAQFIWLDTEFFPSTIDQLWPRQRMGGTTNGAPLARQVXFATWVAP

SEQ ID NO: 846667 - protein, 244 aa, Homo sapiens
  misc_feature (219)..(219): Xaa can be any naturally occurring amino acid
  misc_feature (221)..(221): Xaa can be any naturally occurring amino acid
  misc_feature (234)..(234): Xaa can be any naturally occurring amino acid
  misc_feature (241)..(241): Xaa can be any naturally occurring amino acid
  misc_feature (243)..(243): Xaa can be any naturally occurring amino acid
MTTILTYPFKNLPTASKWALRFSIRPLSCSSQLRAAPAVQTKTKKTLAKPNIRNVVVVDGVRTPFLLSGTSYKDLMPHDLARAALTGLLHRTSVPKEVVDYIIFGTVIQEVKTSNVAREAALGAGFSDKTPAHTVTMACISANQAMTTGVGLIASGQCDVIVAGGVELMSDVPIRHSRKMRKLMLDLNKAKSMGQRLSLISKFRFNFLAPELPWVSEVXNXWRTKGPILAKTDXAGLPFGXFXR

SEQ ID NO: 846668 - protein, 162 aa, Homo sapiens
RGKLLGQDSRMTTILTYPFKNLPTASKWALRFSIRPLSCSSQLRAAPAVQTKTKKTLAKPNIRNVVVVDGVRTPFLLSGTSYKYLIPHNLTISTLTTLLHQTSIPTKLLHYIILYTLIQQFYSYSHFHHNLYLLQPTITTIFTFITLPNVLHPSNSSLIYLP

SEQ ID NO: 846669 - protein, 474 aa, Homo sapiens
MTTILTYPFKNLPTASKWALRFSIRPLSCSSQLRAAPAVQTKTKKTLAKPNIRNVVVVDGVRTPFLLSGTSYKDLMPHDLARAALTGLLHRTSVPKEVVDYIIFGTVIQEVKTSNVAREAALGAGFSDKTPAHTVTMACISANQAMTTGVGLIASGQCDVIVAGGVELMSDVPIRHSRKMRKLMLDLNKAKSMGQRLSLISKFRFNFLAPELPAVSEFSTSETMGHSADRLAAAFAVSRLEQDEYALRSHSLAKKAQDEGLLSDVVPFKVPGKDTVTKDNGIRPSSLEQMAKLKPAFIKPYGTVTAANSSFLTDGASAMLIMAEEKALAMGYKPKAYLRILCVGLRIQDQLLLGPTYATPKVLEKAGLTMNDIDAFEFHEAFSGQILANFKAMDSDWFAENYMGRKTKVGLPPLEKFNNWGGSLSLGHPFGATGCRLVMAAANRLRKEGGQYGLVAACAAGGQGHAMIVEAYPK

SEQ ID NO: 846670 - protein, 272 aa, Homo sapiens
MTTILTYPFKNLPTASKWALRFSIRPLSCSSQLRAAPAVQTKTKKTLAKPNIRNVVVVDGVRTPFLLSGTSYKDLMPHDLARAALTGLLHRTSVPKEVVDYIIFGTVIQEVKTSNVAREAALGAGFSDKTPAHTVTMACISANQAMTTGVGLIASGQCDVIVAGGVELMSDVPIRHSRKMRKLMLDLNKAKSMGQRLSLISKFRFNFLAPELPAVSEFSTSETMGHSADRLAAAFAVSRLEQDEYALRSHSLAKKAQDEGLLSDVVPFKVPG

SEQ ID NO: 846671 - protein, 475 aa, Homo sapiens
MTTILTYPFKNLPTASKWALRFSIRPLSCSSQLRAAPAVQTKTKKTLAKPNIRNVVVVDGVRTPFLLSGTSYKDLMPHDLARAALTGLLHRTSVPKEVVDYIIFGTVIQEVKTSNVAREAALGAGFSDKTPAHTVTMACISANQAMTTGVGLIASGQCDVIVAGGVELMSDVPIRHSRKMRKLMLDLNKAKSMGQRLSLISKFRFNFLAPELPAVSEFSTSETMGHSADRLAAAFAVSRLEQDEYALRSHSLAKKAQDEGLLSDVVPFKVPGKDTVTKDNGIRPSSLEQMAKLKPAFIKPYGTVTAANSSFLTDGASAMLIMAEEKALAMGYKPKAYLRDFMYVSQDPKDQLLLGPTYATPKVLEKAGLTMNDIDAFEFHEAFSGQILANFKAMDSDWFAENYMGRKTKVGLPPLEKFNNWGGSLSLGHPFGATGCRLVMAAANRLRKEGGQYGLVAACAAGGQGHAMIVEAYPK

SEQ ID NO: 846672 - protein, 475 aa, Homo sapiens; identical to SEQ ID NO: 846671

SEQ ID NO: 846673 - protein, 474 aa, Homo sapiens; identical to SEQ ID NO: 846669

SEQ ID NO: 846674 - protein, 252 aa, Homo sapiens [sequence omitted]

SEQ ID NO: 846675 - protein, 252 aa, Homo sapiens [sequence omitted]

SEQ ID NO: 846676 - protein, 352 aa, Homo sapiens [sequence omitted]

SEQ ID NO: 846677 - protein, 452 aa, Homo sapiens
MTLVSGWLLYGWIIAVQTKTKKTLAKPNIRNVVVVDGVRTPFLLSGTSYKDLMPHDLARAALTGLLHRTSVPKEVVDYIIFGTVIQEVKTSNVAREAALGAGFSDKTPAHTVTMACISANQAMTTGVGLIASGQCDVIVAGGVELMSDVPIRHSRKMRKLMLDLNKAKSMGQRLSLISKFRFNFLAPELPAVSEFSTSETMGHSADRLAAAFAVSRLEQDEYALRSHSLAKKAQDEGLLSDVVPFKVPGKDTVTKDNGIRPSSLEQMAKLKPAFIKPYGTVTAANSSFLTDGASAMLIMAEEKALAMGYKPKAYLRDFMYVSQDPKDQLLLGPTYATPKVLEKAGLTMNDIDAFEFHEAFSGQILANFKAMDSDWFAENYMGRKTKVGLPPLEKFNNWGGSLSLGHPFGATGCRLVMAAANRLRKEGGQYGLVAACAAGGQGHAMIVEAYPK

SEQ ID NO: 846678 - protein, 460 aa, Homo sapiens [sequence omitted]

SEQ ID NO: 846679 - protein, 400 aa, Homo sapiens [sequence omitted]

SEQ ID NO: 846680 - protein, 475 aa, Homo sapiens; identical to SEQ ID NO: 846671

SEQ ID NO: 846681 - protein, 475 aa, Homo sapiens; identical to SEQ ID NO: 846671

SEQ ID NO: 846682 - protein, 454 aa, Homo sapiens
MTTILTYPFKNLPTASKWALRFSIRPLSCSSQLRAAPAVQTKTKKTLAKPNIRNVVVVDGVRTPFLLSGTSYKDLMPHDLARAALTGLLHRTSVPKEVVDYIIFGTVIQEVKTSNVAREAALGAGFSDKTPAHTVTMACISANQAMTTGVGLIASGQCDVIVAGGVELMSDVPIRHSRKMRKLMLDLNKAKSMGQRLSLISKFRFNFLAPELPAVSEFSTSETMGHSADRLAAAFAVSRLEQDEYALRSHSLAKKAQDEGLLSDVVPFKVPGKDTVTKDNGIRPSSLEQMATDGASAMLIMAEEKALAMGYKPKAYLRDFMYVSQDPKDQLLLGPTYATPKVLEKAGLTMNDIDAFEFHEAFSGQILANFKAMDSDWFAENYMGRKTKVGLPPLEKFNNWGGSLSLGHPFGATGCRLVMAAANRLRKEGGQYGLVAACAAGGQGHAMIVEAYPK

SEQ ID NO: 846683 - protein, 475 aa, Homo sapiens; identical to SEQ ID NO: 846671

SEQ ID NO: 846684 - protein, 384 aa, Homo sapiens
MTTILTYPFKNLPTASKWALRFSIRPLSCSSQLRAAPAVQTKTKKTLAKPNIRNVVVVDGVRTPFLLSGTSYKDLMPHDLARAALTGLLHRTSVPKEVVDYIIFGTVIQEVKTSNVAREAALGAGFSDKTPAHTVTMACISANQAMTTGVGLIASGQCDVIVAGGVELMSDVPIRHSRKMRKLMLDLNKAKSMGQRLSLISKFRFNFLAPELPAVSEFSTSETMGHSADRLAAAFAVSRLEQDEYALRSHSLAKKAQDEGLLSDVVPFKVPGKDTVTKDNGIRPSSLEQMAKLKPAFIKPYGTVTAANSSFLTDGASAMLIMAEEKALAMGYKPKAYLRDFMYVSQDPKDQLLLGPTYASPKEAIQPWFFYPCSFLQTNQNPWL

SEQ ID NO: 846685 - protein, 272 aa, Homo sapiens; identical to SEQ ID NO: 846670

SEQ ID NO: 846686 - protein, 252 aa, Homo sapiens [sequence omitted]

SEQ ID NO: 846687 - protein, 475 aa, Homo sapiens; identical to SEQ ID NO: 846671

SEQ ID NO: 846688 - protein, 452 aa, Homo sapiens; identical to SEQ ID NO: 846677

SEQ ID NO: 846689 - protein, 388 aa, Homo sapiens
MSIPDYILPEVVDYIIFGTVIQEVKTSNVAREAALGAGFSDKTPAHTVTMACISANQAMTTGVGLIASGQCDVIVAGGVELMSDVPIRHSRKMRKLMLDLNKAKSMGQRLSLISKFRFNFLAPELPAVSEFSTSETMGHSADRLAAAFAVSRLEQDEYALRSHSLAKKAQDEGLLSDVVPFKVPGKDTVTKDNGIRPSSLEQMAKLKPAFIKPYGTVTAANSSFLTDGASAMLIMAEEKALAMGYKPKAYLRDFMYVSQDPKDQLLLGPTYATPKVLEKAGLTMNDIDAFEFHEAFSGQILANFKAMDSDWFAENYMGRKTKVGLPPLEKFNNWGGSLSLGHPFGATGCRLVMAAANRLRKEGGQYGLVAACAAGGQGHAMIVEAYPK

SEQ ID NO: 846690 - protein, 271 aa, Homo sapiens
MVGALCGCWFRLGGARPLIPLGPTVVQTSMSRSQVALLGLSLLLMLLLYVGLPGPPEQTSCLWGDPNVTVLAGLTPGNSPIFYREVLPLNQAHRVEVVLLHGKAFNSHTWEQLGTLQLLSQRGYRAVALDLPGFGNSAPSKEASTEAGRAALLERALRDLEVQNAVLVSPSLSGHYALPFLMRGHHQLHGFVPIAPTSTQNYTQEQFWAVKTPTLILYGELDHILARESLRQLRHLPNHSVVKLRNAGHACYLHKPQDFHLVLLAFLDHLP

SEQ ID NO: 846691 - protein, 188 aa, Homo sapiens
MVGALCGCWFRLGGARPLIPLGPTVVQTSMSRSQVALLGLSLLLMLLLYVGLPGPPEQTSCLWGDPNVTVLAGLTPGNSPIFYREVLPLNQAHRVEVVLLHGKAFNSHTWEQLGTLQLLSQRGYRAVALDLPDSNPYPVWRAGPHPGSRVTAAAPPPAQPLCGEATQCRPCLLPPQAARLPPCPACLP

SEQ ID NO: 846692 - protein, 124 aa, Homo sapiens
MVGALCGCWFRLGGARPLIPLGPTVVQTSMSRSQVALLGLSLLLMLLLYVGLPGPPEQTSCLWGDPNVTVLAGLTPGNSPIFYREVLPLNQAHRLQPLSCMESWTTSWLESHCGSSATCPTTLW

SEQ ID NO: 846693 - protein, 243 aa, Homo sapiens
MVGALCGCWFRLGGARPLIPLGPTVVQTSMSRSQVALLGLSLLLMLLLYVGLPGPPEQTSCLWGDPNVTVLAGLTPGNSPIFYREVLPLNQAHRVEVVLLHGKAFNSHTWEQLGTLQLLSQRGYRAVALDLPGFGNSAPSKEASTEAGRAALLERALRDLEVQNAVLVSPSLSGHYALPFLMRGHHQLHGFVPIAPTSTQNYTQEQFWAVKVLGEGSQRSWHPVCGLGGFRTQVLLGGTWPYP

SEQ ID NO: 846694 - protein, 379 aa, Homo sapiens
PKPCPEACPLSTWQVNGHSPVASLGQPVQCTQVLPGLGGEANTMQQQYREASLPTAGQGLSEEEGLALHLDGALALLHACCHACCCCAGEGPVVQNHDDEGPQNTLPRVAVPEEQQGSLQEVSRTLRTCLGTVVQTSMSRSQVALLGLSLLLMLLLYVGLPGPPEQTSCLWGDPNVTVLAGLTPGNSPIFYREVLPLNQAHRVEVVLLHGKAFNSHTWEQLGTLQLLSQRGYRAVALDLPGFGNSAPSKEASTEAGRAALLERALRDLEVQNAVLVSPSLSGHYALPFLMRGHHQLHGFVPIAPTSTQNYTQEQFWAVKTPTLILYGELDHILARESLRQLRHLPNHSVVKLRNAGHACYLHKPQDFHLVLLAFLDHLP

SEQ ID NO: 846695 - protein, 234 aa, Homo sapiens
MVGALCGCWFRLGGARPLIPLGPTVVQTSMSRSQVALLGLSLLLMLLLYVGLPGPPEQTSCLWGDPNVTVLAGLTPGNSPIFYREVLPLNQAHRVEVVLLHGKAFNSHTWEQLGTLQLLSQRGYRAVALDLPGFGNSAPSKEASTEAGRAALLERALRDLEVQNYTQEQFWAVKTPTLILYGELDHILARESLRQLRHLPNHSVVKLRNAGHACYLHKPQDFHLVLLAFLDHLP

SEQ ID NO: 846696 - protein, 135 aa, Homo sapiens
PKPCPEACPLSTWQVNGHSPVASLGQPVQCTQVLPGLGGEANTMQQQYREASLPTAGQGLSEEEGLALHLDGALALLHACCHACCCCAGEGPVVQNHDDEGPQNTLPRVAVPEEQQGSLQEVSRTLRTCLGVRRT

SEQ ID NO: 846697 - protein, 266 aa, Homo sapiens
MVATPKEGTQGSEKGRLGTVVQTSMSRSQVALLGLSLLLMLLLYVGLPGPPEQTSCLWGDPNVTVLAGLTPGNSPIFYREVLPLNQAHRVEVVLLHGKAFNSHTWEQLGTLQLLSQRGYRAVALDLPGFGNSAPSKEASTEAGRAALLERALRDLEVQNAVLVSPSLSGHYALPFLMRGHHQLHGFVPIAPTSTQNYTQEQFWAVKTPTLILYGELDHILARESLRQLRHLPNHSVVKLRNAGHACYLHKPQDFHLVLLAFLDHLP

SEQ ID NO: 846698 - protein, 139 aa, Homo sapiens
MVGALCGCWFRLGGARPLIPLGPTVVQTSMSRSQVALLGLSLLLMLLLYVGLPGPPEQTSCLWGDPNVTVLAGLTPGNSPIFYREVLPLNQAHRVEVVLLHGKAFNSHTWEQLGTLQLLSQRGYRAVALDLPACPACLP

SEQ ID NO: 846699 - protein, 565 aa, Homo sapiens
MFRTAVMMAASLALTGAVVAHAYYLKHQFYPTVVYLTKSSPSMAVLYIQAFVLVFLLGKVMGKVFFGQLRAAEMEHLLERSWYAVTETCLAFTVFRDDFSPRFVALFTLLLFLKCFHWLAEDRVDFYAILMTMVLTIFIKYVLHSVDLQSENPWDNKAVYMLYTELFTGFIKVLLYMAFMTIMIKVHTFPLFAIRPMYLAMRQFKKAVTDAIMSRRAIRNMNTLYPDATPEELQAMDNVCIICREEMVTGAKRLPCNHIFHTSCLRSWFQRQQTCPTCRMDVLRASLPAQSPPPPEPADQGPPPAPHPPPLLPQPPNFPQGLLPPFPPGMFPLWPPMGPFPPVPPPPSSGEAVAPPSTSAALSRPSGAATTTAAGTSATAASATASGPGSGSAPEAGPAPGFPFPPPWMGMPLPPPFAFPPMPVPPAGFAGLTPEELRALEGHERQHLEARLQSLRNIHTLLDAAMLQINQYLTVLASLGPPRPATSVNSTEETATTVVAAASSTSIPSSEATTPTPGASPPAPEMERPPAPESVGTEEMPEDGEPDAAELRRRRLQKLESPVAH

SEQ ID NO: 846700 - protein, 144 aa, Homo sapiens
MFRTAVMMAASLALTGAVVAHAYYLKHQFYPTVVYLTKSSPSMAVLYIQAFVLVFLLGKVMGKVFFGQLRAAEMEHLLERSWYAVTETCLAFTVFRDDFSPRFVALFTLLLFLKCFHWLAEDRVDFMERSPNISWLFHCRIVCE

SEQ ID NO: 846701 - protein, 609 aa, Homo sapiens
MFRTAVMMAASLALTGAVVAHAYYLKHQFYPTVVYLTKSSPSMAVLYIQAFVLVFLLGKVMGKVFFGQLRAAEMEHLLERSWYAVTETCLAFTVFRDDFSPRFVALFTLLLFLKCFHWLAEDRVDFMERSPNISWLFHCRIVSLMFLLGILDFLFVSHAYHSILTRGASVQLVFGFEYAILMTMVLTIFIKYVLHSVDLQSENPWDNKAVYMLYTELFTGFIKVLLYMAFMTIMIKVHTFPLFAIRPMYLAMRQFKKAVTDAIMSRRAIRNMNTLYPDATPEELQAMDNVCIICREEMVTGAKRLPCNHIFHTSGSRPAPPAVWMSFVHRCQRSHHHPRSLRIRGHPLPPTPPPLLPQPPNFPQGLLPPFPPGMFPLWPPMGPFPPVPPPPSSGEAVAPPSTSAALSRPSGAATTTAAGTSATAASATASGPGSGSAPEAGPAPGFPFPPPWMGMPLPPPFAFPPMPVPPAGFAGLTPEELRALEGHERQHLEARLQSLRNIHTLLDAAMLQINQYLTVLASLGPPRPATSVNSTEETATTVVAAASSTSIPSSEATTPTPGASPPAPEMERPPAPESVGTEEMPEDGEPDAAELRRRRLQKLESPVAH

SEQ ID NO: 846702 - protein, 609 aa, Homo sapiens; identical to SEQ ID NO: 846701

SEQ ID NO: 846703 - protein, 674 aa, Homo sapiens
MFRTAVMMAASLALTGAVVAHAYYLKHQFYPTVVYLTKSSPSMAVLYIQAFVLVFLLGKVMGKVFFGQLRAAEMEHLLERSWYAVTETCLAFTVFRDDFSPRFVALFTLLLFLKCFHWLAEDRVDFMERSPNISWLFHCRIVSLMFLLGILDFLFVSHAYHSILTRGASVQLVFGFEYAILMTMVLTIFIKYVLHSVDLQSENPWDNKAVYMLYTELFTGERGLGLLLIWTSILHSASWPCDLLLSASPPLRLHQGSAVHGLHDHHDQGAHLPTLCHPAHVPGHEVSPALSPDPPDLIRVPSPAFTDCPFRQFKKAVTDAIMSRRAIRNMNTLYPDATPEELQAMDNVCIICREEMVTGAKRLPCNHIFHTSCLRSWFQRQQTCPTCRMDVLRASLPAQSPPPPEPADQGPPPAPHPPPLLPQPPNFPQGLLPPFPPGMFPLWPPMGPFPPVPPPPSSGEAVAPPSTSAALSRPSGAATTTAAGTSATAASATASGPGSGSAPEAGPAPGFPFPPPWMGMPLPPPFAFPPMPVPPAGFAGLTPEELRALEGHERQHLEARLQSLRNIHTLLDAAMLQINQYLTVLASLGPPRPATSVNSTEETATTVVAAASSTSIPSSEATTPTPGASPPAPEMERPPAPESVGTEEMPEDGEPDAAELRRRRLQKLESPVAH

SEQ ID NO: 846704 - protein, 549 aa, Homo sapiens
MGKVFFGQLRAAEMEHLLERSWYAVTETCLAFTVFRDDFSPRFVALFTLLLFLKCFHWLAEDRVDFMERSPNISWLFHCRIVSLMFLLGILDFLFVSHAYHSILTRGASVQLVFGFEYAILMTMVLTIFIKYVLHSVDLQSENPWDNKAVYMLYTELFTGFIKVLLYMAFMTIMIKVHTFPLFAIRPMYLAMRQFKKAVTDAIMSRRAIRNMNTLYPDATPEELQAMDNVCIICREEMVTGAKRLPCNHIFHTSGSRPAPPAVWMSFVHRCQRSHHHPRSLRIRGHPLPPTPPPLLPQPPNFPQGLLPPFPPGMFPLWPPMGPFPPVPPPPSSGEAVAPPSTSAALSRPSGAATTTAAGTSATAASATASGPGSGSAPEAGPAPGFPFPPPWMGMPLPPPFAFPPMPVPPAGFAGLTPEELRALEGHERQHLEARLQSLRNIHTLLDAAMLQINQYLTVLASLGPPRPATSVNSTEETATTVVAAASSTSIPSSEATTPTPGASPPAPEMERPPAPESVGTEEMPEDGEPDAAELRRRRLQKLESPVAH

SEQ ID NO: 846705 - protein, 594 aa, Homo sapiens
MFRTAVMMAASLALTGAVVAHAYYLKHQFYPTVVYLTKSSPSMAVMGKVFFGQLRAAEMEHLLERSWYAVTETCLAFTVFRDDFSPRFVALFTLLLFLKCFHWLAEDRVDFMERSPNISWLFHCRIVSLMFLLGILDFLFVSHAYHSILTRGASVQLVFGFEYAILMTMVLTIFIKYVLHSVDLQSENPWDNKAVYMLYTELFTGFIKVLLYMAFMTIMIKVHTFPLFAIRPMYLAMRQFKKAVTDAIMSRRAIRNMNTLYPDATPEELQAMDNVCIICREEMVTGAKRLPCNHIFHTSGSRPAPPAVWMSFVHRCQRSHHHPRSLRIRGHPLPPTPPPLLPQPPNFPQGLLPPFPPGMFPLWPPMGPFPPVPPPPSSGEAVAPPSTSAALSRPSGAATTTAAGTSATAASATASGPGSGSAPEAGPAPGFPFPPPWMGMPLPPPFAFPPMPVPPAGFAGLTPEELRALEGHERQHLEARLQSLRNIHTLLDAAMLQINQYLTVLASLGPPRPATSVNSTEETATTVVAAASSTSIPSSEATTPTPGASPPAPEMERPPAPESVGTEEMPEDGEPDAAELRRRRLQKLESPVAH

SEQ ID NO: 846706 - protein, 561 aa, Homo sapiens
MSAAPKVRAGLLGKNVWYPHYSLPGPQHLLERSWYAVTETCLAFTVFRDDFSPRFVALFTLLLFLKCFHWLAEDRVDFMERSPNISWLFHCRIVSLMFLLGILDFLFVSHAYHSILTRGASVQLVFGFEYAILMTMVLTIFIKYVLHSVDLQSENPWDNKAVYMLYTELFTGFIKVLLYMAFMTIMIKVHTFPLFAIRPMYLAMRQFKKAVTDAIMSRRAIRNMNTLYPDATPEELQAMDNVCIICREEMVTGAKRLPCNHIFHTSGSRPAPPAVWMSFVHRCQRSHHHPRSLRIRGHPLPPTPPPLLPQPPNFPQGLLPPFPPGMFPLWPPMGPFPPVPPPPSSGEAVAPPSTSAALSRPSGAATTTAAGTSATAASATASGPGSGSAPEAGPAPGFPFPPPWMGMPLPPPFAFPPMPVPPAGFAGLTPEELRALEGHERQHLEARLQSLRNIHTLLDAAMLQINQYLTVLASLGPPRPATSVNSTEETATTVVAAASSTSIPSSEATTPTPGASPPAPEMERPPAPESVGTEEMPEDGEPDAAELRRRRLQKLESPVAH

SEQ ID NO: 846707 - protein, 170 aa, Homo sapiens [sequence omitted]

SEQ ID NO: 846708 - protein, 609 aa, Homo sapiens; identical to SEQ ID NO: 846701

SEQ ID NO: 846709 - protein, 348 aa, Homo sapiens
MFRTAVMMAASLALTGAVVAHAYYLKHQFYPTVVYLTKSSPSMAVLYIQAFVLVFLLGKVMGKVFFGQLRAAEMEHLLERSWYAVTETCLAFTVFRDDFSPRFVALFTLLLFLKCFHWLAEDRVDFMERSPNISWLFHCRIVSLMFLLGILDFLFVSHAYHSILTRGASVQLVFGFEYAILMTMVLTIFIKYVLHSVDLQSENPWDNKAVYMLYTELFTGFIKVLLYMAFMTIMIKVHTFPLFAIRPMYLAMRQFKKAVTDAIMSRRAIRNMNTLYPDATPEELQAMDNVCIICREEMVTGAKRLPCNHIFHTSCLRSWFQRQQTCPESRIAPSTRIAPSPECQDPLE

SEQ ID NO: 846710 - protein, 253 aa, Homo sapiens
MFRTAVMMAASLALTGAVVAHAYYLKHQFYPTVVYLTKSSPSMAVLYIQAFVLVFLLGKVMGKVFFGQLRAAEMEHLLERSWYAVTETCLAFTVFRDDFSPRFVALFTLLLFLKCFHWLAEDRVDFMERSPNISWLFHCRIVSLMFLLGILDFLFVSHAYHSILTRGASVQLVFGFEYAILMTMVLTIFIKYVLHSVDLQSENPWDNKAVYMLYTELFTGFIKVLLYMAFMTIMIKVHTFPLFAIRPMYLAMR

SEQ ID NO: 846711 - protein, 322 aa, Homo sapiens
MFRTAVMMAASLALTGAVVAHAYYLKHQFYPTVVYLTKSSPSMAVLYIQAFVLVFLLGKVMGKVFFGQLRAAEMEHLLERSWYAVTETCLAFTVFRDDFSPRFVALFTLLLFLKCFHWLAEDRVDFMERSPNISWLFHCRIVSLMFLLGILDFLFVSHAYHSILTRGASVQLVFGFEYAILMTMVLTIFIKYVLHSVDLQSENPWDNKAVYMLYTELFTGFIKVLLYMAFMTIMIKVHTFPLFAIRPMYLAMRQFKKAVTDAIMSRRAIRNMNTLYPDATPEELQAMDNVCIICREEMVTGAKRLPCNHIFHTRWEGPWGAC

SEQ ID NO: 846712 - protein, 131 aa, Homo sapiens
MSAAPKVRAGCWERMFGIHIIPCLAPSTFWNVPGTPSQRLVWPSPFFGMTSAPALLHSSLFFSSSNVSTGWLRTVWTLWNAAPTSPGSFTAALSVSEIQGRGREDWNVNRGPVLQSTGYPPQLYRTDNLGS

SEQ ID NO: 846713 - protein, 646 aa, Homo sapiens
MFRTAVMMAASLALTGAVVAHAYYLKHQFYPTVVYLTKSSPSMAVLYIQAFVLVFLLGKVMGKVFFGQLRAAEMEHLLERSWYAVTETCLAFTVFRDDFSPRFVALFTLLLFLKCFHWLAEDRVDFMERSPNISWLFHCRIVSLMFLLGILDFLFVSHAYHSILTRGASVQLVFGFEYAILMTMVLTIFIKYVLHSVDLQSENPWDNKAVYMLYTELFTGFIKVLLYMAFMTIMIKVHTFPLFAIRPMYLAMRQFKKAVTDAIMSRRAIRNMNTLYPDATPEELQAMDNVCIICREEMVTGAKRLPCNHIFHTSGSRPAPPAVWMSFVHRCQRSHHHPRSLRIRGHPLPPTPPPLLPQPPNFPQGLLPPFPPGMFPLWPPMGPFPPVPPPPSSGEAVAPPSTSAALSRPSGAATTTAAGTSATAASATASGPGSGSAPEAGPAPGFPFPPPWMGMPLPPPFAFPPMPVPPAGFAGLTPEELRALEGHERQHLEARLQSLRNIHTLLDAAMLQINQYLTVLASLGPPRPATSVNSTEETATTVVAAASSTSIPSSEATTPTPGASPPAPEMERPPGRCDWPPAGGAGNFSRFHFQSLCPQLLSQWAQRRCLRMESPMQQSSAGAACRSWSLLLPTDTAPAQPQPLLF

SEQ ID NO: 846714 - protein, 616 aa, Homo sapiens
ALQSTRSLSHSSVFPVLNFFPNGAVVAHAYYLKHQFYPTVVYLTKSSPSMAVLYIQAFVLVFLLGKVMGKVFFGQLRAAEMEHLLERSWYAVTETCLAFTVFRDDFSPRFVALFTLLLFLKCFHWLAEDRVDFMERSPNISWLFHCRIVSLMFLLGILDFLFVSHAYHSILTRGASVQLVFGFEYAILMTMVLTIFIKYVLHSVDLQSENPWDNKAVYMLYTELFTGFIKVLLYMAFMTIMIKVHTFPLFAIRPMYLAMRQFKKAVTDAIMSRRAIRNMNTLYPDATPEELQAMDNVCIICREEMVTGAKRLPCNHIFHTSGSRPAPPAVWMSFVHRCQRSHHHPRSLRIRGHPLPPTPPPLLPQPPNFPQGLLPPFPPGMFPLWPPMGPFPPVPPPPSSGEAVAPPSTSAALSRPSGAATTTAAGTSATAASATASGPGSGSAPEAGPAPGFPFPPPWMGMPLPPPFAFPPMPVPPAGFAGLTPEELRALEGHERQHLEARLQSLRNIHTLLDAAMLQINQYLTVLASLGPPRPATSVNSTEETATTVVAAASSTSIPSSEATTPTPGASPPAPEMERPPAPESVGTEEMPEDGEPDAAELRRRRLQKLESPVAH

SEQ ID NO: 846715 - protein, 478 aa, Homo sapiens
MTSAPALLHSSLFFSSSNVSTGWLRTVWTLWNAAPTSPGSFTAALSYAILMTMVLTIFIKYVLHSVDLQSENPWDNKAVYMLYTELFTGFIKVLLYMAFMTIMIKVHTFPLFAIRPMYLAMRQFKKAVTDAIMSRRAIRNMNTLYPDATPEELQAMDNVCIICREEMVTGAKRLPCNHIFHTSGSRPAPPAVWMSFVHRCQRSHHHPRSLRIRGHPLPPTPPPLLPQPPNFPQGLLPPFPPGMFPLWPPMGPFPPVPPPPSSGEAVAPPSTSAALSRPSGAATTTAAGTSATAASATASGPGSGSAPEAGPAPGFPFPPPWMGMPLPPPFAFPPMPVPPAGFAGLTPEELRALEGHERQHLEARLQSLRNIHTLLDAAMLQINQYLTVLASLGPPRPATSVNSTEETATTVVAAASSTSIPSSEATTPTPGASPPAPEMERPPAPESVGTEEMPEDGEPDAAELRRRRLQKLESPVAH

SEQ ID NO: 846716 - protein, 428 aa, Homo sapiens
MTMVLTIFIKYVLHSVDLQSENPWDNKAVYMLYTELFTGFIKVLLYMAFMTIMIKVHTFPLFAIRPMYLAMRQFKKAVTDAIMSRRAIRNMNTLYPDATPEELQAMDNVCIICREEMVTGAKRLPCNHIFHTSGSRPAPPAVWMSFVHRCQRSHHHPRSLRIRGHPLPPTPPPLLPQPPNFPQGLLPPFPPGMFPLWPPMGPFPPVPPPPSSGEAVAPPSTSAALSRPSGAATTTAAGTSATAASATASGPGSGSAPEAGPAPGFPFPPPWMGMPLPPPFAFPPMPVPPAGFAGLTPEELRALEGHERQHLEARLQSLRNIHTLLDAAMLQINQYLTVLASLGPPRPATSVNSTEETATTVVAAASSTSIPSSEATTPTPGASPPAPEMERPPAPESVGTEEMPEDGEPDAAELRRRRLQKLESPVAH

SEQ ID NO: 846717 - protein, 236 aa, Homo sapiens
MFPLWPPMGPFPPVPPPPSSGEAVAPPSTSAALSRPSGAATTTAAGTSATAASATASGPGSGSAPEAGPAPGFPFPPPWMGMPLPPPFAFPPMPVPPAGFAGLTPEELRALEGHERQHLEARLQSLRNIHTLLDAAMLQINQYLTVLASLGPPRPATSVNSTEETATTVVAAASSTSIPSSEATTPTPGASPPAPEMERPPAPESVGTEEMPEDGEPDAAELRRRRLQKLESPVAH

SEQ ID NO: 846718 - protein, 417 aa, Homo sapiens
MAFMKPVNRLCVEHVHSLFTGFIKVLLYMAFMTIMIKVHTFPLFAIRPMYLAMRQFKKAVTDAIMSRRAIRNMNTLYPDATPEELQAMDNVCIICREEMVTGAKRLPCNHIFHTSCLRSWFQRQQTCPTCRMDVLRASLPAQSPPPPEPADQGPPPAPHPPPLLPQPPNFPQGLLPPFPPGMFPLWPPMGPFPPVPPPPSSGEAVAPPSTSAALSRPSGAATTTAAGTSATAASATASGPGSGSAPEAGPAPGFPFPPPWMGMPLPPPFAFPPMPVPPAGFAGLTPEELRALEGHERQHLEARLQSLRNIHTLLDAAMLQINQYLTVLASLGPPRPATSVNSTEETATTVVAAASSTSIPSSEATTPTPGASPPAPEMERPPAPESVGTEEMPEDGEPDAAELRRRRLQKLESPVAH

SEQ ID NO: 846719 - protein, 609 aa, Homo sapiens; identical to SEQ ID NO: 846701

SEQ ID NO: 846720 - protein, 609 aa, Homo sapiens; identical to SEQ ID NO: 846701

SEQ ID NO: 846721 - protein, 198 aa, Homo sapiens
MSSRGHSTLPRTLMAPRMISEGDIGGIAQITSSLFLGRGSVASNRHLLQARGITCIVNATIEIPNFNWPQFEYVKVPLADMPHAPIGLYFDTVADKIHSVSRKHGATLVHCAAGVSRSATLCIAYLMKFHNVCLLEAYNWVKARRPVIRPNVGFWRQLIDYERQLFGKSTVKMVQTPYGIVPDVYEKESRHLMPYWGI

SEQ ID NO: 846722 - protein, 124 aa, Homo sapiens
TKEAPSRQSAHFGSASWQNRVMVKSWVLEGARCDCVSVSQLCHLLELYRDLLNLSCLACKMEMKGMVSTPTGSNKLHLIHNEETETRRDTVLGQSAKLEHSLDFEPSLPAPSLPAALSLSTPKP

SEQ ID NO: 846723 - protein, 198 aa, Homo sapiens; identical to SEQ ID NO: 846721

SEQ ID NO: 846724 - protein, 198 aa, Homo sapiens; identical to SEQ ID NO: 846721

SEQ ID NO: 846725 - protein, 198 aa, Homo sapiens; identical to SEQ ID NO: 846721

SEQ ID NO: 846726 - protein, 198 aa, Homo sapiens; identical to SEQ ID NO: 846721

SEQ ID NO: 846727 - protein, 164 aa, Homo sapiens
MSSRGHSTLPRTLMAPRMISEGDIGGIAQITSSLFLGRGSVASNRHLLQARGITCIVNATIEIPNFNWPQFEYVKVPLADMPHAPIGLYFDTVADKIHSVSRKHGATLVHCAAGVSRSATLCIAYLMKFHNVCLLEAYNWVKAQRRLLEATDRLRAPALWEVDS

SEQ ID NO: 846728 - protein, 170 aa, Homo sapiens
MSSRGHSTLPRTLMAPRMISEGDIGGIAQITSSLFLGRGSVASNRHLLQARGITCIVNATIEIPNFNWPQFEYVKVPLADMPHAPIGLYFDTVADKIHSVSRKHGATLVHCAAGVSRSATLCIAYLMKFHNVCLLEAYNWVKARRPVIRPNVGFWRQLNILNAKYSGTRL

SEQ ID NO: 846729 - protein, 198 aa, Homo sapiens; identical to SEQ ID NO: 846721

SEQ ID NO: 846730 - protein, 108 aa, Homo sapiens
PRLEDQWRRHPRPRAARTAGSTVPGPPPAPLYRDLLNLSCLACKMEMKGMVSTPTGSNKLHLIHNEETETRRDTVLGQSAKLEHSLDFEPSLPAPSLPAALSLSTPKP

SEQ ID NO: 846731 - protein, 198 aa, Homo sapiens; identical to SEQ ID NO: 846721

SEQ ID NO: 846732 - protein, 198 aa, Homo sapiens; identical to SEQ ID NO: 846721

SEQ ID NO: 846733 - protein, 103 aa, Homo sapiens
MRGVAEENVLERLIYRERDGVGKSEERGELRVADMRGEERCEDERGLKRRVEWLSEYIVSSGLAAVVNARDIDRLVASTKGPRREKLKVERVESAQSLCRVVY

SEQ ID NO: 846734 - protein, 538 aa, Homo sapiens
MEESVNQMQPLNEKQIANSQDGYVWQVTDMNRLHRFLCFGSEGGTYYIKEQKLGLENAEALIRLIEDGRGCEVIQEIKSFSQEGRTTKQEPMLFALAICSQCSDISTKQAAFKAVSEVCRIPTHLFTFIQFKKDLKESMKCGMWGRALRKAIADWYNEKGGMALALAVTKYKQRNGWSHKDLLRLSHLKPSSEGLAIVTKYITKGWKEVHELYKEKALSVETEKLLKYLEAVEKVKRTRDELEVIHLIEEHRLVREHLLTNHLKSKEVWKALLQEMPLTALLRNLGKMTANSVLEPGNSEVSLVCEKLCNEKLLKKARIHPFHILIALETYKTGHGLRGKLKWRPDEEILKALDAAFYKTFKTVEPTGKRFLLAVDVSASMNQRVLGSILNASTVAAAMCMVVTRTEKDSYVVAFSDEMVPCPVTTDMTLQQVLMAMSQIPAGGTDCSLPMIWAQKTNTPADVFIVFTDNETFAGGVHPAIALREYRKKMDIPAKLIVCGMTSNGFTIADPDDRGMLDMCGFDTGALDVIRNFTLDMI

SEQ ID NO: 846735 - protein, 538 aa, Homo sapiens; identical to SEQ ID NO: 846734

SEQ ID NO: 846736 - protein, 263 aa, Homo sapiens
MPLTALLRNLGKMTANSVLEPGNSEVSLVCEKLCNEKLLKKARIHPFHILIALETYKTGHGLRGKLKWRPDEEILKALDAAFYKTFKTVEPTGKRFLLAVDVSASMNQRVLGSILNASTVAAAMCMVVTRTEKDSYVVAFSDEMVPCPVTTDMTLQQVLMAMSQIPAGGTDCSLPMIWAQKTNTPADVFIVFTDNETFAGGVHPAIALREYRKKMDIPAKLIVCGMTSNGFTIADPDDRGMLDMCGFDTGALDVIRNFTLDMI

SEQ ID NO: 846737 - protein, 246 aa, Homo sapiens
PSSENQEKQNPWQPTTFHEKLLKKARIHPFHILIALETYKTGHGLRGKLKWRPDEEILKALDAAFYKTFKTVEPTGKRFLLAVDVSASMNQRVLGSILNASTVAAAMCMVVTRTEKDSYVVAFSDEMVPCPVTTDMTLQQVLMAMSQIPAGGTDCSLPMIWAQKTNTPADVFIVFTDNETFAGGVHPAIALREYRKKMDIPAKLIVCGMTSNGFTIADPDDRGMLDMCGFDTGALDVIRNFTLDMI

SEQ ID NO: 846738 - protein, 277 aa, Homo sapiens
MEESVNQMQPLNEKQIANSQDGYVWQVTDMNRLHRFLCFGSEGGTYYIKEQKLGLENAEALIRLIEDGRGCEVIQEIKSFSQEGRTTKQEPMLFALAICSQCSDISTKQAAFKAVSEVCRIPTHLFTFIQFKKDLKESMKCGMWGRALRKAIADWYNEKGGMALALAVTKYKQRNGWSHKDLLRLSHLKPSSEGLAIVTKYITKGWKEVHELYKEKALSVETEKLLKYLEAVEKVKRTRDELEVIHLIEEHRLVREHLLTNHLKSKEVSELYVTACD

SEQ ID NO: 846739 - protein, 293 aa, Homo sapiens
EEKEVPEDSLEECAITCSNSHGPYDSNQPHRKTKITFEEDKVDSTLIGSSSHVEWEDAVHIIPENESDDEEEEEKGPVSPRNLQESEEEEVPQESWDEVIRLSQFLLKGHRWDQVKKEDQEATGPRLSRELLAEKEPEVLQDSLDRCYSTPSVYLGLTDSCQPYRSAFYVLEQQRVGLAVDMDETPAAVGLLLLLWLSLPVRLPSFVVSQRCAGLLLAALRIQGVGCQVQVRTLREAGWEPFVRPQGRANSDQSSMSLTRIPGVEAGQTPRNYRSSPSRFRACPPWVTEPASR

SEQ ID NO: 846740 - protein, 538 aa, Homo sapiens; identical to SEQ ID NO: 846734

SEQ ID NO: 846741 - protein, 575 aa, Homo sapiens
EEKEVPEDSLEECAITCSNSHGPYDSNQPHRKTKITFEEDKVDSTLIGSSSHVEWEDAVHIIPENESDDEEEEEKGPVSPRNLQESEEEEVPQESWDEVIRLSQFLLKGHRWDQVKKEDQEATGPRLSRELLAEKEPEVLQDSLDRCYSTPSVYLGLTDSCQPYRSAFYVLEQQRVGLAVDMDEDPGGSGAVAVAVAVAARQAAFFCRFPALRRTSPGGAADPGGRLPGTGLAIVTKYITKGWKEVHELYKEKALSVETEKLLKYLEAVEKVKRTRDELEVIHLIEEHRLVREHLLTNHLKSKEVWKALLQEMPLTALLRNLGKMTANSVLEPGNSEVSLVCEKLCNEKLLKKARIHPFHILIALETYKTGHGLRGKLKWRPDEEILKALDAAFYKTFKTVEPTGKRFLLAVDVSASMNQRVLGSILNASTVAAAMCMVVTRTEKDSYVVAFSDEMVPCPVTTDMTLQQVLMAMSQIPAGGTDCSLPMIWAQKTNTPADVFIVFTDNETFAGGVHPAIALREYRKKMDIPAKLIVCGMTSNGFTIADPDDRGMLDMCGFDTGALDVIRNFTLDMI

SEQ ID NO: 846742 - protein, 538 aa, Homo sapiens; identical to SEQ ID NO: 846734

SEQ ID NO: 846743 - protein, 263 aa, Homo sapiens; identical to SEQ ID NO: 846736

SEQ ID NO: 846744 - protein, 293 aa, Homo sapiens; identical to SEQ ID NO: 846739

SEQ ID NO: 846745 - protein, 78 aa, Homo sapiens
WFHHCRPDDRGMLDMCGFDTGALGEYRKKMDIPAKLIVCGMTSNGFTIADPDDRGMLDMCGFDTGALDVIRNFTLDMI

SEQ ID NO: 846746 - protein, 234 aa, Homo sapiens
EEKEVPEDSLEECAITCSNSHGPYDSNQPHRKTKITFEEDKVDSTLIGSSSHVEWEDAVHIIPENESDDEEEEEKGPVSPRNLQESEEEEVPQESWDEVIRLSQFLLKGHRWDQVKKEDQEATGPRLSRELLAEKEPEVLQDSLDRCYSTPSVYLGLTDSCQPYRSAFYVLEQQRVGLAVDMDETPAAVGLLLLLWLSLPVRLPSFVVSQRCAGLLLAALRIQGVGCQVQDLQL

SEQ ID NO: 846747 - protein, 252 aa, Homo sapiens
MAAFGRQVLDWHRLIPLTWACMARQTPHLGEQRRTTASLLRKLTTASNGGVIEELSCVRSNNYVQEPECRRNLVQCLLEKQGTPVVQGSLELERVMSSLLDMGFSNAHINELLSVRRGASLQQLLDIISEFILLGLNPEPVCVVLKKSPQLLKLPIMQMRKRSSYLQKLGLGEGKLKRVLYCCPEIFTMRQQDINDTVRLLKEKCLFTVQQVTKILHSCPSVLREDLGQLEYKFQVRMTDSVISVVSGENDW

SEQ ID NO: 846748 - protein, 248 aa, Homo sapiens
MVLDWHRLIPLTWACMARQTPHLGEQRRTTASLLRKLTTASNGGVIEELSCVRSNNYVQEPECRRNLVQCLLEKQGTPVVQGSLELERVMSSLLDMGFSNAHINELLSVRRGASLQQLLDIISEFILLGLNPEPVCVVLKKSPQLLKLPIMQMRKRSSYLQKLGLGEGVERTLRGVLTVALNFTCARAYDLSGLKGRAFTGSSRRLAVPCSEDRPIQSCSPAGPPREVGPPIELAGPKRNTLANGGCN

SEQ ID NO: 846749 - protein, 381 aa, Homo sapiens
MAAFGRQVLDWHRLIPLTWACMARQTPHLGEQRRTTASLLRKLTTASNGGVIEELSCVRSNNYVQEPECRRNLVQCLLEKQGTPVVQGSLELERVMSSLLDMGFSNAHINELLSVRRGASLQQLLDIISEFILLGLNPEPVCVVLKKSPQLLKLPIMQMRKRSSYLQKLGLGEGKLKRVLYCCPEIFTMRQQDINDTVRLLKEKCLFTVQQVTKILHSCPSVLREDLGQLEYKFQYAYFRMGIKHPDIVKSEYLQYSLTKIKQRHIYLERLGRYQTPDKKGQTQIPNPLLKDILRVSEAEFLARTACTSVEEFQVFKKLLAREEEESESSTSDDKRASLDEDEDDDDEEDNDEDDNDEDDDDEDDDEAEDNDEDEDDDEEE

SEQ ID NO: 846750 - protein, 381 aa, Homo sapiens; identical to SEQ ID NO: 846749

SEQ ID NO: 846751 - protein, 395 aa, Homo sapiens
  misc_feature (9)..(9): Xaa can be any naturally occurring amino acid
EKYVKKEEXRSGIPGCCVRPEVLDWHRLIPLTWACMARQTPHLGEQRRTTASLLRKLTTASNGGVIEELSCVRSNNYVQEPECRRNLVQCLLEKQGTPVVQGSLELERVMSSLLDMGFSNAHINELLSVRRGASLQQLLDIISEFILLGLNPEPVCVVLKKSPQLLKLPIMQMRKRSSYLQKLGLGEGKLKRVLYCCPEIFTMRQQDINDTVRLLKEKCLFTVQQVTKILHSCPSVLREDLGQLEYKFQYAYFRMGIKHPDIVKSEYLQYSLTKIKQRHIYLERLGRYQTPDKKGQTQIPNPLLKDILRVSEAEFLARTACTSVEEFQVFKKLLAREEEESESSTSDDKRASLDEDEDDDDEEDNDEDDNDEDDDDEDDDEAEDNDEDEDDDEEE

SEQ ID NO: 846752 - protein, 375 aa, Homo sapiens [sequence omitted]

SEQ ID NO: 846753 - protein, 381 aa, Homo sapiens; identical to SEQ ID NO: 846749

SEQ ID NO: 846754 - protein, 381 aa, Homo sapiens; identical to SEQ ID NO: 846749

SEQ ID NO: 846755 - protein, 95 aa, Homo sapiens
EGRGRTAASGAVTAAIFSALWLRSAVSSLVLQRDCKEKDFCFAKEKQLGDSVHIATVESDGSGSPLPVEGVPAKGRCRRTNLLLCNCQSCAFQLR

SEQ ID NO: 846756 - protein, 95 aa, Homo sapiens; identical to SEQ ID NO: 846755

SEQ ID NO: 846757 - protein, 220 aa, Homo sapiens
ARYELGLNRPRLCIFSALWLRSAVVLDWHRLIPLTWACMARQTPHLGEQRRTTASLLRKLTTASNGGVIEELSCVRSNNYVQEPECRRNLVQCLLEKQGTPVVQGSLELERVMSSLLDMGFSNAHINELLSVRRGASLQQLLDIISEFILLGLNPEPVCVVLKKSPQLLKLPIMQMRKRSSYLQKLGLGEEGTRSCRFWLGAVAHACNPRSLGGRGRQIT

SEQ ID NO: 846758 - protein, 381 aa, Homo sapiens; identical to SEQ ID NO: 846749

SEQ ID NO: 846759 - protein, 360 aa, Homo sapiens [sequence omitted]

SEQ ID NO: 846760 - protein, 193 aa, Homo sapiens
MRQQDINDTVRLLKEKCLFTVQQVTKILHSCPSVLREDLGQLEYKFQYAYFRMGIKHPDIVKSEYLQYSLTKIKQRHIYLERLGRYQTPDKKGQTQIPNPLLKDILRVSEAEFLARTACTSVEEFQVFKKLLAREEEESESSTSDDKRASLDEDEDDDDEEDNDEDDNDEDDDDEDDDEAEDNDEDEDDDEEE

SEQ ID NO: 846761 - protein, 241 aa, Homo sapiens
MAAFGRQVLDWHRLIPLTWACMARQTPHLGEQRRTTASLLRKLTTASNGGVIEELSCVRSNNYVQEPECRRNLVQCLLEKQGTPVVQGSLELERVMSSLLDMGFSNAHINELLSVRRGASLQQLLDIISEFILLGLNPEPVCVVLKKSPQLLKLPIMQMRKRSSYLQKLGLGEGKLKRVLYCCPEIFTMRQQDINDTVRLLKEKCLFTVQQVTKILHSCPSVLREDLGQLEYKFQQPRLTA

SEQ ID NO: 846762 - protein, 711 aa, Homo sapiens
AGWLLSGTPLCRQGLHHLHSQGKIHRDIKGANLLLTLQGDVKLADFGVSGELTASVAKRRSFIGTPYWMAPEVAAVERKGGYNELCDVWALGITAIELGELQPPLFHLHPMRALMLMSKSSFQPPKLRDKTRWTQNFHHFLKLALTKNPKKRPTAEKLLQHPFTTQQLPRALLTQLLDKASDPHLGTPSPEDCELETYDMFPDTIHSRGQHGPAERTPSEIQFHQVKFGAPRRKETDPLNEPWEEEWTLLGKEELSGSLLQSVQEALEERSLTIRSASEFQELDSPDDTMGTIKRAPFLGPLPTDPPAEEPLSSPPGTLPPPPSGPNSSPLLPTAWATMKQREDPERSSCHGLPPTPKVHMGACFSKVFNGCPLRIHAAVTWIHPVTRDQFLVVGAEEGIYTLNLHELHEDTLEKLISHRCSWLYCVNNVLLSLSGKSTHIWAHDLPGLFEQRRLQQQVPLSIPTNRLTQRIIPRRFALSTKIPDTKGCLQCRVVRNPYTGATFLLAALPTSLLLLQWYEPLQKFLLLKNFSSPLPSPAGMLEPLVLDGKELPQVCVGAEGPEGPGCRVLFHVLPLEAGLTPDILIPPEGIPGSAQQVIQVDRDTILVSFERCVRIVNMQGEPTATLAPELTFDFPIETVVCLQDSVLAFWSHGMQGRSLDTNEVTQEITDETRIFRVLGAHRDIILESIPTDNPEAHSNLYILTGHQSTY

SEQ ID NO: 846763 - protein, 812 aa, Homo sapiens
APARPAARPARRAMALLRDVSLQDPRDRFELLQRVGAGTYGDVYKVRRDGRESREEGASPAPRAGSSPRPRPPSRFTLLPLQARDTVTSELAAVKIVKLDPGDDISSLQQEITILRECRHPNVVAYIGSYLRNDRLWICMEFCGGGSLQEIYHATGPLEERQIAYVCREATEGAPPPAFSGEDPQRHQADFGVSGELTASVAKRRSFIGTPYWALMLMSKSSFQPPKLRDKTRWTQNFHHFLKLALTKNPKKRPTAEKLLQHPFTTQQLPRALLTQLLDKASDPHLGTPSPEDCELETYDMFPDTIHSRGQHGPAERTPSEIQFHQVKFGAPRRKETDPLNEPWEEEWTLLGKEELSGSLLQSVQEALEERSLTIRSASEFQELDSPDDTMGTIKRAPFLGPLPTDPPAEEPLSSPPGTLPPPPSGPNSSPLLPTAWATMKQREDPERSSCHGLPPTPKVHMGACFSKVFNGCPLRIHAAVTWIHPVTRDQFLVVGAEEGIYTLNLHELHEDTLEKLISHRCSWLYCVNNVLLSLSGKSTHIWAHDLPGLFEQRRLQQQVPLSIPTNRLTQRIIPRRFALSTKIPDTKGCLQCRVVRNPYTGATFLLAALPTSLLLLQWYEPLQKFLLLKNFSSPLPSPAGMLEPLVLDGKELPQVCVGAEGPEGPGCRVLFHVLPLEAGLTPDILIPPEGIPGSAQQVIQVDRDTILVSFERCVRIVNMQGEPTATLAPELTFDFPIETVVCLQDSVLAFWSHGMQGRSLDTNEVTQEITDETRIFRVLGAHRDIILESIPTDNPEAHSNLYILTGHQSTY

SEQ ID NO: 846764 - protein, 751 aa, Homo sapiens
AGWLLSGTPLCRQGLHHLHSQGKIHRDIKGANLLLTLQGDVKLADFGVSGELTASVAKRRSFIGTPYWMAPEVAAVERKGGYNELCDVWALGITAIELGELQPPLFHLHPMRALMLMSKSSFQPPKLRDKTRWTQNFHHFLKLALTKNPKKRPTAEKLLQHPFTTQQLPRALLTQLLDKASDPHLGTPSPEDCELETYDMFPDTIHSRGQHGPAERTPSEIQFHQVKFGAPRRKETDPLNEPWEEEWTLLGKEELSGSLLQSVQEALEERSLTIRSASEFQVPHRGRLELGSRPLQRVRLEWDVVTGQPGNGRAGPCPSYQELDSPDDTMGTIKRAPFLGPLPTDPPAEEPLSSPPGTLPPPPSGPNSSPLLPTAWATMKQREDPERSSCHGLPPTPKVHMGACFSKVFNGCPLRIHAAVTWIHPVTRDQFLVVGAEEGIYTLNLHELHEDTLEKLISHRCSWLYCVNNVLLSLSGKSTHIWAHDLPGLFEQRRLQQQVPLSIPTNRLTQRIIPRRFALSTKIPDTKGCLQCRVVRNPYTGATFLLAALPTSLLLLQWYEPLQKFLLLKNFSSPLPSPAGMLEPLVLDGKELPQVCVGAEGPEGPGCRVLFHVLPLEAGLTPDILIPPEGIPGSAQQVIQVDRDTILVSFERCVRIVNMQGEPTATLAPELTFDFPIETVVCLQDSVLAFWSHGMQGRSLDTNEVTQEITDETRIFRVLGAHRDIILESIPTDNPEAHSNLYILTGHQSTY

SEQ ID NO: 846765 - protein, 711 aa, Homo sapiens; identical to SEQ ID NO: 846762

SEQ ID NO: 846766 - protein, 711 aa, Homo sapiens; identical to SEQ ID NO: 846762

SEQ ID NO: 846767 - protein, 711 aa, Homo sapiens; identical to SEQ ID NO: 846762

SEQ ID NO: 846768 - protein, 95 aa, Homo sapiens
PEHPCCPLELLQPSAQPSWDAGAAVCLQDSVLAFWSHGMQGRSLDTNEVTQEITDETRIFRVLGAHRDIILESIPTDNPEAHSNLYILTGHQSTY

SEQ ID NO: 846769 - protein, 833 aa, Homo sapiens
APARPAARPARRAMALLRDVSLQDPRDRFELLQRVGAGTYGDVYKARDTVTSELAAVKIVKLDPGDDISSLQQEITILRECRHPNVVAYIGSYLRNDRLWICMEFCGGGSLQEIYHATGPLEERQIAYVCRERLKGLHHLHSQGKIHRDIKGANLLLTLQGDVKLADFGVSGELTASVAKRRSFIGTPYWMAPEVAAVERKGGYNELCDVWALGITAIELGELQPPLFHLHPMRALMLMSKSSFQPPKLRDKTRWTQNFHHFLKLALTKNPKKRPTAEKLLQHPFTTQQLPRALLTQLLDKASDPHLGTPSPEDCELETYDMFPDTIHSRGQHGPAERTPSEIQFHQVKFGAPRRKETDPLNEPWEEEWTLLGKEELSGSLLQSVQEALEERSLTIRSASEFQELDSPDDTMGTIKRAPFLGPLPTDPPAEEPLSSPPGTLPPPPSGPNSSPLLPTAWATMKQREDPERSSCHGLPPTPKVHMGACFSKVFNGCPLRIHAAVTWIHPVTRDQFLVVGAEEGIYTLNLHELHEDTLEKLISHRCSWLYCVNNVLLSLSGKSTHIWAHDLPGLFEQRRLQQQVPLSIPTNRLTQRIIPRRFALSTKIPDTKGCLQCRVVRNPYTGATFLLAALPTSLLLLQWYEPLQKFLLLKNFSSPLPSPAGMLEPLVLDGKELPQVCVGAEGPEGPGCRVLFHVLPLEAGLTPDILIPPEGIPGSAQQVIQVDRDTILVSFERCVRIVNMQGEPTATLAPELTFDFPIETVVCLQDSVLAFWSHGMQGRSLDTNEVTQEITDETRIFRVLGAHRDIILESIPTDNPEAHSNLYILTGHQSTY

SEQ ID NO: 846770 - protein, 870 aa, Homo sapiens
APARPAARPARRAMALLRDVSLQDPRDRFELLQRVGAGTYGDVYKVRRDGRESREEGASPAPRAGSSPRPRPPSRFTLLPLQARDTVTSELAAVKIVKLDPGDDISSLQQEITILRECRHPNVVAYIGSYLRNDRLWICMEFCGGGSLQEIYHATGPLEERQIAYVCRERLKGLHHLHSQGKIHRDIKGANLLLTLQGDVKLADFGVSGELTASVAKRRSFIGTPYWMAPEVAAVERKGGYNELCDVWALGITAIELGELQPPLFHLHPMRALMLMSKSSFQPPKLRDKTRWTQNFHHFLKLALTKNPKKRPTAEKLLQHPFTTQQLPRALLTQLLDKASDPHLGTPSPEDCELETYDMFPDTIHSRGQHGPAERTPSEIQFHQVKFGAPRRKETDPLNEPWEEEWTLLGKEELSGSLLQSVQEALEERSLTIRSASEFQELDSPDDTMGTIKRAPFLGPLPTDPPAEEPLSSPPGTLPPPPSGPNSSPLLPTAWATMKQREDPERSSCHGLPPTPKVHMGACFSKVFNGCPLRIHAAVTWIHPVTRDQFLVVGAEEGIYTLNLHELHEDTLEKLISHRCSWLYCVNNVLLSLSGKSTHIWAHDLPGLFEQRRLQQQVPLSIPTNRLTQRIIPRRFALSTKIPDTKGCLQCRVVRNPYTGATFLLAALPTSLLLLQWYEPLQKFLLLKNFSSPLPSPAGMLEPLVLDGKELPQVCVGAEGPEGPGCRVLFHVLPLEAGLTPDILIPPEGIPGSAQQVIQVDRDTILVSFERCVRIVNMQGEPTATLAPELTFDFPIETVVCLQDSVLAFWSHGMQGRSLDTNEVTQEITDETRIFRVLGAHRDIILESIPTDNPEAHSNLYILTGHQSTY

SEQ ID NO: 846771 - protein, 740 aa, Homo sapiens
AGWLLSGTPLCRQGLHHLHSQGKIHRDIKGANLLLTLQGDVKLADFGVSGELTASVAKRRSFIGTPYWMAPEVAAVERKGGYNELCDVWALGITAIELGELQPPLFHLHPMRALMLMSKSSFQPPKLRDKTRWTQNFHHFLKLALTKNPKKRPTAEKLLQHPFTTQQLPRALLTQLLDKASDPHLGTPSPEDCELETYDMFPDTIHSRGQHGPAERTPSEIQFHQVKFGAPRRKETDPLNEPWEEEWTLLGKEELSGSLLQSVQEALEERSLTIRSASEFQELDSPDDTMGTIKRAPFLGPLPTDPPAEEPLSSPPGTLPPPPSGPNSSPLLPTAWATMKQREDPERSSCHGLPPTPKVHMGACFSKVFNGCPLRIHAAVTWIHPVTRDQFLVVGAEEGIYTLNLHELHEDTLEKLISHRCSWLYCVNNVLLSLSGKSTHIWAHDLPGLFEQRRLQQQVPLSIPTNRLTQRIIPRRFALSTKIPDTKGCLQCRVGKKWAGRGGAGPGGGQRRPSPVPTACSLPVRNPYTGATFLLAALPTSLLLLQWYEPLQKFLLLKNFSSPLPSPAGMLEPLVLDGKELPQVCVGAEGPEGPGCRVLFHVLPLEAGLTPDILIPPEGIPGSAQQVIQVDRDTILVSFERCVRIVNMQGEPTATLAPELTFDFPIETVVCLQDSVLAFWSHGMQGRSLDTNEVTQEITDETRIFRVLGAHRDIILESIPTDNPEAHSNLYILTGHQSTY

SEQ ID NO: 846772 - protein, 473 aa, Homo sapiens
PWRMETDPLNEPWEEEWTLLGKEELSGSLLQSVQEALEERSLTIRSASEFQELDSPDDTMGTIKRAPFLGPLPTDPPAEEPLSSPPGPNSSPLLPTAWATMKQREDPERSSCHGLPPTPKVHMGACFSKVFNGCPLRIHAAVTWIHPVTRDQFLVVGAEEGIYTLNLHELHEDTLEKLISHRCSWLYCVNNVLLSLSGKSTHIWAHDLPGLFEQRRLQQQVPLSIPTNRLTQRIIPRRFALSTKIPDTKGCLQCRVVRNPYTGATFLLAALPTSLLLLQWYEPLQKFLLLKNFSSPLPSPAGMLEPLVLDGKELPQVCVGAEGPEGPGCRVLFHVLPLEAGLTPDILIPPEGIPGSAQQVIQVDRDTILVSFERCVRIVNMQGEPTATLAPELTFDFPIETVVCLQDSVLAFWSHGMQGRSLDTNEVTQEITDETRIFRVLGAHRDIILESIPTDNPEAHSNLYILTGHQSTY

SEQ ID NO: 846773 - protein, 305 aa, Homo sapiens
PWRMETDPLNDRGRKSGHYCVNNVLLSLSGKSTHIWAHDLPGLFEQRRLQQQVPLSIPTNRLTQRIIPRRFALSTKIPDTKGCLQCRVVRNPYTGATFLLAALPTSLLLLQWYEPLQKFLLLKNFSSPLPSPAGMLEPLVLDGKELPQVCVGAEGPEGPGCRVLFHVLPLEAGLTPDILIPPEGIPGSAQQVIQVDRDTILVSFERCVRIVNMQGEPTATLAPELTFDFPIETVVCLQDSVLAFWSHGMQGRSLDTNEVTQEITDETRIFRVLGAHRDIILESIPTDNPEAHSNLYILTGHQSTY

SEQ ID NO: 846774 - protein, 723 aa, Homo sapiens
PLPIVYGPAWLRAALWEYDMARELRALLLWGRRLRPLLRAPALAAVPGGKPILCPRRTTAQLGPRRNPAWSLQAGRLFSTQTAEDKEEPLHSIISSTESVQGSTSKHEFQAETKKLLDIVARSLYSEKEVFIRELISNASDALEKLRHKLVSDGQALPEMEIHLQTNAEKGTITIQDTGIGMTQEELVSNLGTIARSGSKAFLDALQNQAEASSKIIGQFGVGFYSAFMVADRVEVYSRSAAPGSLGYQWLSDGSGVFEIAEASGVRTGTKIIIHLKSDCKEFSSEARVRDVVTKYSNFVSFPLYLNGRRMNTLQAIWMMDPKDVREWQHEEFYRYVAQAHDKPRYTLHYKTDAPLNIRSIFYVPDMKPSMFDVSRELGSSVALYSRKVLIQTKATDILPKWLRFIRGVVDSEDIPLNLSRELLQESALIRKLRDVLQQRLIKFFIDQSKKDAEKYAKFFEDYGLFMREGIVTATEQEVKEDIAKLLRYESSALPSGQLTSLSEYASRMRAGTRNIYYLCAPNRHLAEHSPYYEAMKKKDTEVLFCFEQFDELTLLHLREFDKKKLISVETDIVVDHYKEEKFEDRSPAAECLSEKETEELMAWMRNVLGSRVTNVKVTLRLDTHPAMVTVLEMGAARHFLRMQQLAKTQEERAQLLQPTLEINPRHALIKKLNQLRASEPGLAQLLVDQIYENAMIAAGLVDDPRAMVGRLNELLVKALERH

SEQ ID NO: 846775 - protein, 723 aa, Homo sapiens; identical to SEQ ID NO: 846774

SEQ ID NO: 846776 - protein, 705 aa, Homo sapiens
PLPIVYGPAWLRAALWEYDMARELRALLLWGRRLRPLLRAPALAAVPGGKPILCPRRTTAQLGPRRNPAWSLQAGRLFSTQTAEDKEEPLHSIISSTESVQGSTSKHEFQAETKKLLDIVARSLYSEKEVFIRELISNASDALEKLRHKLVSDGQALPEMEIHLQTNAEKGTITIQDTGIGMTQEELVSNLGTIARSGSKAFLDALQNQAEASSKIIGQFGVGFYSAFMVADRVEVYSRSAAPGSLGYQWLSDGSGVFEIAEASGVRTGTKIIIHLKSDCKEFSSEARVRDVVTKYSNFVSFPLYLNGRRMNTLQAIWMMDPKDVREWQHEEFYRYVAQAHDKPRYTLHYKTDAPLNIRSIFYVPDMKPSMFDVSRELGSSVALYSRKVLIQTKATDILPKWLRFIRGVVDSEDIPLNLSRELLQESALIRKLRDVLQQRLIKFFIDQSKEGIVTATEQEVKEDIAKLLRYESSALPSGQLTSLSEYASRMRAGTRNIYYLCAPNRHLAEHSPYYEAMKKKDTEVLFCFEQFDELTLLHLREFDKKKLISVETDIVVDHYKEEKFEDRSPAAECLSEKETEELMAWMRNVLGSRVTNVKVTLRLDTHPAMVTVLEMGAARHFLRMQQLAKTQEERAQLLQPTLEINPRHALIKKLNQLRASEPGLAQLLVDQIYENAMIAAGLVDDPRAMVGRLNELLVKALERH

SEQ ID NO: 846777 - protein, 376 aa, Homo sapiens
PLPIVYGPAWLRAALWEYDMARELRALLLWGRRLRPLLRAPALAAVPGGKPILCPRRTTAQLGPRRNPAWSLQAGRLFSTQTAEDKEEPLHSIISSTESVQGSTSKHEFQAETKKLLDIVARSLYSEKEVFIRELISNASDALEKLRHKLVSDGQALPEMEIHLQTNAEKGTITIQDTGIGMTQEELVSNLGTIARSGSKAFLDALQNQAEASSKIIGQFGVGFYSAFMVADRVEVYSRSAAPGSLGYQWLSDGSGVFEIAEASGVRTGTKIIIHLKSDCKEFSSEARVRDVVTKYSNFVSFPLYLNGRRMNTLQAIWMMDPKDVREWQHEEFYRYVAQAHDKPRYTLHYKTDAPLNIRSIFYVPDMVWWTVRTFP

SEQ ID NO: 846778 - protein, 677 aa, Homo sapiens
PLPIVYGPAWLRAALWEYDMARELRALLLWGRRLRPLLRAPALAAVPGGKPILCPRRTTAQLGPRRNPAWSLQAGRLFSTQTAEDKEEPLHSIISSTESVQGSTSKHEFQAETKKLLDIVARSLYSEKEVFIRELISNASDALEKLRHKLVSDGQALPEMEIHLQTNAEKGTITIQDTGIGMTQEELVSNLGTIARSGSKAFLDALQNQAEASSKIIGQFGVGFYSAFMVADRVEVYSRSAAPGSLGYQWLSDGSGVFEIAEASGVRTGTKIIIHLKSDCKEFSSEARVRDVVTKYSNFVSFPLYLNGRRMNTLQAIWMMDPKDVREWQHEEFYRYVAQAHDKPRYTLHYKTDAPLNIRSIFYVPDMKPSMFDVSRELGSSVALYSRKVLIQTKATDILPKWLRFIRGVVDSEDIPLNLSRELLQESALIRKLRDVLQQRLIKFFIDQSKKDAEKYAKFFEDYGLFMREGIVTATEQEVKEDIAKLLRYESSALPSGQLTSLSEYASRMRAGTRNIYYLCAPNRHLAEHSPYYEAMKKKDTEVLFCFEQFDELTLLHLREFDKKKLISVETDIVVDHYKEEKFEDRSPAAECLSEKETEELMAWMRNVLGSRVTNVKVTLRLDTHPAMVTVLEMGAARHFLRMQQLAKTQEERAQLLQPTLEINPRHAHITSGRARS

SEQ ID NO: 846779 - protein, 673 aa, Homo sapiens
PLPIVYGPAWLRAALWEYDMARELRALLLWGRRLRPLLRAPALAAVPGGKPILCPRRTTAQLGPRRNPAWSLQAGRLFSTQTAEDKEEPLHSIISSTESVQGSTSKHEFQAETKKLLDIVARSLYSEKEVFIRELISNASDALEKLRHKLVSDGQALPEMEIHLQTNAEKGTITIQDTGIGMTQEELVSNLGTIARSGSKAFLDALQNQAEASSKIIGQFGVGFYSAFMVADRVEVYSRSAAPGSLGYQWLSDGSGVFEIAEASGVRTGTKIIIHLKSDCKEFSSEARVRDVVTKYSNFVSFPLYLNGRRMNTLQAIWMMDPKDVREWQHEEFYRYVAQAHDKPRYTLHYKTDAPLNIRSIFYVPDMKPSMFDVSRELGSSVALYSRKVLIQTKATDILPKWLRFIRGVVDSEDIPLNLSRELLQESALIRKLRDVLQQRLIKFFIDQSKKDAEKYAKFFEDYGLFMREGIVTATEQEVKEDIAKLLRYESSALPSGQLTSLSEYASRMRAGTRNIYYLCAPNRHLAEHSPYYEAMKKKDTEVLFCFEQFDELTLLHLREFDKKKLISVETDIVVDHYKEEKFEDRSPGDPPTGHPPCHGHRAGDGGCPPLPAHAAAGQDPGGARTAPAAHAGDQPQARAHQEAESAARKRAWPGSAAGGSDIRERHDCCWTC

SEQ ID NO: 846780 - protein, 664 aa, Homo sapiens
PLPIVYGPAWLRAALWEYDMARELRALLLWGRRLRPLLRAPALAAVPGGKPILCPRRTTAQLGPRRNPAWSLQAGRLFSTQTAEDKEEPLHSIISSTESVQGSTSKHEFQAETKKLLDIVARSLYSEKEVFIRELISNASDALEKLRHKLVSDGQALPEMEIHLQTNAEKGTITIQDTGIGMTQEELVSNLGTIARSGSKAFLDALQNQAEASSKIIGQFGVGFYSAFMVADRVEVYSRSAAPGSLGYQWLSDGSGVFEIAEASGVRTGTKIIIHLKSDCKEFSSEARVRDVVTKYSNFVSFPLYLNGRRMNTLQAIWMMDPKDVREWQHEEFYRYVAQAHDKPRYTLHYKTDAPLNIRSIFYVPDMKPSMFDVSRELGSSVALYSRKVLIQTKATDILPKWLRFIRGVVDSEDIPLNLSRELLQESALIRKLRDVLQQRLIKFFIDQSKKDAEKYAKFFEDYGLFMREGIVTATEQEVKEDIAKLLRYESSALPSGQLTSLSEYASRMRAGTRNIYYLCAPNRHLAEHSPYYEAMKKKDTEVLFCFEQFDELTLLHLREFDKKKLISVETDIVVDHYKEEKFEDRSPAAECLSEKETEELMAWMRNVLGSRVTNVKTSLTGERTVRRDNHRSTTTEEQTHRLDSARAGHTHRAGEATRQGGAP

SEQ ID NO: 846781 - protein, 664 aa, Homo sapiens
PLPIVYGPAWLRAALWEYDMARELRALLLWGRRLRPLLRAPALAAVPGGKPILCPRRTTAQLGPRRNPAWSLQAGRLFSTQTAEDKEEPLHSIISSTESVQGSTSKHEFQAETKKLLDIVARSLYSEKEVFIRELISNASDALEKLRHKLVSDGQALPEMEIHLQTNAEKGTITIQDTGIGMTQEELVSNLGTIARSGSKAFLDALQNQAEASSKIIGQFGVGFYSAFMVADRVEVYSRSAAPGSLGYQWLSDGSGVFEIAEASGVRTGTKIIIHLKSDCKEFSSEARVRDVVTKYSNFVSFPLYLNGRRMNTLQAIWMMDPKDVREWQHEEFYRYVAQAHDKPRYTLHYKTDAPLNIRSIFYVPDMKPSMFDVSRELGSSVALYSRKVLIQTKATDILPKWLRFIRGVVDSEDIPLNLSRELLQESALIRKLRDVLQQRLIKFFIDQSKKDAEKYAKFFEDYGLFMREGIVTATEQEVKEDIAKLLRYESSALPSGQLTSLSEYASRMRAGTRNIYYLCAPNRHLAEHSPYYEAMKKKDTEVLFCFEQFDELTLLHLREFDKKKLISVETDIVVDHYKEEKFEDRSPETQEERAQLLQPTLEINPRHALIKKLNQLRASEPGLAQLLVDQIYENAMIAAGLVDDPRAMVGRLNELLVKALERH

SEQ ID NO: 846782 - protein, 600 aa, Homo sapiens
PLPIVYGPAWLRAALWEYDMARELRALLLWGRRLRPLLRAPALAAVPGGKPILCPRRTTAQLGPRRNPAWSLQAGRLFSTQTAEDKEEPLHSIISSTESVQGSTSKHEFQAETKKLLDIVARSLYSEKEVFIRELISNASDALEKLRHKLVSDGQALPEMEIHLQTNAEKGTITIQDTGIGMTQEELVSNLGTIARSGSKAFLDALQNQAEASSKIIGQFGVGFYSAFMVADRVEVYSRSAAPGSLGYQWLSDGSGVFEIAEASGVRTGTKIIIHLKSDCKEFSSEARVRDVVTKYSNFVSFPLYLNGRRMNTLQAIWMMDPKDVREWQHEEFYRYVAQAHDKPRYTLHYKTDAPLNIRSIFYVPDMKPSMFDVSRELGSSVALYSRKVLIQTKATDILPKWLRFIRGVVDSEDIPLNLSRELLQESALIRKLRDVLQQRLIKFFIDQSKKDAEKYAKFFEDYGLFMREGIVTATEQEVKEDIAKLLRYESSALPSGQLTSLSEYASRMRAGTRNIYYLCAPNRHLAEHSPYYEAMKKKDTEVLFCFEQFDELTLLHLREFDKKKLISVETDIVVDHYKEEKFEDRSPDIRERHDCCWTC

SEQ ID NO: 846783 - protein, 560 aa, Homo sapiens
PLPIVYGPAWLRAALWEYDMARELRALLLWGRRLRPLLRAPALAAVPGGKPILCPRRTTAQLGPRRNPAWSLQAGRLFSTQTAEDKEEPLHSIISSTESVQGSTSKHEFQAETKKLLDIVARSLYSEKEVFIRELISNASDALEKLRHKLVSDGQALPEMEIHLQTNAEKGTITIQDTGIGMTQEELVSNLGTIARSGSKAFLDALQNQAEASSKIIGQFGVGFYSAFMVADRVEVYSRSAAPGSLGYQWLSDGSGVFEIAEASGVRTGTKIIIHLKSDCKEFSSEARVRDVVTKYSNFVSFPLYLNGRRMNTLQAIWMMDPKDVREWQHEEFYRYVAQAHDKPRYTLHYKTDAPLNIRSIFYVPDMKPSMFDVSRELGSSVALYSRKVLIQTKATDILPKWLRFIRGVVDSEDIPLNLSRELLQESALIRKLRDVLQQRLIKFFIDQSKKDAEKYAKFFEDYGLFMREGIVTATEQEVKEDIAKLLRYESSALPSGQLTSLSEYASRMRAGTRNIYYLCAPNRHLAEHSPYYEAMKKKDTEVGERWVGRAPGAATWGGS

SEQ ID NO: 846784 - protein, 608 aa, Homo sapiens
GRRKLRLGTRPGCWVFIRELISNASDALEKLRHKLVSDGQALPEMEIHLQTNAEKGTITIQDTGIGMTQEELVSNLGTIARSGSKAFLDALQNQAEASSKIIGQFGVGFYSAFMVADRVEVYSRSAAPGSLGYQWLSDGSGVFEIAEASGVRTGTKIIIHLKSDCKEFSSEARVRDVVTKYSNFVSFPLYLNGRRMNTLQAIWMMDPKDVREWQHEEFYRYVAQAHDKPRYTLHYKTDAPLNIRSIFYVPDMKPSMFDVSRELGSSVALYSRKVLIQTKATDILPKWLRFIRGVVDSEDIPLNLSRELLQESALIRKLRDVLQQRLIKFFIDQSKKDAEKYAKFFEDYGLFMREGIVTATEQEVKEDIAKLLRYESSALPSGQLTSLSEYASRMRAGTRNIYYLCAPNRHLAEHSPYYEAMKKKDTEVLFCFEQFDELTLLHLREFDKKKLISVETDIVVDHYKEEKFEDRSPAAECLSEKETEELMAWMRNVLGSRVTNVKVTLRLDTHPAMVTVLEMGAARHFLRMQQLAKTQEERAQLLQPTLEINPRHALIKKLNQLRASEPGLAQLLVDQIYENAMIAAGLVDDPRAMVGRLNELLVKALERH

SEQ ID NO: 846785 - protein, 565 aa, Homo sapiens
MPWIHLQTNAEKGTITIQDTGIGMTQEELVSNLGTIARSGSKAFLDALQNQAEASSKIIGQFGVGFYSAFMVADRVEVYSRSAAPGSLGYQWLSDGSGVFEIAEASGVRTGTKIIIHLKSDCKEFSSEARVRDVVTKYSNFVSFPLYLNGRRMNTLQAIWMMDPKDVREWQHEEFYRYVAQAHDKPRYTLHYKTDAPLNIRSIFYVPDMKPSMFDVSRELGSSVALYSRKVLIQTKATDILPKWLRFIRGVVDSEDIPLNLSRELLQESALIRKLRDVLQQRLIKFFIDQSKKDAEKYAKFFEDYGLFMREGIVTATEQEVKEDIAKLLRYESSALPSGQLTSLSEYASRMRAGTRNIYYLCAPNRHLAEHSPYYEAMKKKDTEVLFCFEQFDELTLLHLREFDKKKLISVETDIVVDHYKEEKFEDRSPAAECLSEKETEELMAWMRNVLGSRVTNVKVTLRLDTHPAMVTVLEMGAARHFLRMQQLAKTQEERAQLLQPTLEINPRHALIKKLNQLRASEPGLAQLLVDQIYENAMIAAGLVDDPRAMVGRLNELLVKALERH

SEQ ID NO: 846786 - protein, 616 aa, Homo sapiens
PLPIVYGPAWLRAALWEYDMARELRALLLWGRRLRPLLRAPALAAVPGGKPILCPRRTTAQLGPRRNPAWSLQAGRLFSTQTAEDKEEPLHSIISSTESVQGSTSKHEFQAETKKLLDIVARSLYSEKEYSRSAAPGSLGYQWLSDGSGVFEIAEASGVRTGTKIIIHLKSDCKEFSSEARVRDVVTKYSNFVSFPLYLNGRRMNTLQAIWMMDPKDVREWQHEEFYRYVAQAHDKPRYTLHYKTDAPLNIRSIFYVPDMKPSMFDVSRELGSSVALYSRKVLIQTKATDILPKWLRFIRGVVDSEDIPLNLSRELLQESALIRKLRDVLQQRLIKFFIDQSKKDAEKYAKFFEDYGLFMREGIVTATEQEVKEDIAKLLRYESSALPSGQLTSLSEYASRMRAGTRNIYYLCAPNRHLAEHSPYYEAMKKKDTEVLFCFEQFDELTLLHLREFDKKKLISVETDIVVDHYKEEKFEDRSPAAECLSEKETEELMAWMRNVLGSRVTNVKVTLRLDTHPAMVTVLEMGAARHFLRMQQLAKTQEERAQLLQPTLEINPRHALIKKLNQLRASEPGLAQLLVDQIYENAMIAAGLVDDPRAMVGRLNELLVKALERH

SEQ ID NO: 846787 - protein, 420 aa, Homo sapiens
EHDALPADLRFQAIWMMDPKDVREWQHEEFYRYVAQAHDKPRYTLHYKTDAPLNIRSIFYVPDMKPSMFDVSRELGSSVALYSRKVLIQTKATDILPKWLRFIRGVVDSEDIPLNLSRELLQESALIRKLRDVLQQRLIKFFIDQSKKDAEKYAKFFEDYGLFMREGIVTATEQEVKEDIAKLLRYESSALPSGQLTSLSEYASRMRAGTRNIYYLCAPNRHLAEHSPYYEAMKKKDTEVLFCFEQFDELTLLHLREFDKKKLISVETDIVVDHYKEEKFEDRSPAAECLSEKETEELMAWMRNVLGSRVTNVKVTLRLDTHPAMVTVLEMGAARHFLRMQQLAKTQEERAQLLQPTLEINPRHALIKKLNQLRASEPGLAQLLVDQIYENAMIAAGLVDDPRAMVGRLNELLVKALERH

SEQ ID NO: 846788 - protein, 376 aa, Homo sapiens
DAWVDPRVRDKRVGFYVPDMKPSMFDVSRELGSSVALYSRKVLIQTKATDILPKWLRFIRGVVDSEDIPLNLSRELLQESALIRKLRDVLQQRLIKFFIDQSKKDAEKYAKFFEDYGLFMREGIVTATEQEVKEDIAKLLRYESSALPSGQLTSLSEYASRMRAGTRNIYYLCAPNRHLAEHSPYYEAMKKKDTEVLFCFEQFDELTLLHLREFDKKKLISVETDIVVDHYKEEKFEDRSPAAECLSEKETEELMAWMRNVLGSRVTNVKVTLRLDTHPAMVTVLEMGAARHFLRMQQLAKTQEERAQLLQPTLEINPRHALIKKLNQLRASEPGLAQLLVDQIYENAMIAAGLVDDPRAMVGRLNELLVKALERH

SEQ ID NO: 846789 - protein, 215 aa, Homo sapiens [sequence omitted]

SEQ ID NO: 846790 - protein, 279 aa, Homo sapiens
  misc_feature (259)..(259): Xaa can be any naturally occurring amino acid
  misc_feature (272)..(272): Xaa can be any naturally occurring amino acid
  misc_feature (275)..(275): Xaa can be any naturally occurring amino acid
PLPIVYGPAWLRAALWEYDMARELRALLLWGRRLRPLLRAPALAAVPGGKPILCPRRTTAQLGPRRNPAWSLQAGRLFSTQTAEDKEEPLHSIISSTESVQGSTSKHEFQAETKKLLDIVARSLYSEKEVFIRELISNASDALEKLRHKLVSDGQALPEMEIHLQTNAEKGTITIQDTGIGMTQEELVSNLGTIARSGSKAFLDALQNQAEASSKIIGQFGVGFYSAFMVADRVEVYSRSAAPGSLGYQWLSDGSGNFXNSPKLSGILKPGXQNXLPPP

SEQ ID NO: 846791 - protein, 122 aa, Homo sapiens [sequence omitted]

SEQ ID NO: 846792 - protein, 122 aa, Homo sapiens [sequence omitted]

SEQ ID NO: 846793 - protein, 108 aa, Homo sapiens
MSSSDRFPEQSFHLLRSHPAPAACGLWSLQHSHFSLVDLFSVCVSQCCHVTATCKLSVYTCISLTLPGLLGWLCCLGLVLGLGWRDCSSLGTLFPQCGRWRLPGHKQN

SEQ ID NO: 846794 - protein, 723 aa, Homo sapiens; identical to SEQ ID NO: 846774

SEQ ID NO: 846795 - protein, 560 aa, Homo sapiens; identical to SEQ ID NO: 846783

SEQ ID NO: 846796 - protein, 666 aa, Homo sapiens
PLPIVYGPAWLRAALWEYDMARELRALLLWGRRLRPLLRAPALAAVPGGKPILCPRRTTAQLGPRRNPAWSLQAGRLFSTQTAEDKEEPLHSIISSTESVQGSTSKHEFQAETKKLLDIVARSLYSEKEVFIRELISNASDALEKLRHKLVSDGQALPEMEIHLQTNAEKGTITIQDTGIGMTQEELVSNLGTIARSGSKAFLDALQNQAEASSKIIGQFGVGFYSAFMVADRVEVYSRSAAPGSLGYQWLSDGSGVFEIAEASGVRTGTKIIIHLKSDCKEFSSEARVRDVVTKYSNFVSFPLYLNGRRMNTLQAIWMMDPKDVREWQHEEFYRYVAQAHDKPRYTLHYKTDAPLNIRSIFYVPDMKPSMFDVSRELGSSVALYSRKVLIQTKATDILPKWLRFIRGVVDSEDIPLNLSRELLQESALIRKLRDVLQQRLIKFFIDQSKKDAEKYAKFFEDYGLFMREGIVTATEQEVKEDIAKLLRYESSALPSGQLTSLSEYASRMRAGTRNIYYLCAPNRHLAEHSPYYEAMKKKDTEVLFCFEQFDELTLLHLREFDKKKLISVETDIVVDHYKEEKFEDRSPAAECLSEKETEELMAWMRNVLGSRVTNVKVTLRLDTHPAMVTVLEMGAARHFLRMQQLAKTQEERAQLLQPTLEINPR

SEQ ID NO: 846797 - protein, 659 aa, Homo sapiens
PLPIVYGPAWLRAALWEYDMARELRALLLWGRRLRPLLRAPALAAVPGGKPILCPRRTTAQLGPRRNPAWSLQAGRLFSTQTAEDKEEPLHSIISSTESVQGSTSKHEFQAETKKLLDIVARSLYSEKEVFIRELISNASDALEKLRHKLVSDGQALPEMEIHLQTNAEKGTITIQDTGIGMTQEELVSNLGTIARSGSKAFLDALQNQAEASSKIIGQFGVGFYSAFMVADRVEVYSRSAAPGSLGYQWLSDGSGVFEIAEASGVRTGTKIIIHLKSDCKEFSSEARVRDVVTKYSNFVSFPLYLNGRRMNTLQAIWMMDPKDVREWQHEEFYRYVAQAHDKPRYTLHYKTDAPLNIRSIFYVPDMKPSMFDVSRELGSSVALYSRKVLIQTKATDILPKWLRFIRGVVDSEDIPLNLSRELLQESALIRKLRDVLQQRLIKFFIDQSKKDAEKYAKFFEDYGLFMREGIVTATEQEVKEDIAKLLRYESSALPSGQLTSLSEYASRMRAGTRNIYYLCAPNRHLAEHSPYYEAMKKKDTEVLFCFEQFDELTLLHLREFDKKKLISVETDIVVDHYKEEKFEDRSPAAECLSEKETEELMAWMRNVLGSRVTNVKVTLRLDTHPAMVTVLEMGAARHFLRMQQLANIRERHDCCWTC

SEQ ID NO: 846798 - protein, 560 aa, Homo sapiens; identical to SEQ ID NO: 846783

SEQ ID NO: 846799 - protein, 560 aa, Homo sapiens; identical to SEQ ID NO: 846783

SEQ ID NO: 846800 - protein, 599 aa, Homo sapiens
PLPIVYGPAWLRAALWEYDMARELRALLLWGRRLRPLLRAPALAAVPGGKPILCPRRTTAQLGPRRNPAWSLQAGRLFSTQTAEDKEEPLHSIISSTESVQGSTSKHEFQAETKKLLDIVARSLYSEKEVFIRELISNASDALEKLRHKLVSDGQALPEMEIHLQTNAEKGTITIQDTGIGMTQEELVSNLGTIARSGSKAFLDALQNQAEASSKIIGQFGVGFYSAFMVADRVEVYSRSAAPGSLGYQWLSDGSGVFEIAEASGVRTGTKIIIHLKSDCKEFSSEARVRDVVTKYSNFVSFPLYLNGRRMNTLQAIWMMDPKDVREWQHEEFYRYVAQAHDKPRYTLHYKTDAPLNIRSIFYVPDMKPSMFDVSRELGSSVALYSRKVLIQTKATDILPKWLRFIRGVVDSEDIPLNLSRELLQESALIRKLRDVLQQRLIKFFIDQSKKDAEKYAKFFEDYGLFMREGIVTATEQEVKEDIAKLLRYESSALPSGQLTSLSEYASRMRAGTRNIYYLCAPNRHLAEHSPYYEAMKKKDTEVLFCFEQFDELTLLHLREFDKKKLISVETDIVVDHYKEEKFEDRSPGLTPQMTAPPP

SEQ ID NO: 846801 - protein, 640 aa, Homo sapiens
TLEQAWIKSDEGSTESVQGSTSKHEFQAETKKLLDIVARSLYSEKEVFIRELISNASDALEKLRHKLVSDGQALPEMEIHLQTNAEKGTITIQDTGIGMTQEELVSNLGTIARSGSKAFLDALQNQAEASSKIIGQFGVGFYSAFMVADRVEVYSRSAAPGSLGYQWLSDGSGVFEIAEASGVRTGTKIIIHLKSDCKEFSSEARVRDVVTKYSNFVSFPLYLNGRRMNTLQAIWMMDPKDVREWQHEEFYRYVAQAHDKPRYTLHYKTDAPLNIRSIFYVPDMKPSMFDVSRELGSSVALYSRKVLIQTKATDILPKWLRFIRGVVDSEDIPLNLSRELLQESALIRKLRDVLQQRLIKFFIDQSKKDAEKYAKFFEDYGLFMREGIVTATEQEVKEDIAKLLRYESSALPSGQLTSLSEYASRMRAGTRNIYYLCAPNRHLAEHSPYYEAMKKKDTEVLFCFEQFDELTLLHLREFDKKKLISVETDIVVDHYKEEKFEDRSPAAECLSEKETEELMAWMRNVLGSRVTNVKVTLRLDTHPAMVTVLEMGAARHFLRMQQLAKTQEERAQLLQPTLEINPRHALIKKLNQLRASEPGLAQLLVDQIYENAMIAAGLVDDPRAMVGRLNELLVKALERH

SEQ ID NO: 846802 - protein, 606 aa, Homo sapiens
TRGSTHASETKEVFIRELISNASDALEKLRHKLVSDGQALPEMEIHLQTNAEKGTITIQDTGIGMTQEELVSNLGTIARSGSKAFLDALQNQAEASSKIIGQFGVGFYSAFMVADRVEVYSRSAAPGSLGYQWLSDGSGVFEIAEASGVRTGTKIIIHLKSDCKEFSSEARVRDVVTKYSNFVSFPLYLNGRRMNTLQAIWMMDPKDVREWQHEEFYRYVAQAHDKPRYTLHYKTDAPLNIRSIFYVPDMKPSMFDVSRELGSSVALYSRKVLIQTKATDILPKWLRFIRGVVDSEDIPLNLSRELLQESALIRKLRDVLQQRLIKFFIDQSKKDAEKYAKFFEDYGLFMREGIVTATEQEVKEDIAKLLRYESSALPSGQLTSLSEYASRMRAGTRNIYYLCAPNRHLAEHSPYYEAMKKKDTEVLFCFEQFDELTLLHLREFDKKKLISVETDIVVDHYKEEKFEDRSPAAECLSEKETEELMAWMRNVLGSRVTNVKVTLRLDTHPAMVTVLEMGAARHFLRMQQLAKTQEERAQLLQPTLEINPRHALIKKLNQLRASEPGLAQLLVDQIYENAMIAAGLVDDPRAMVGRLNELLVKALERH

SEQ ID NO: 846803 - protein, 400 aa, Homo sapiens
PLPIVYGPAWLRAALWEYDMARELRALLLWGRRLRPLLRAPALAAVPGGKPILCPRRTTAQLGPRRNPAWSLQAGRLFSTQTAEDKEEPLHSIISSTESVQGSTSKHEFQAETKKLLDIVARSLYSEKEVFIRELISNASDALEKLRHKLVSDGQALPEMEIHLQTNAEKGTITIQDTGIGMTQEELVSNLGTIARSGSKAFLDALQNQAEASSKIIGQFGVGFYSAFMVADRVEVYSRSAAPGSLGYQWLSDGSGVFEIAEASGVRTGTKIIIHLKSDCKEFSSEARVRDVVTKYSNFVSFPLYLNGRRMNTLQAIWMMDPKDVREWQHEEFYRYVAQAHDKPRYTLHYKTDAPLNIRSIFYVPDMIYENAMIAAGLVDDPRAMVGRLNELLVKALERH

SEQ ID NO: 846804 - protein, 493 aa, Homo sapiens
RWSPMQGMSQCHIHLAFPFFACLSSGVFEIAEASGVRTGTKIIIHLKSDCKEFSSEARVRDVVTKYSNFVSFPLYLNGRRMNTLQAIWMMDPKDVREWQHEEFYRYVAQAHDKPRYTLHYKTDAPLNIRSIFYVPDMKPSMFDVSRELGSSVALYSRKVLIQTKATDILPKWLRFIRGVVDSEDIPLNLSRELLQESALIRKLRDVLQQRLIKFFIDQSKKDAEKYAKFFEDYGLFMREGIVTATEQEVKEDIAKLLRYESSALPSGQLTSLSEYASRMRAGTRNIYYLCAPNRHLAEHSPYYEAMKKKDTEVLFCFEQFDELTLLHLREFDKKKLISVETDIVVDHYKEEKFEDRSPAAECLSEKETEELMAWMRNVLGSRVTNVKVTLRLDTHPAMVTVLEMGAARHFLRMQQLAKTQEERAQLLQPTLEINPRHALIKKLNQLRASEPGLAQLLVDQIYENAMIAAGLVDDPRAMVGRLNELLVKALERH

SEQ ID NO: 846805 - protein, 257 aa, Homo sapiens
MREGIVTATEQEVKEDIAKLLRYESSALPSGQLTSLSEYASRMRAGTRNIYYLCAPNRHLAEHSPYYEAMKKKDTEVLFCFEQFDELTLLHLREFDKKKLISVETDIVVDHYKEEKFEDRSPAAECLSEKETEELMAWMRNVLGSRVTNVKVTLRLDTHPAMVTVLEMGAARHFLRMQQLAKTQEERAQLLQPTLEINPRHALIKKLNQLRASEPGLAQLLVDQIYENAMIAAGLVDDPRAMVGRLNELLVKALERH

SEQ ID NO: 846806 - protein, 122 aa, Homo sapiens [sequence omitted]

SEQ ID NO: 846807 - protein, 206 aa, Homo sapiens
VIADSRGYTLCSDPPYEAMKKKDTEVLFCFEQFDELTLLHLREFDKKKLISVETDIVVDHYKEEKFEDRSPAAECLSEKETEELMAWMRNVLGSRVTNVKVTLRLDTHPAMVTVLEMGAARHFLRMQQLAKTQEERAQLLQPTLEINPRHALIKKLNQLRASEPGLAQLLVDQIYENAMIAAGLVDDPRAMVGRLNELLVKALERH

SEQ ID NO: 846808 - protein, 262 aa, Homo sapiens
EENEEQSFKVEVSYMEIYNEKVRDLLDPKGSRQTLKVREHSVLGPYVDGLSKLAVTSYKDIESLMSEGNKSRTVAATNMNEESSRSHAVFKITLTHTLYDVKKKLISVETDIVVDHYKEEKFEDRSPAAECLSEKETEELMAWMRNVLGSRVTNVKVTLRLDTHPAMVTVLEMGAARHFLRMQQLAKTQEERAQLLQPTLEINPRHALIKKLNQLRASEPGLAQLLVDQIYENAMIAAGLVDDPRAMVGRLNELLVKALERH

SEQ ID NO: 846809 - protein, 44 aa, Homo sapiens
MKGDDGSPGRDGLDGFPGLPGPPVSSHKLRQLRPLFFILQVLQT

SEQ ID NO: 846810 - protein, 1808 aa, Homo sapiens
ECGCSAPGHQGSALRTQEAPASQPLAPARSRIQAEDRKGPPEPPGPAPREPSKAGRPAGVPPAGASGRANAFGQQPLKPSPRLSGTDRGPEWTNRQLGRDQRAVAGPALRRWLLLGTVTVGFLAQSVLAGVKKFDVPCGGRDCSGGCQCYPEKGGRGQPGPVGPQGYNGPPGLQGFPGLQGRKGDKGERGAPGVTGPKGDVGARGVSGFPGADGIPGHPGQGGPRGRPGYDGCNGTQGDSGPQGPPGSEGFTGPPGPQGPKGQKGEPYALPKEERDRYRGEPGEPGLVGFQGPPGRPGHVGQMGPVGAPGRPGPPGPPGPKGQQGNRGLGFYGVKGEKGDVGQPGPNGIPSDTLHPIIAPTGVTFHPDQYKGEKGSEGEPGIRGISLKGEEGIMGFPGLRGYPGLSGEKGSPGQKGSRGLDGYQGPDGPRGPKGEAGDPGPPGLPAYSPHPSLAKGARGDPGFPGAQGEPGSQGEPGDPGLPGPPGLSIGDGDQRRGLPGEMGPKGFIGDPGIPALYGGPPGPDGKRGPPGPPGLPGPPGPDGFLFGLKGAKGRAGFPGLPGSPGARGPKGWKGDAGECRCTEGDEAIKGLPGLPGPKGFAGINGEPGRKGDRGDPGQHGLPGFPGLKGVPGNIGAPGPKGAKGDSRTITTKGERGQPGVPGVPGMKGDDGSPGRDGLDGFPGLPGPPGDGIKGPPGDPGYPGIPGTKGTPGEMGPPGLGLPGLKGQRGFPGDAGLPGPPGFLGPPGPAGTPGQIDCDTDVKRAVGGDRQEAIQPGCIGGPKGLPGLPGPPGPTGAKGLRGIPGFAGADGGPGPRGLPGDAGREGFPGPPGFIGPRGSKGAVGLPGPDGSPGPIGLPGPDGPPGERGLPGEVLGAQPGPRGDAGVPGQPGLKGLPGDRGPPGFRGSQGMPGMPGLKGQPGLPGPSGQPGLYGPPGLHGFPGAPGQEGPLGLPGIPGREGLPGDRGDPGDTGAPGPVGMKGLSGDRGDAGFTGEQGHPGSPGFKGIDGMPGTPGLKGDRGSPGMDGFQGMPGLKGRPGFPGSKGEAGFFGIPGLKGLAGEPGFKGSRGDPGPPGPPPVILPGMKDIKGEKGDEGPMGLKGYLGAKGIQGMPGIPGLSGIPGLPGRPGHIKGVKGDIGVPGIPGLPGFPGVAGPPGITGFPGFIGSRGDKGAPGRAGLYGEIGATGDFGDIGDTINLPGRPGLKGERGTTGIPGLKGFFGEKGTEGDIGFPGITGVTGVQGPPGLKGQTGFPGLTGPPGSQGELGRIGLPGGKGDDGWPGAPGLPGFPGLRGIRGLHGLPGTKGFPGSPGSDIHGDPGFPGPPGERGDPGEANTLPGPVGVPGQKGDQGAPGERGPPGSPGLQGFPGITPPSNISGAPGDKGAPGIFGLKGYRGPPGPPGSAALPGSKGDTGNPGAPGTPGTKGWAGDSGPQGRPGVFGLPGEKGPRGEQGFMGNTGPTGAVGDRGPKGPKGDPGFPGAPGTVGAPGIAGIPQKIAVQPGTVGPQGRRGPPGAPGEMGPQGPPGEPGFRGAPGKAGPQGRGGVSAVPGFRGDEGPIGHQGPIGQEGAPGRPGSPGLPGMPGRSVSIGYLLVKHSQTDQEPMCPVGMNKLWSGYSLLYFEGQEKAHNQDLGLAGSCLARFSTMPFLYCNPGDVCYYASRNDKSYWLSTTAPLPMMPVAEDEIKPYISRCSVCEAPAIAIAVHSQDVSIPHCPAGWRSLWIGYSFLMHTAAGDEGGGQSLVSPGSCLEDFRATPFIECNGGRGTCHYYANKYSFWLTTIPEQSFQGSPSADTLKAGLIRTHISRCQVCMKNL

SEQ ID NO: 846811 - protein, 1808 aa, Homo sapiens; identical to SEQ ID NO: 846810

SEQ ID NO: 846812 - protein, 169 aa, Homo sapiens [sequence omitted]

SEQ ID NO: 846813 - protein, 107 aa, Homo sapiens
DVSRGSHSRWVRILWIGYSFLMHTAAGDEGGGQSLVSPGSCLEDFRATPFIECNGGRGTCHYYANKYSFWLTTIPEQSFQGSPSADTLKAGLIRTHISRCQVCMKNL

SEQ ID NO: 846814 - protein, 1808 aa, Homo sapiens; identical to SEQ ID NO: 846810

SEQ ID NO: 846815 - protein, 1122 aa, Homo sapiens
ECGCSAPGHQGSALRTQEAPASQPLAPARSRIQAEDRKGPPEPPGPAPREPSKAGRPAGVPPAGASGRANAFGQQPLKPSPRLSGTDRGPEWTNRQLGRDQRAVAGPALRRWLLLGTVTVGFLAQSVLAGVKKFDVPCGGRDCSGGCQCYPEKGGRGQPGPVGPQGYNGPPGLQGFPGLQGRKGDKGERGAPGVTGPKGDVGARGVSGFPGADGIPGHPGQGGPRGRPGYDGCNGTQGDSGPQGPPGSEGFTGPPGPQGPKGQKGEPYALPKEERDRYRGEPGEPGLVGFQGPPGRPGHVGQMGPVGAPGRPGPPGPPGPKGQQGNRGLGFYGVKGEKGDVGQPGPNGIPSDTLHPIIAPTGVTFHPDQYKGEKGSEGEPGIRGISLKGEEGIMGFPGLRGYPGLSGEKGSPGQKGSRGLDGYQGPDGPRGPKGEAGDPGPPGLPAYSPHPSLAKGARGDPGFPGAQGEPGSQGEPGDPGLPGPPGLSIGDGDQRRGLPGEMGPKGFIGDPGIPALYGGPPGPDGKRGPPGPPGLPGPPGPDGFLFGLKGAKGRAGFPGLPGSPGARGPKGWKGDAGECRCTEGDEAIKGLPGLPGPKGFAGINGEPGRKGDRGDPGQHGLPGFPGLKGVPGNIGAPGPKGAKGDSRTITTKGERGQPGVPGVPGMKGDDGSPGRDGLDGFPGLPGPPGDGIKGPPGDPGYPGIPGTKGTPGEMGPPGLGLPGLKGQRGFPGDAGLPGPPGFLGPPGPAGTPGQIDCDTDVKRAVGGDRQEAIQPGCIGGPKGLPGLPGPPGPTGAKGLRGIPGFAGADGGPGPRGLPGDAGREGFPGPPGFIGPRGSKGAVGLPGPDGSPGPIGLPGPDGPPGERGLPGEVLGAQPGPRGDAGVPGQPGLKGLPGDRGPPGFRGSQGMPGMPGLKGQPGLPGPSGQPGLYGPPGLHGFPGAPGQEGPLGLPGIPGREGLPGDRGDPGDTGAPGPVGMKGLSGDRGDAGFTGEQGHPGSPGFKGIDGMPGTPGLKGDRGSPGMDGFQGMPGLKGRPGFPGSKGEAGFFGIPGLKGLAGEPGFKGSRGDPGPPGPPPVILQRLRGAQGLRHPSPHEGPVGGPGPAFYAQCYAQLPCSPQIPLM

SEQ ID NO: 846816 - protein, 1363 aa, Homo sapiens
MGRDQRAVAGPALRRWLLLGTVTVGFLAQSVLAGVKKFDVPCGGRDCSGGCQCYPEKGGRGQPGPVGPQGYNGPPGLQGFPGLQGRKGDKGERGAPGVTGPKGDVGARGVSGFPGADGIPGHPGQGGPRGRPGYDGCNGTQGDSGPQGPPGSEGFTGPPGPQGPKGQKGEPYALPKEERDRYRGEPGEPGLVGFQGPPGRPGHVGQMGPVGAPGRPGPPGPPGPKGQQGNRGLGFYGVKGEKGDVGQPGPNGIPSDTLHPIIAPTGVTFHPDQYKGEKGSEGEPGIRGISLKGEEGIMGFPGLRGYPGLSGEKGSPGQKGSRGLDGYQGPDGPRGPKGEAGDPGPPGLPAYSPHPSLAKGARGDPGFPGAQGEPGSQGEPGDPGLPGPPGLSIGDGDQRRGLPGEMGPKGFIGDPGIPALYGGPPGPDGKRGPPGPPGLPGPPGPDGFLFGLKGAKGRAGFPGLPGSPGARGPKGWKGDAGECRCTEGDEAIKGLPGLPGPKGFAGINGEPGRKGDRGDPGQHGLPGFPGLKGVPGNIGAPGPKGAKGDSRTITTKGERGQPGVPGVPGMKGDDGSPGRDGLDGFPGLPGPPGDGIKGPPGDPGYPGIPGTKGTPGEMGPPGLGLPGLKGQRGFPGDAGLPGPPGFLGPPGPAGTPGQIDCDTDVKRAVGGDRQEAIQPGCIGGPKGLPGLPGPPGPTGAKGLRGIPGFAGADGGPGPRGLPGDAGREGFPGPPGFIGPRGSKGAVGLPGPDGSPGPIGLPGPDGPPGERGLPGEVLGAQPGPRGDAGVPGQPGLKGLPGDRGPPGFRGSQGMPGMPGLKGQPGLPGPSGQPGLYGPPGLHGFPGAPGQEGPLGLPGIPGREGLPGDRGDPGDTGAPGPVGMKGLSGDRGDAGFTGEQGHPGSPGFKGIDGMPGTPGLKGDRGSPGMDGFQGMPGLKGRPGFPGSKGEAGFFGIPGLKGLAGEPGFKGSRGDPGPPGPPPVILPGMKDIKGEKGDEGPMGLKGYLGAKGIQGMPGIPGLSGIPGLPGRPGHIKGVKGDIGVPGIPGLPGFPGVAGPPGITGFPGFIGSRGDKGAPGRAGLYGEIGATGDFGDIGDTINLPGRPGLKGERGTTGIPGLKGFFGEKGTEGDIGFPGITGVTGVQGPPGLKGQTGFPGLTGPPGSQGELGRIGLPGGKGDDGWPGAPGLPGFPGLRGIRGLHGLPGTKGFPGSPGSDIHGDPGFPGPPGERGDPGEANTLPGPVGVPGQKGDQGAPGERGPPGSPGLQGFPGITPPSNISGAPGDKGAPGIFGLKGYRGPPGPPGSAALPGSKGDTGNPGAPGTPGTKGWAGDSGPQGRPGVFGLPGEKGPRGEQGFMGNTAPRCP

SEQ ID NO: 846817 - protein, 814 aa, Homo sapiens
MGRDQRAVAGPALRRWLLLGTVTVGFLAQSVLAGVKKFDVPCGGRDCSGGCQCYPEKGGRGQPGPVGPQGYNGPPGLQGFPGLQGRKGDKGERGAPGVTGPKGDVGARGVSGFPGADGIPGHPGQGGPRGRPGYDGCNGTQGDSGPQGPPGSEGFTGPPGPQGPKGQKGEPYALPKEERDRYRGEPGEPGLVGFQGPPGRPGHVGQMGPVGAPGRPGPPGPPGPKGQQGNRGLGFYGVKGEKGDVGQPGPNGIPSDTLHPIIAPTGVTFHPDQYKGEKGSEGEPGIRGISLKGEEGIMGFPGLRGYPGLSGEKGSPGQKGSRGLDGYQGPDGPRGPKGEAGDPGPPGLPAYSPHPSLAKGARGDPGFPGAQGEPGSQGEPGDPGLPGPPGLSIGDGDQRRGLPGEMGPKGFIGDPGIPALYGGPPGPDGKRGPPGPPGLPGPPGPDGFLFGLKGAKGRAGFPGLPGSPGARGPKGWKGDAGECRCTEGDEAIKGLPGLPGPKGFAGINGEPGRKGDRGDPGQHGLPGFPGLKGVPGNIGAPGPKGAKGDSRTITTKGERGQPGVPGVPGMKGDDGSPGRDGLDGFPGLPGPPGDGIKGPPGDPGYPGIPGTKGTPGEMGPPGLGLPGLKGQRGFPGDAGLPGPPGFLGPPGPAGTPGQIDCDTDVKRAVGGDRQEAIQPGCIGGPKGLPGLPGPPGPTGAKGLRGIPGFAGADGGPGPRGLPGDAGREGFPGPPGFIGPRGSKGAVGLPGPDGSPGPIGLPGPDGPPGERGLPGEVLGAQPGPRGDAGVPGQPGLKGLPGDRGPPGFRESVQVV

SEQ ID NO: 846818 - protein, 829 aa, Homo sapiens
ECGCSAPGHQGSALRTQEAPASQPLAPARSRIQAEDRKGPPEPPGPAPREPSKAGRPAGVPPAGASGRANAFGQQPLKPSPRLSGTDRGPEWTNRQLGRDQRAVAGPALRRWLLLGTVTVGFLAQSVLAGVKKFDVPCGGRDCSGGCQCYPEKGGRGQPGPVGPQGYNGPPGLQGFPGLQGRKGDKGERGAPGVTGPKGDVGARGVSGFPGADGIPGHPGQGGPRGRPGYDGCNGTQGDSGPQGPPGSEGFTGPPGPQGPKGQKGEPYALPKEERDRYRGEPGEPGLVGFQGPPGRPGHVGQMGPVGAPGRPGPPGPPGPKGQQGNRGLGFYGVKGEKGDVGQPGPNGIPSDTLHPIIAPTGVTFHPDQYKGEKGSEGEPGIRGISLKGEEGIMGFPGLRGYPGLSGEKGSPGQKGSRGLDGYQGPDGPRGPKGEAGDPGPPGLPAYSPHPSLAKGARGDPGFPGAQGEPGSQGEPGDPGLPGPPGLSIGDGDQRRGLPGEMGPKGFIGDPGIPALYGGPPGPDGKRGPPGPPGLPGPPGPDGFLFGLKGAKGRAGFPGLPGSPGARGPKGWKGDAGECRCTEGDEAIKGLPGLPGPKGFAGINGEPGRKGDRGDPGQHGLPGFPGLKGVPGNIGAPGPKGAKGDSRTITTKGERGQPGVPGVPGMKGDDGSPGRDGLDGFPGLPGPPGDGIKGPPGDPGYPGIPGTKGTPGEMGPPGLGLPGLKGQRGFPGDAGLPGPPGFLGPPGPAGTPGQIDCDTDVKRAVGGDRQEAIQPGCIGGPKGLPGLPGPPGPTGAKGLRGIPAAEGIPAAEGIPAAEGIPAAEGIPRP

SEQ ID NO: 846819 - protein, 201 aa, Homo sapiens
ECGCSAPGHQGSALRTQEAPASQPLAPARSRIQAEDRKGPPEPPGPAPREPSKAGRPAGVPPAGASGRANAFGQQPLKPSPRLSGTDRGPEWTNRQLGRDQRAVAGPALRRWLLLGTVTVGFLAQSVLAGVKKFDVPCGGRDCSGGCQCYPEKGGRSSREPGASALPTSSGRTKGQDTSPYPGFSGNTASAGRPSLCKEPT

SEQ ID NO: 846820 - protein, 70 aa, Homo sapiens
AKEMMAGRELRAYQVRSRKTRGHPDPESWAVQEAPLSRPASLRATSKAHTRAKAGLLWLTVVCTNIAAQG

SEQ ID NO: 846821 - protein, 66 aa, Homo sapiens
TPPSTGLAGSCLARFSTMPFLYCNPGDVCYYASRNDKSYWLSTTAREALPMKNVVEKNGPCHTSTP

SEQ ID NO: 846822 - protein, 364 aa, Homo sapiens
ETRKIFSSRDALIALITFNSLKAQEGDPGFPGAPGTVGAPGIAGIPQKIAVQPGTVGPQGRRGPPGAPGEMGPQGPPGEPGFRGAPGKAGPQGRGGVSAVPGFRGDEGPIGHQGPIGQEGAPGRPGSPGLPGMPGRSVSIGYLLVKHSQTDQEPMCPVGMNKLWSGYSLLYFEGQEKAHNQDLGLAGSCLARFSTMPFLYCNPGDVCYYASRNDKSYWLSTTAPLPMMPVAEDEIKPYISRCSVCEAPAIAIAVHSQDVSIPHCPAGWRSLWIGYSFLMHTAAGDEGGGQSLVSPGSCLEDFRATPFIECNGGRGTCHYYANKYSFWLTTIPEQSFQGSPSADTLKAGLIRTHISRCQVCMKNL

SEQ ID NO: 846823 - protein, 1808 aa, Homo sapiens; identical to SEQ ID NO: 846810

SEQ ID NO: 846824 - protein, 1808 aa, Homo sapiens; identical to SEQ ID NO: 846810

SEQ ID NO: 846825 - protein, 1808 aa, Homo sapiens; identical to SEQ ID NO: 846810

SEQ ID NO: 846826 - protein, 1808 aa, Homo sapiens; identical to SEQ ID NO: 846810

SEQ ID NO: 846827 - protein, 141 aa, Homo sapiens
NTPELQAEPHPSCHCWLMIRICIQQQHLDLPATVTERVQALGVPGGQALPTESQEQPWPPSALLDAPPEGTANHFAHTHVTTALSNATDNSTQAASRGQRLRGAQGLRHPSPHEGPVGGPGPAFYAQCYAQLPCSPQIPLM

SEQ ID NO: 846828 - protein, 857 aa, Homo sapiens
ECGCSAPGHQGSALRTQEAPASQPLAPARSRIQAEDRKGPPEPPGPAPREPSKAGRPAGVPPAGASGRANAFGQQPLKPSPRLSGTDRGPEWTNRQLGRDQRAVAGPALRRWLLLGTVTVGFLAQSVLAGVKKFDVPCGGRDCSGGCQCYPEKGGRGQPGPVGPQGYNGPPGLQGFPGLQGRKGDKGERGAPGVTGPKGDVGARGVSGFPGADGIPGHPGQGGPRGRPGYDGCNGTQGDSGPQGPPGSEGFTGPPGPQGPKGQKGEPYALPKEERDRYRGEPGEPGLVGFQGPPGRPGHVGQMGPVGAPGRPGPPGPPGPKGQQGNRGLGFYGVKGEKGDVGQPGPNGIPSDTLHPIIAPTGVTFHPDQYKGEKGSEGEPGIRGISLKGEEGIMGFPGLRGYPGLSGEKGSPGQKGSRGLDGYQGPDGPRGPKGEAGDPGPPGLPAYSPHPSLAKGARGDPGFPGAQGEPGSQGEPGDPGLPGPPGLSIGDGDQRRGLPGEMGPKGFIGDPGIPALYGGPPGPDGKRGPPGPPGLPGPPGPDGFLFGLKGAKGRAGFPGLPGSPGARGPKGWKGDAGECRCTEGDEAIKGLPGLPGPKGFAGINGEPGRKGDRGDPGQHGLPGFPGLKGVPGNIGAPGPKGAKGDSRTITTKGERGQPGVPGVPGMKGDDGSPGRDGLDGFPGLPGPPGDGIKGPPGDPGYPGIPGTKGTPGEMGPPGLGLPGLKGQRGFPGDAGLPGPPGFLGPPGPAGTPGQIDCDTDVKRAVGGDRQEAIQPGCIGGPKGLPGLPGPPGPTGAKGLRGIPGFAGADGGPGPRGLPGDAGREGFPGPPGFIGPRGSKGAPNFREAMRIGAEVYHN

SEQ ID NO: 846829 - protein, 558 aa, Homo sapiens
MGRDQRAVAGPALRRWLLLGTVTVGFLAQSVLAGVKKFDVPCGGRDCSGGCQCYPEKGGRGQPGPVGPQGYNGPPGLQGFPGLQGRKGDKGERGAPGVTGPKGDVGARGVSGFPGADGIPGHPGQGGPRGRPGYDGCNGTQGDSGPQGPPGSEGFTGPPGPQGPKGQKGEPYALPKEERDRYRGEPGEPGLVGFQGPPGRPGHVGQMGPVGAPGRPGPPGPPGPKGQQGNRGLGFYGVKGEKGDVGQPGPNGIPSDTLHPIIAPTGVTFHPDQYKGEKGSEGEPGIRGISLKGEEGIMGFPGLRGYPGLSGEKGSPGQKGSRGLDGYQGPDGPRGPKGEAGDPGPPGLPAYSPHPSLAKGARGDPGFPGAQGEPGSQGEPGDPGLPGPPGLSIGDGDQRRGLPGEMGPKGFIGDPGIPALYGGPPGPDGKRGPPGPPGLPGPPGPDGFLFGLKGAKGRAGFPGLPGSPGARGPKGWKGDAGECRCTEGDEAIKGLPGLPGPKGFAGINGEPGRKGDRGDPGQHGLPGFPGLKVRSNFIMKLARHSEASPGVPFLPFIS

SEQ ID NO: 846830 - protein, 218 aa, Homo sapiens
ECGCSAPGHQGSALRTQEAPASQPLAPARSRIQAEDRKGPPEPPGPAPREPSKAGRPAGVPPAGASGRANAFGQQPLKPSPRLSGTDRGPEWTNRQLGRDQRAVAGPALRRWLLLGTVTVGFLAQSVLAGVKKFDVPCGGRDCSGGCQCYPEKGGRGQPGPVGPQGYNGPPGLQGIEQSLSSGIQRWTQLGPLSRGHTITVSLDAREGSSGKKLNGRS

SEQ ID NO: 846831 - protein, 91 aa, Homo sapiens
IKGPPGDPGYPGIPGTKGTPGEMGPPGLGLPGLKGQRGFPGDAGLPGPPGFLGPPGPAGTPGQIGMKESSLLPFTVLRHSTLSFVSVDVSQ

SEQ ID NO: 846832 - protein, 345 aa, Homo sapiens
MLPCFQLLRIGGGRGGDLYTFHPPAGAGCTYRLGHRADLCDVALRPQQEPGLISGIHAELHAEPRGDDWRVSLEDHSSQGTLVNNVRLPRGHRLELSDGDLLTFGPEGPPGTSPSEFYFMFQQVRVKPQDFAAITIPRSRGEARVGAGFRPMLPSQGAPQRPLSTFSPAPKATLILNSIGSLSKLRPQPLTFSPSWGGPKSLPVPAPPGEVGTTPSAPPQRNRRKSVHRVLAELDDESEPPENPPPVLMEPRKKLRVDKAPLTPTGNRRGRPRKYPVSAPMAPPAVGGGEPCAAPCCCLPQEETVAWVQCDGCDVWFHVACVGCSIQAAREADFRCPGCRAGIQT

SEQ ID NO: 846833 - protein, 345 aa, Homo sapiens; identical to SEQ ID NO: 846832

SEQ ID NO: 846834 - protein, 345 aa, Homo sapiens; identical to SEQ ID NO: 846832

SEQ ID NO: 846835 - protein, 345 aa, Homo sapiens; identical to SEQ ID NO: 846832

SEQ ID NO: 846836 - protein, 345 aa, Homo sapiens; identical to SEQ ID NO: 846832

SEQ ID NO: 846837 - protein, 218 aa, Homo sapiens
MLPCFQLLRIGGGRGGDLYTFHPPAGAGCTYRLGHRADLCDVALRPQQEPGLISGIHAELHAEPRGDDWRVSLEDHSSQGTLVNNVRLPRGHRLELSDGDLLTFGPEGPPGTSPSEFYFMFQQVRVKPQDFAAITIPRSRGEARVGAGFRPMLPSQGAPQRPLSTFSPAPKATLILNSIGSLSKLRPQPLTWGSGDHAFCSTPTQSEEICSPSVGGTG

SEQ ID NO: 846838 - protein, 84 aa, Homo sapiens
SKLRPQPLTFSPSWGGPKSLPVPAPPGEVGTTPSAPPQRNRRKSVHRVLAELDDESEPPENPPPVLMEPRKKLRVDKAPLTPTG

SEQ ID NO: 846839 - protein, 345 aa, Homo sapiens; identical to SEQ ID NO: 846832

SEQ ID NO: 846840 - protein, 136 aa, Homo sapiens
MLPCFQLLRIGGGRGGDLYTFHPPAGAGCTYRLGHRADLCDVALRPQQEPGLISGIHAELHAEPRGDDWRVSLEDHSSQGTLVNNVRLPRGHRLELSDGDLLTFGPEGPPGTSPSEFYFMFQQPQQAPAPAPHLLP

SEQ ID NO: 846841 - protein, 298 aa, Homo sapiens
MLPCFQLLRIGGGRGGDLYTFHPPAGAGCTYRLGHRADLCDVALRPQQEPGLISGIHAELHAEPRGDDWRVSLEDHSSQGTLVNNVRLPRGHRLELSDGDLLTFGPEGPPGTSPSEFYFMFQQVRVKPQDFAAITIPRSRGEARVGAGFRPMLPSQGAPQRPLSTFSPAPKATLILNSIGSLSKLRPQPLTFSPSWGGPKSLPVPAPPGEVGTTPSAPPQRNRRKSVHRVLAELDDESEPPENPPPVLMEPRKKLRVDKAPLTPTGNWHIQGMQSIVKGQKERPWPRGEHLSGYEEAS

SEQ ID NO: 846842 - protein, 495 aa, Homo sapiens
GILSGRDGRTALPRPREPAERTAGLRRDMRPQELPRLAFPLLLLLLLLLPPPPCPAHSATRFDPTWESLDARQLPAWFDQAKFGIFIHWGVFSVPSFGSEWFWWYWQKEKIPKYVEFMKDNYPPSFKYEDFGPLFTAKFFNANQWADIFQASGAKYIVLTSKHHEGFTLWGSEYSWNWNAIDEGPKRDIVKELEVAIRNRTDLRFGLYYSLFEWFHPLFLEDESSSFHKRQFPVSKTLPELYELVNNYQPEVLWSDGDGGAPDQYWNSTGFLAWLYNESPVRGTVVTNDRWGAGSICKHGGFYTCSDRYNPGHLLPHKWENCMTIDKLSWGYRREAGISDYLTIEELVKQLVETVSCGGNLLMNIGPTLDGTISVVFEERLRQMGSWLKVNGEAIYETHTWRSQNDTVTPDVWYTSKPKEKLVYAIFLKWPTSGQLFLGHPKAILGATEVKLLGHGQPLNWISLEQNGIMVELPQLTIHQMPCKWGWALALTNVI

SEQ ID NO: 846843 - protein, 495 aa, Homo sapiens; identical to SEQ ID NO: 846842

SEQ ID NO: 846844 - protein, 458 aa, Homo sapiens
GILSGRDGRTALPRPREPAERTAGLRRDMRPQELPRLAFPLLLLLLLLLPPPPCPAHSATRFDPTWESLDARQLPAWFDQAKFGIFIHWGVFSVPSFGSEWFWWYWQKEKIPKYVEFMKDNYPPSFKYEDFGPLFTAKFFNANQWADIFQASGAKYIVLTSKHHEGFTLWGSEYSWNWNAIDEGPKRDIVKELEVAIRNRTDLRFGLYYSLFEWFHPLFLEDESSSFHKRQFPVSKTLPELYELVNNYQPEVLWSDGDGGAPDQYWNSTGFLAWLYNESPVRGTVVTNDRWGAGSICKHGGFYTCSDRYNPGHLLPHKWENCMTIDKLSWGYRREAGISDYLTIEELVKQLVETVSCGGNLLMNIGPTLDGTISVVFEERLRQMGSWLKVNGEAIYETHTWRSQNDTVTPDVWYTSKPKEKLVYAIFLKWPTSGQLFLGHPKAILGATEVRGNFTLFL

SEQ ID NO: 846845 - protein, 276 aa, Homo sapiens [sequence omitted]

SEQ ID NO: 846846 - protein, 495 aa, Homo sapiens; identical to SEQ ID NO: 846842

SEQ ID NO: 846847 - protein, 351 aa, Homo sapiens
GILSGRDGRTALPRPREPAERTAGLRRDMRPQELPRLAFPLLLLLLLLLPPPPCPAHSATRFDPTWESLDARQLPAWFDQAKFGIFIHWGVFSVPSFGSEWFWWYWQKEKIPKYVEFMKDNYPPSFKYEDFGPLFTAKFFNANQWADIFQASGAKYIVLTSKHHEGFTLWGSEYSWNWNAIDEGPKRDIVKELEVAIRNRTDLRFGLYYSLFEWFHPLFLEDESSSFHKRQFPVSKTLPELYELVNNYQPEVLWSDGDGGAPDQYWNSTGFLAWLYNESPVRGTVVTNDRWGAGSICKHGGFYTCSDRYNPGHLLPHKWENCMTIDKLSWGYRREAGISDYLTIEELVKVQ

SEQ ID NO: 846848 - protein, 316 aa, Homo sapiens
MLGEAPAAPRLAGSEARSLWQGTQVSALHRRIKAIVEVAAMCGVNIICFQEAWTMPFAFCTREKLPWTEFAESAEDGPTTRFCQKLAKNHDMVVVSPILERDSEHGDVLWNTAVVISNSGAVLGKTRKNHIPRVGDFNESTYYMEGNLGHPVFQTQFGRIAVNICYGRHHPLNWLMYSINGAEIIFNPSATIGALSESLWPIEARNAAIANHCFTCAINRVGTEHFPNEFTSGDGKKAHQDFGYFYGSSYVAAPDSSRTPGLSRSRDGLLVAKLDLNLCQQVNDVWNFKMTGRYEMYARELAEAVKSNYSPTIVKE

SEQ ID NO: 846849 - protein, 323 aa, Homo sapiens [sequence omitted]

SEQ ID NO: 846850 - protein, 366 aa, Homo sapiens
MAGAEWKSLEECLEKHLPLPDLQEVKRVLYGKELRKLDLPREAFEAASREDFELQGYAFEAAEEQLRRPRIVHVGLVQNRIPLPANAPVAEQVSALHRRIKAIVEVAAMCGVNIICFQEAWTMPFAFCTREKLPWTEFAESAEDGPTTRFCQKLAKNHDMVVVSPILERDSEHGDVLWNTAVVISNSGAVLGKTRRKPGPPRVPDAVRKDRGEHLLRAAPPLNWLMYSINGAEIIFNPSATIGALSESLWPIEARNAAIANHCFTCAINRVGTEHFPNEFTSGDGKKAHQDFGYFYGSSYVAAPDSSRTPGLSRSRDGLLVAKLDLNLCQQVNDVWNFKMTGRYEMYARELAEAVKSNYSPTIVKE

SEQ ID NO: 846851 - protein, 147 aa, Homo sapiens
MPAAGPSQRLFRPGQGAEDRLAWLQVWGVTGESPGCPHHWPRKACSQARLCPHHWPRKACSQARLRAEHPLSLPGKSATWFLLVLSYSESLWPIEARNAAIANHCFTCAINRVGTLTRTLATFMARAMWQPLTAAGLLGCPVAGMDC

SEQ ID NO: 846852 - protein, 131 aa, Homo sapiens
MRDRPFGPQHLADTGEDGMDSVSWACLKVPDPLWSPQCIYTSSQMCFFVPLKAHQDFGYFYGSSYVAAPDSSRTPGLSRSRDGLLVAKLDLNLCQQVNDVWNFKMTGRYEMYARELAEAVKSNYSPTIVKE

SEQ ID NO: 846853 - protein, 323 aa, Homo sapiens [sequence omitted]

SEQ ID NO: 846854 - protein, 327 aa, Homo sapiens [sequence omitted]

SEQ ID NO: 846855 - protein, 151 aa, Homo sapiens [sequence omitted]

SEQ ID NO: 846856 - protein, 384 aa, Homo sapiens
MAGAEWKSLEECLEKHLPLPDLQEVKRVLYGKELRKLDLPREAFEAASREDFELQGYAFEAAEEQLRRPRIVHVGLVQNRIPLPANAPVAEQVSALHRRIKAIVEVAAMCGVNIICFQEAWTMPFAFCTREKLPWTEFAESAEDGPTTRFCQKLAKNHDMVVVSPILERDSEHGDVLWNTAVVISNSGAVLGKTRKNHIPRVGDFNESTYYMEGNLGHPVFQTQFGRIAVNICYGRHHPLNWLMYSINGAEIIFNPSATIGALSESLWPIEARNAAIANHCFTCAINRVGTEHFPNEFTSGDGKKAHQDFGYFYGSSYVAAPDSSRTPGLSRSRDGLLVAKLDLNLCQQVNDVWNFKMTGRYEMYARELAEAVKSNYSPTIVKE

SEQ ID NO: 846857 - protein, 409 aa, Homo sapiens
MAGAEWKSLEECLEKHLPLPDLQEVKRVLYGKELRKLDLPREAFEAASREDFELQGYAFEAAEEQLRRPRIVHVGLVQNRIPLPANAPVAEQVSALHRRIKAIVEVAAMCGVNIICFQEAWTAGLVTLDTVSRSTPHRDGSSQVARAMPFAFCTREKLPWTEFAESAEDGPTTRFCQKLAKNHDMVVVSPILERDSEHGDVLWNTAVVISNSGAVLGKTRKNHIPRVGDFNESTYYMEGNLGHPVFQTQFGRIAVNICYGRHHPLNWLMYSINGAEIIFNPSATIGALSESLWPIEARNAAIANHCFTCAINRVGTEHFPNEFTSGDGKKAHQDFGYFYGSSYVAAPDSSRTPGLSRSRDGLLVAKLDLNLCQQVNDVWNFKMTGRYEMYARELAEAVKSNYSPTIVKE

SEQ ID NO: 846858 - protein, 208 aa, Homo sapiens
MPAAGPSQRLFRPGQGAEDRLAWLQVWGVTGESPGCPHHWPRKACSQARLCPHHWPRKACSQARLRAEHPLSLPGKSATWFLLVLSYSESLWPIEARNAAIANHCFTCAINRVGTEHFPNEFTSGDGKKAHQDFGYFYGSSYVAAPDSSRTPGLSRSRDGLLVAKLDLNLCQQVNDVWNFKMTGRYEMYARELAEAVKSNYSPTIVKE

SEQ ID NO: 846859 - protein, 384 aa, Homo sapiens; identical to SEQ ID NO: 846856

SEQ ID NO: 846860 - protein, 327 aa, Homo sapiens [sequence omitted]

SEQ ID NO: 846861 - protein, 332 aa, Homo sapiens
MSQEGVELEKSVRRLREKFHGKVSSKKAGALMRKFGSDHTGVGRSIVYGVKQKDGQELSNDLDAQDPPEDMKQDRDIQAVATSLLPLTEANLRMFQRAQDDLIPAVDRQFACSSCDHVWWRRVPQRKEVSRCRKCRKRYEPVPADKMWGLAEFHCPKCRHNFRLRALTPSSPSALPYPSPAPPCPGPTLAQPRPRTLTALPAPRGWAQMGSPSPCYGCGFPVYPTRILPPRWDRDPDRRSTHTHSCSAADCYNRREPHVPGTSCAHPKSRKQNHLPKVLHPSNPHISSGSTVATCLSQGGLLEDLDNLILEDLKEEEEEEEEVEDEEGGPRE

SEQ ID NO: 846862 - protein, 90 aa, Homo sapiens
TTRRGRVGRPRVGEPHVPGTSCAHPKSRKQNHLPKVLHPSNPHISSGSTVATCLSQGGLLEDLDNLILEDLKEEEEEEEEVEDEEGGPRE

SEQ ID NO: 846863 - protein, 291 aa, Homo sapiens
MSQEGVELEKSVRRLREKFHGKVSSKKAGALMRKFGSDHTGVGRSIVYGVKQKDGQELSNDLDAQDPPEDMKQDRDIQAVATSLLPLTEANLRMFQRAQDDLIPAVDRQFACSSCDHVWWRRVPQRKEVSRCRKCRKRYEPVPADKMWGLAEFHCPKCRHNFRGWAQMGSPSPCYGCGFPVYPTRILPPRWDRDPDRRSTHTHSCSAADCYNRREPHVPGTSCAHPKSRKQNHLPKVLHPSNPHISSGSTVATCLSQGGLLEDLDNLILEDLKEEEEEEEEVEDEEGGPRE

SEQ ID NO: 846864 - protein, 106 aa, Homo sapiens
MSQEGVELEKSVRRLREKFHGKVSSKKAGALMRKFGSDHTGVGRSIVYGVKQKDGQELSNDLDAQVTYPLPSQRTGSREGEQEGGPDPFMVTDPPLKQEGPGIVGP

SEQ ID NO: 846865 - protein, 291 aa, Homo sapiens; identical to SEQ ID NO: 846863

SEQ ID NO: 846866 - protein, 240 aa, Homo sapiens
MSQHQQACGICRQEDPPEDMKQDRDIQAVATSLLPLTEANLRMFQRAQDDLIPAVDRQFACSSCDHVWWRRVPQRKEVSRCRKCRKRYEPVPADKMWGLAEFHCPKCRHNFRGWAQMGSPSPCYGCGFPVYPTRILPPRWDRDPDRRSTHTHSCSAADCYNRREPHVPGTSCAHPKSRKQNHLPKVLHPSNPHISSGSTVATCLSQGGLLEDLDNLILEDLKEEEEEEEEVEDEEGGPRE

SEQ ID NO: 846867 - protein, 291 aa, Homo sapiens; identical to SEQ ID NO: 846863

SEQ ID NO: 846868 - protein, 102 aa, Homo sapiens
RWVCKAGGLWALLWVQTSLRKSLVICEEMTSLLKRRMHPGSLLCLLRMTLHGLWNLEQVGREVKKGCFSFNSHPSLPKGDHVTGIHGLVRREKCSAPLSYTC

SEQ ID NO: 846869 - protein, 382 aa, Homo sapiens
RPGPRGCPAPASPRLPGPAPRRSFSDSRRGCPASCSARPARLSPRVVARHSRAMTTQQIDLQGPGPWGFRLVGGKDFEQPLAISRVTPGSKAALANLCIGDVITAIDGENTSNMTHLEAQNRIKGCTDNLTLTVARSEHKVWSPLVTEEGKRHPYKMNLASEPQEVLHIGSAHNRSAMPFTASPASSTTARVITNQYNNPAGLYSSENISNFNNALESKTAASGVEANSRPLDHAQPPSSLVIDKESEVYKMLQEKQELNEPPKQSTSFLVLQEILESEEKGDPNKPSGFRSVKAPVTKVAASIGNAQKLPMCDKCGTGIVGVFVKLRDRHRHPECYVCTDCGTNLKQKGHFFVEDQIYCEKHARERVTPPEGYEVVTVFPK

SEQ ID NO: 846870 - protein, 269 aa, Homo sapiens
MTHLEAQNRIKGCTDNLTLTVARSEHKVWSPLVTEEGKRHPYKMNLASEPQEVLHIGSAHNRSAMPFTASPASSTTARVITNQYNNPAGLYSSENISNFNNALESKTAASGVEANSRPLDHAQPPSSLVIDKESEVYKMLQEKQELNEPPKQSTSFLVLQEILESEEKGDPNKPSGFRSVKAPVTKVAASIGNAQKLPMCDKCGTGIVGVFVKLRDRHRHPECYVCTDCGTNLKQKGHFFVEDQIYCEKHARERVTPPEGYEVVTVFPK

SEQ ID NO: 846871 - protein, 312 aa, Homo sapiens
  misc_feature (8)..(8): Xaa can be any naturally occurring amino acid
MREQTNKXGTKKPHLVTPGSKAALANLCIGDVITAIDGENTSNMTHLEAQNRIKGCTDNLTLTVARSEHKVWSPLVTEEGKRHPYKMNLASEPQEVLHIGSAHNRSAMPFTASPASSTTARVITNQYNNPAGLYSSENISNFNNALESKTAASGVEANSRPLDHAQPPSSLVIDKESEVYKMLQEKQELNEPPKQSTSFLVLQEILESEEKGDPNKPSGFRSVKAPVTKVAASIGNAQKLPMCDKCGTGIVGVFVKLRDRHRHPECYVCTDCGTNLKQKGHFFVEDQIYCEKHARERVTPPEGYEVVTVFPK

SEQ ID NO: 846872 - protein, 311 aa, Homo sapiens
LGAFCVEQPLAISRVTPGSKAALANLCIGDVITAIDGENTSNMTHLEAQNRIKGCTDNLTLTVARSEHKVWSPLVTEEGKRHPYKMNLASEPQEVLHIGSAHNRSAMPFTASPASSTTARVITNQYNNPAGLYSSENISNFNNALESKTAASGVEANSRPLDHAQPPSSLVIDKESEVYKMLQEKQELNEPPKQSTSFLVLQEILESEEKGDPNKPSGFRSVKAPVTKVAASIGNAQKLPMCDKCGTGIVGVFVKLRDRHRHPECYVCTDCGTNLKQKGHFFVEDQIYCEKHARERVTPPEGYEVVTVFPK

SEQ ID NO: 846873 - protein, 382 aa, Homo sapiens; identical to SEQ ID NO: 846869

SEQ ID NO: 846874 - protein, 226 aa, Homo sapiens
MNLASEPQEVLHIGSAHNRSAMPFTASPASSTTARVITNQYNNPAGLYSSENISNFNNALESKTAASGVEANSRPLDHAQPPSSLVIDKESEVYKMLQEKQELNEPPKQSTSFLVLQEILESEEKGDPNKPSGFRSVKAPVTKVAASIGNAQKLPMCDKCGTGIVGVFVKLRDRHRHPECYVCTDCGTNLKQKGHFFVEDQIYCEKHARERVTPPEGYEVVTVFPK

SEQ ID NO: 846875 - protein, 422 aa, Homo sapiens
  misc_feature (125)..(125): Xaa can be any naturally occurring amino acid
  misc_feature (127)..(128): Xaa can be any naturally occurring amino acid
RPGPRGCPAPASPRLPGPAPRRSFSDSRRGCPASCSARPARLSPRVVARHSRAMTTQQIDLQGPGPWGFRLVGGKDFEQPLAISRSLLEARRCLCHNISGMWMISTSASPLACGRETIVDTVMYXLXXRRDISQREIYNGRSDLRSETSWNIIHHADDQELLNTKDTLLGCSLREVHWHGERATRSISSEQRMHILYPREAAMSEVLHIGSAHNRSAMPFTASPASSTTARVITNQYNNPAGLYSSENISNFNNALESKTAASGVEANSRPLDHAQPPSSLVIDKESEVYKMLQEKQELNEPPKQSTSFLVLQEILESEEKGDPNKPSGFRSVKAPVTKVAASIGNAQKLPMCDKCGTGIVGVFVKLRDRHRHPECYVCTDCGTNLKQKGHFFVEDQIYCEKHARERVTPPEGYEVVTVFPK

SEQ ID NO: 846876 - protein, 238 aa, Homo sapiens
RIHVAFQQRHDYPADRPPGQEVLHIGSAHNRSAMPFTASPASSTTARVITNQYNNPAGLYSSENISNFNNALESKTAASGVEANSRPLDHAQPPSSLVIDKESEVYKMLQEKQELNEPPKQSTSFLVLQEILESEEKGDPNKPSGFRSVKAPVTKVAASIGNAQKLPMCDKCGTGIVGVFVKLRDRHRHPECYVCTDCGTNLKQKGHFFVEDQIYCEKHARERVTPPEGYEVVTVFPK

SEQ ID NO: 846877 - protein, 348 aa, Homo sapiens
RPGPRGCPAPASPRLPGPAPRRSFSDSRRGCPASCSARPARLSPRVVARHSRAMTTQQIDLQGPGPWGFRLVGGKDFEQPLAISRVTPGSKAALANLCIGDVITAIDGENTSNMTHLEAQNRIKGCTDNLTLTVARSEHKVWSPLVTEEGKRHPYKMNLASEPQEVLHIGSAHNRSAMPFTASPASSTTARVITNQYNNPAGLYSSENISNFNNALESKTAASGVEANSRPLDHAQPPSSLVIDKESEVYKMLQEKQELNEPPKQSTSFLVLQEILESEEKGDPNKPSGFRSVKAPVTKVAASIGNAQKLPMCDKCGTGIVGVFVKLRDRHRHPETEGPFLCGGSNLL

SEQ ID NO: 846878 - protein, 207 aa, Homo sapiens
RPGPRGCPAPASPRLPGPAPRRSFSDSRRGCPASCSARPARLSPRVVARHSRAMTTQQIDLQGPGPWGFRLVGGKDFEQPLAISRVTPGSKAALANLCIGDVITAIDGENTSNMTHLEAQNRIKGCTDNLTLTVARSEHKVWSPLVTEEGKRHPYKMNLASEPQGIPTSPQDSEVLKLLSLKWLRRLEMLRSCLCVTNVALGLLVCL

SEQ ID NO: 846879 - protein, 135 aa, Homo sapiens
MALLEHIFMSGSEELSDTYAILPFLANDSVFLISGDPNKPSGFRSVKAPVTKVAASIGNAQKLPMCDKCGTGIVGVFVKLRDRHRHPECYVCTDCGTNLKQKGHFFVEDQIYCEKHARERVTPPEGYEVVTVFPK

SEQ ID NO: 846880 - protein, 122 aa, Homo sapiens
AVIELGTGVVGFAGNPGVQEKGDPNKPSGFRSVKAPVTKVAASIGNAQKLPMCDKCGTGIVGVFVKLRDRHRHPECYVCTDCGTNLKQKGHFFVEDQIYCEKHARERVTPPEGYEVVTVFPK

SEQ ID NO: 846881 - protein, 321 aa, Homo sapiens
RPGPRGCPAPASPRLPGPAPRRSFSDSRRGCPASCSARPARLSPRVVARHSRAMTTQQIDLQGPGPWGFRLVGGKDFEQPLAISRVTPGSKAALANLCIGDVITAIDGENTSNMTHLEAQNRIKGCTDNLTLTVARSEHKVWSPLVTEEGKRHPYKMNLASEPQEVLHIGSAHNRSAMPFTASPASSTTARVITNQYNNPAGLYSSENISNFNNALESKTAASGVEANSRPLDHAQPPSSLVIDKESEVYKMLQEKQELNEPPKQSTSFLVLQEILESEEKGDPNKPSGFRSVKAPVTKVAASIGNAQKLPMCDKCGTGIV

SEQ ID NO: 846882 - protein, 214 aa, Homo sapiens
MGPTTPRKTAPTTKTRRAPKTATKTPPQPHSHTTQPGEDSNKRACPQSNTSKRQKANPPRRRRRHNRRQQLHNPNESNNPTRRRDKHNTRHRQQANAQQPTPRHDEQANETTTGRRARTPKAPANQPRRTDPKERDINKQTRDERRESRRKADRAQHEKRRTAKRKQKSKEKNTEKDKQNQTTKTTAEKQPKRSETDTRTSKEQNKKKERSAGR

SEQ ID NO: 846883 - protein, 269 aa, Homo sapiens; identical to SEQ ID NO: 846870

SEQ ID NO: 846884 - protein, 382 aa, Homo sapiens; identical to SEQ ID NO: 846869

SEQ ID NO: 846885 - protein, 382 aa, Homo sapiens; identical to SEQ ID NO: 846869

SEQ ID NO: 846886 - protein, 303 aa, Homo sapiens
RPGPRGCPAPASPRLPGPAPRRSFSDSRRGCPASCSARPARLSPRVVARHSRAMTTQQIDLQGPGPWGFRLVGGKDFEQPLAISREVLHIGSAHNRSAMPFTASPASSTTARVITNQYNNPAGLYSSENISNFNNALESKTAASGVEANSRPLDHAQPPSSLVIDKESEVYKMLQEKQELNEPPKQSTSFLVLQEILESEEKGDPNKPSGFRSVKAPVTKVAASIGNAQKLPMCDKCGTGIVGVFVKLRDRHRHPECYVCTDCGTNLKQKGHFFVEDQIYCEKHARERVTPPEGYEVVTVFPK

SEQ ID NO: 846887 - protein, 231 aa, Homo sapiens
RPGPRGCPAPASPRLPGPAPRRSFSDSRRGCPASCSARPARLSPRVVARHSRAMTTQQIDLQGPGPWGFRLVGGKDFEQPLAISRVTPGSKAALANLCIGDVITAIDGENTSNMTHLEAQNRIKGCTDNLTLTVARSEHKVWSPLVTEEGKRHPYKMNLASEPQEVLHIGSAHNRSAMPFTASPASSTTARVITNQYNNPAGLYSSENISNFNNALRPCSASKQPCHRQRI

SEQ ID NO: 846888 - protein, 299 aa, Homo sapiens
  misc_feature (49)..(49): Xaa can be any naturally occurring amino acid
  misc_feature (78)..(78): Xaa can be any naturally occurring amino acid
MSWSTSWLTDEGKRSSITIAGTYETRSAEHAQAKESLRLPYEEGSRIEXLTVVVAYWAPFLIAGPFRPQAVRKSTNRXAKGGATPTIIAKLQYKARESWGACIRSMPGEIVNLPGHFTNESDAAGKIHKDVRDRGRGWKVGTGEDPLVLDHAQPPSSLVIDKESEVYKMLQEKQELNEPPKQSTSFLVLQEILESEEKGDPNKPSGFRSVKAPVTKVAASIGNAQKLPMCDKCGTGIVGVFVKLRDRHRHPECYVCTDCGTNLKQKGHFFVEDQIYCEKHARERVTPPEGYEVVTVFPK

SEQ ID NO: 846889 - protein, 400 aa, Homo sapiens
RPGPRGCPAPASPRLPGPAPRRSFSDSRRGCPASCSARPARLSPRVVARHSRAMTTQQIDLQGPGPWGFRLVGGKDFEQPLAISRVTPGSKAALANLCIGDVITAIDGENTSNMTHLEAQNRIKGCTDNLTLTVARSEHKVWSPLVTEEGKRHPYKMNLASEPQEVLHIGSAHNRSAMPFTASPASSTTARVITNQYNNPAGLYSSENISNFNNALESKTAASGVEANSRPLDHAQPPSSLVIDKESEVYKMLQEKQELNEPPKQSTSFLVLQEILESEEKGDPNKPSGFRSVKAPVTKVAASIGNAQKLPMCDKCGTGIVGVFVKLRDRHRHPECYVCTDCGTNLKQKGHFFVEDQIYCEKHARERVTPPEGYEVVTVFPLSSLESSLLTLVFPLLVKH

SEQ ID NO: 846890 - protein, 333 aa, Homo sapiens
RPGPRGCPAPASPRLPGPAPRRSFSDSRRGCPASCSARPARLSPRVVARHSRAMTTQQIDLQGPGPWGFRLVGGKDFEQPLAISRVTPGSKAALANLCIGDVITAIDGENTSNMTHLEAQNRIKGCTDNLTLTVARSEHKVWSPLVTEEGKRHPYKMNLASEPQEVLHIGSAHNRSAMPFTASPASSTTARVITNQYNNPAGLYSSENISNFNNALESKTAASGVEANSRPLDHAQPPSSLVIDKESEVYKMLQEKQELNEPPKQSTSFLVLQEILESEEKGDPNKPSGFRSVKAPVTKVAASIGNAQKLPCQQHCVPSPRRSSLLHLDISQI

SEQ ID NO: 846891 - protein, 289 aa, Homo sapiens
RPGPRGCPAPASPRLPGPAPRRSFSDSRRGCPASCSARPARLSPRVVARHSRAMTTQQIDLQGPGPWGFRLVGGKDFEQPLAISRVTPGSKAALANLCIGDVITAIDGENTSNMTHLEAQNRIKGCTDNLTLTVARSEHKVWSPLVTEEGKRHPYKMNLASEPQEVLHIGSAHNRSAMPFTASPASSTTARVITNQYNNPAGLYSSENISNFNNALESKTAASGVEANSRPLDHAQPPSSLVIDKESEVYKMLQEKQELNEPPKQSTSFLVLQEILESEEKEVISSICS

SEQ ID NO: 846892 - protein, 243 aa, Homo sapiens
AGCGLGEDSVTGLGLWGGLTLVYLPGPAGLWSVAFSFGGRGFVPERGTCPAYPVPGALQPQMPPPYSSSRLYPGEWHTTPPRPTSALSQMVTRGCCLPAALLGPDNHPANQTQPWMNLWPKHAVDPTVGANRQVGKLSQGLPLVELRGAARGGAGEEGPRGGASVQSWRVSAVQEAGALRKQVCPPPALPGTFVGVPRAQAPGSGEWGWLREGQAGFCWQGSPTPLLSTPFPLVLSVHRTVGQ

SEQ ID NO: 846893 - protein, 778 aa, Homo sapiens
MLPPLIDPWDPGLTARDLLFRGGYRYRKRPRVVLDVTEQISRFLLDHGDVAFAPLGKLMLENFKLEGAGSRTKKKTVVSVKKLLQDLGGHQPWGCPWAYLSNRQRRFSILGGPILGTSVASHLAELLHEELVLRWEQLLLDEACTGGALAWVPGRTPQFGQLVYPAGGAQDRLHFQEVVLTPGDNPQFLGKPGRIQLQGPVRQVVTCTVQGETLLAVRSDYHCAVWKFGKQWQPTLLQAMQVEKGATGISLSPHLPGELAICSRSGAVCLWSPEDGLRQIYRDPETLVFRDSSSWRWADFTAHPRVLTVGDRTGVKMLDTQGPPGCGLLLFRLGAEASCQKGERVLLTQYLGHSSPKCLPPTLHLVCTQPQFSLYLVDERLPLVPMLKWNHGLPSPLLLARLLPPPRPSCVQPLLLGGQGGQLQLLHLAGEGASVPRLAGPPQSLPSRIDSLPAFPLLEPKIQWRLQERLKAPTIGLAAVVPPLPSAPTPGLVLFQLSAAGDVFYQQLRPQVDSSLRRDAGPPGDTQPDCHAPTASWTSQDTAGCSQWLKALLKVPLAPPVWTAPTFTHRQMLGSTELRREEEEGQRLGVLRKAMARGQLLLQRDLGSLPAAEPPPAPESGLEDKLSERLGEAWAGRGAAWWERQQGRTSEPGRQTRRPKRRTQLSSSFSLSGHVDPSEDTSSPHSPEWPPADALPLPPTTPPSQELTPDACAQGVPSEQRQMLRDYMAKLPPQRDTPGCATTPPHSQASSVRATRSQQHTPVLSSSQPLRKKPRMGF

SEQ ID NO: 846894 - protein, 847 aa, Homo sapiens
MLPPLIDPWDPGLTARDLLFRGGYRYRKRPRVVLDVTEQISRFLLDHGDVAFAPLGKLMLENFKLEGAGSRTKKKTVVSVKKLLQDLGGHQPWGCPWAYLSNRQRRFSILGGPILGTSVASHLAELLHEELVLRWEQLLLDEACTGGALAWVPGRTPQFGQLVYPAGGAQDRLHFQEVVLTPGDNPQFLGKPGRIQLQGPVRQVVTCTVQGESKALIYTFLPHWLTCYLTPGPFHPSSALLAVRSDYHCAVWKFGKQWQPTLLQAMQVEKGATGISLSPHLPGELAICSRSGAVCLWSPEDGYRRFLLKPPTLNELNSALLSMSRPLSPFPISLPPAHGLPVSPRLRQIYRDPETLVFRDSSSWRWADFTAHPRVLTVGDRTGVKMLDTQGPPGCGLLLFRLGAEASCQKGERVLLTQYLGHSSPKCLPPTLHLVCTQPQFSLYLVDERLPLVPMLKWNHGLPSPLLLARLLPPPRPSCVQPLLLGGQGGQLQLLHLAGEGASVPRLAGPPQSLPSRIDSLPAFPLLEPKIQWRLQERLKAPTIGLAAVVPPLPSAPTPGLVLFQLSAAGDVFYQQLRPQVDSSLRRDAGPPGDTQPDCHAPTASWTSQDTAGCSQWLKALLKVPLAPPVWTAPTFTHRQMLGSTELRREEEEGQRLGVLRKAMARGQLLLQRDLGSLPAAEPPPAPESGLEDKLSERLGEAWAGRGAAWWERQQGRTSEPGRQTRRPKRRTQLSSSFSLSGHVDPSEDTSSPHSPEWPPADALPLPPTTPPSQELTPDACAQGVPSEQRQMLRDYMAKLPPQRDTPGCATTPPHSQASSVRATRSQQHTPVLSSSQPLRKKPRMGF

SEQ ID NO: 846895 - protein, 791 aa, Homo sapiens
MGYRRPRLELEGAGSRTKKKTVVSVKKLLQDLGGHQPWGCPWAYLSNRQRRFSILGGPILGTSVASHLAELLHEELVLRWEQLLLDEACTGGALAWVPGRTPQFGQLVYPAGGAQDRLHFQEVVLTPGDNPQFLGKPGRIQLQGPVRQVVTCTVQGESKALIYTFLPHWLTCYLTPGPFHPSSALLAVRSDYHCAVWKFGKQWQPTLLQAMQVEKGATGISLSPHLPGELAICSRSGAVCLWSPEDGYRRFLETPHPNELNSALLSMSRPLSPFPISLSPCPRLPVSPRLRQIYRDPETLVFRDSSSWRWADFTAHPRVLTVGDRTGVKMLDTQGPPGCGLLLFRLGAEASCQKGERVLLTQYLGHSSPKCLPPTLHLVCTQPQFSLYLVDERLPLVPMLKWNHGLPSPLLLARLLPPPRPSCVQPLLLGGQGGQLQLLHLAGEGASVPRLAGPPQSLPSRIDSLPAFPLLEPKIQWRLQERLKAPTIGLAAVVPPLPSAPTPGLVLFQLSAAGDVFYQQLRPQVDSSLRRDAGPPGDTQPDCHAPTASWTSQDTAGCSQWLKALLKVPLAPPVWTAPTFTHRQMLGSTELRREEEEGQRLGVLRKAMARGQLLLQRDLGSLPAAEPPPAPESGLEDKLSERLGEAWAGRGAAWWERQQGRTSEPGRQTRRPKRRTQLSSSFSLSGHVDPSEDTSSPHSPEWPPADALPLPPTTPPSQELTPDACAQGVPSEQRQMLRDYMAKLPPQRDTPGCATTPPHSQASSVRATRSQQHTPVLSSSQPLRKKPRMGF

SEQ ID NO: 846896 - protein, 740 aa, Homo sapiens
MLPPLIDPWDPGLTARDLLFRGGYRYRKRPRVVLDVTEQISRFLLDHGDVAFAPLGKLMLENFKLEGAGSRTKKKTVVSVKKLLQDLGGHQPWGCPWAYLSNRQRRFSILGGPILGTSVASHLAELLHEELVLRWEQLLLDEACTGGALAWVPGRTPQFGQLVYPAGGAQDRLHFQEVVLTPGDNPQFLGKPGRIQLQGPVRQVVTCTVQGETLLAVRSDYHCAVWKFGKQWQPTLLQAMQVEKGATGISLSPHLPGELAICSRSGAVCLWSPEDGLRQIYRDPETLVFRDSSSWRWADFTAHPRVLTVGDRTGVKMLDTQGPPGCGLLLFRLGAEASCQKGERVLLTQYLGHSSPKCLPPTLHLVCTQPQFSLYLVDERLPLVPMLKWNHGLPSPLLLARLLPPPRPSCVQPLLLGGQGGQLQLLHLAGEGASVPRLAGPPQSLPSRIDSLPAFPLLEPKIQWRLQERLKAPTIGLAAVVPPLPSAPTPGLVLFQLSAAGDVFYQQLRPQVDSSLRRDAGPPGDTQPDCHAPTASWTSQDTAGCSQWLKALLKVPLAPPVWTAPTFTHRQMLGSTELRREEEEGQRLGVLRKAMARGQLLLQRDLGSLPAAEPPPAPESGLEDKLSERLGEAWAGRGAAWWERQQGRTSEPGRQTRRPKRRTQLSSSFSLSGHVDPSEDTSSPHSPEWPLAPSSTHPSSLALSPSGRSLEWASEDTRWAALKPQRAPHPSSGTRCAFHS

SEQ ID NO: 846897 - protein, 778 aa, Homo sapiens; identical to SEQ ID NO: 846893

SEQ ID NO: 846898 - protein, 778 aa, Homo sapiens; identical to SEQ ID NO: 846893

SEQ ID NO: 846899 - protein, 489 aa, Homo sapiens
MLPPLIDPWDPGLTARDLLFRGGYRYRKRPRVVLDVTEQISRFLLDHGDVAFAPLGKLMLENFKLEGAGSRTKKKTVVSVKKLLQDLGGHQPWGCPWAYLSNRQRRFSILGGPILGTSVASHLAELLHEELVLRWEQLLLDEACTGGALAWVPGRTPQFGQLVYPAGGAQDRLHFQEVVLTPGDNPQFLGKPGRIQLQGPVRQVVTCTVQGETLLAVRSDYHCAVWKFGKQWQPTLLQAMQVEKGATGISLSPHLPGELAICSRSGAVCLWSPEDGLREIYRDPMKTTRCTGTPSISRTDRGQDIQMSNPIRDAEPDADGPDNRSDKNDWTNIQGPARADGSAAFTDKERQKASEAQDTGKQETQAKPKYPGGENPEPKMTPHRKLTTPVRTHEVISNRRAEAIPLEARKVDRGTHTEEKNAGDQARHRSNPEGKTGGGKRKRKKEKQHKHEKPRQTENSGRKEKKNKEHKKPEIEDKQTETQGPDDES

SEQ ID NO: 846900 - protein, 303 aa, Homo sapiens
PLVPMLKWNHGLPSPLLLARLLPPPRPSCVQPLLLGGQGGQLQLLHLAGEGPGQGGRRVGDGAGRGLDRASAVCPSSGEGASVPRLAGPPQSLPSRIDSLPAFPLLEPKIQWRLQERLKAPTIGVLGGGVSLGGAVENIPSPRWPWRSLSFPSPGLAAVVPPLPSAPTPGLVLFQLSAAGDVFYQQLRPQVDSSLRRDAGPPGDTQPDCHAPTASWTSQDTAGCSQWLKALLKVPLAPPVWTAPTFTHRQMLGSTELRREEEEGQRLGVLRKAMARGQLLLQRDLGSLPAAEPPPAPESGLED

SEQ ID NO: 846901 - protein, 871 aa, Homo sapiens
MDFPSSLRPALFLTGPLGLSDVPDLSFMCSWRDALTLPEAQPQNSENGALHVTKDLLWEPATPGPLPMLPPLIDPWDPGLTARDLLFRGGYRYRKRPRVVLDVTEQISRFLLDHGDVAFAPLGKLMLENFKLEGAGSRTKKKTVVSVKKLLQDLGGHQPWGCPWAYLSNRQRRFSILGGPILGTSVASHLAELLHEELVLRWEQLLLDEACTGGALAWVPGRTPQFGQLVYPAGGAQDRLHFQEVVLTPGDNPQFLGKPGRIQLQGPVRQVVTCTVQGESKALIYTFLPHWLTCYLTPGPFHPSSALLAVRSDYHCAVWKFGKQWQPTLLQAMQVEKGATGISLSPHLPGELAICSRSGAVCLWSPEDGLRQIYRDPETLVFRDSSSWRWADFTAHPRVLTVGDRTGVKMLDTQGPPGCGLLLFRLGAEASCQKGERVLLTQYLGHSSPKCLPPTLHLVCTQPQFSLYLVDERLPLVPMLKWNHGLPSPLLLARLLPPPRPSCVQPLLLGGQGGQLQLLHLAGEGASVPRLAGPPQSLPSRIDSLPAFPLLEPKIQWRLQERLKAPTIGLAAVVPPLPSAPTPGLVLFQLSAAGDVFYQQLRPQVDSSLRRDAGPPGDTQPDCHAPTASWTSQDTAGCSQWLKALLKVPLAPPVWTAPTFTHRQMLGSTELRREEEEGQRLGVLRKAMARGQLLLQRDLGSLPAAEPPPAPESGLEDKLSERLGEAWAGRGAAWWERQQGRTSEPGRQTRRPKRRTQLSSSFSLSGHVDPSEDTSSPHSPEWPPADALPLPPTTPPSQELTPDACAQGVPSEQRQMLRDYMAKLPPQRDTPGCATTPPHSQASSVRATRSQQHTPVLSSSQPLRKKPRMGF

SEQ ID NO: 846902 - protein, 695 aa, Homo sapiens
MDFPSSLRPALFLTGPLGLSDVPDLSFMCSWRDALTLPEAQPQNSENGALHVTKDLLWEPATPGPLPMLPPLIDPWDPGLTARDLLFRGGYRYRKRPRVVLDVTEQISRFLLDHGDVAFAPLGKLMLENLCWPSALTTTVPCGSLVNSGSQPFCRQCRWRKGPRGSASALTCPGSWPSAAAREPSACGALRMGCGNIYRDPETLVFRDSSSWRWADFTAHPRVLTVGDRTGVKMLDTQGPPGCGLLLFRLGAEASCQKGERVLLTQYLGHSSPKCLPPTLHLVCTQPQFSLYLVDERLPLVPMLKWNHGLPSPLLLARLLPPPRPSCVQPLLLGGQGGQLQLLHLAGEGASVPRLAGPPQSLPSRIDSLPAFPLLEPKIQWRLQERLKAPTIGLAAVVPPLPSAPTPGLVLFQLSAAGDVFYQQLRPQVDSSLRRDAGPPGDTQPDCHAPTASWTSQDTAGCSQWLKALLKVPLAPPVWTAPTFTHRQMLGSTELRREEEEGQRLGVLRKAMARGQLLLQRDLGSLPAAEPPPAPESGLEDKLSERLGEAWAGRGAAWWERQQGRTSEPGRQTRRPKRRTQLSSSFSLSGHVDPSEDTSSPHSPEWPPADALPLPPTTPPSQELTPDACAQGVPSEQRQMLRDYMAKLPPQRDTPGCATTPPHSQASSVRATRSQQHTPVLSSSQPLRKKPRMGF

SEQ ID NO: 846903 - protein, 462 aa, Homo sapiens
MLDTQGPPGCGLLLFRLGAEASCQKGERVLLTQYLGHSSPKCLPPTLHLVCTQPQFSLYLVDERLPLVPMLKWNHGLPSPLLLARLLPPPRPSCVQPLLLGGQGGQLQLLHLAGEGASVPRLAGPPQSLPSRIDSLPAFPLLEPKIQWRLQERLKAPTIGLAAVVPPLPSAPTPGLVLFQLSAAGDVFYQQLRPQVDSSLRRDAGPPGDTQPDCHAPTASWTSQDTAGCSQWLKALLKVPLAPPVWTAPTFTHRQMLGSTELRREEEEGQRLGVLRKAMARGQLLLQRDLGSLPAAEPPPAPESGLEDKLSERLGEAWAGRGAAWWERQQGRTSEPGRQTRRPKRRTQLSSSFSLSGHVDPSEDTSSPHSPEWPPADALPLPPTTPPSQELTPDACAQGVPSEQRQMLRDYMAKLPPQRDTPGCATTPPHSQASSVRATRSQQHTPVLSSSQPLRKKPRMGF

SEQ ID NO: 846904 - protein, 453 aa, Homo sapiens
GTWRLMGDAAAPQGSALTWRATWGLEGHYTAQLPSSATSPFLLGPQFSLYLVDERLPLVPMLKWNHGLPSPLLLARLLPPPRPSCVQPLLLGGQGGQLQLLHLAGEGASVPRLAGPPQSLPSRIDSLPAFPLLEPKIQWRLQERLKAPTIGLAAVVPPLPSAPTPGLVLFQLSAAGDVFYQQLRPQVDSSLRRDAGPPGDTQPDCHAPTASWTSQDTAGCSQWLKALLKVPLAPPVWTAPTFTHRQMLGSTELRREEEEGQRLGVLRKAMARGQLLLQRDLGSLPAAEPPPAPESGLEDKLSERLGEAWAGRGAAWWERQQGRTSEPGRQTRRPKRRTQLSSSFSLSGHVDPSEDTSSPHSPEWPPADALPLPPTTPPSQELTPDACAQGVPSEQRQMLRDYMAKLPPQRDTPGCATTPPHSQASSVRATRSQQHTPVLSSSQPLRKKPRMGF

SEQ ID NO: 846905 - protein, 778 aa, Homo sapiens; identical to SEQ ID NO: 846893

SEQ ID NO: 846906 - protein, 539 aa, Homo sapiens
MLPPLIDPWDPGLTARDLLFRGGYRYRKRPRVVLDVTEQISRFLLDHGDVAFAPLGKLMLENFKLEGAGSRTKKKTVVSVKKLLQDLGGHQPWGCPWAYLSNRQRRFSILGGPILGTSVASHLAELLHEELVLRWEQLLLDEACTGGALAWVPGRTPQFGQLVYPAGGAQDRLHFQEVVLTPGDNPQFLGKPGRIQLQGPVRQVVTCTVQGETLLAVRSDYHCAVWKFGKQWQPTLLQAMQVEKGATGISLSPHLPGELAICSRSGAVCLWSPEDGLRQIYRDPETLVFRDSSSWRWADFTAHPRVLTVGDRTGVKMLDTQGPPGCGLLLFRLGAEASCQKGERVLLTQYLGHSSPKCLPPTLHLVCTQVSGYTTPPRPTSALSQMVTRGCCLPAALLGPDNHPANQTQPWMNLWPKHAVDPTVGANRQVGKLSQGLPLVELRGAARGGAGEEGPRGGASVQSWRVSAVQEAGALRKQVCPPPALPGTFVGVPRAQAPGSGEWGWLREGQAGFCWQGSPTPLLSTPFPLVLSVHRTVGQ

SEQ ID NO: 846907 - protein, 330 aa, Homo sapiens
MLPPLIDPWDPGLTARDLLFRGGYRYRKRPRVVLDVTEQISRFLLDHGDVAFAPLGKLMLENFKLEGAGSRTKKKTVVSVKKLLQDLGGHQPWGCPWAYLSNRQRRFSILGGPILGTSVASHLAELLHEELVLRWEQLLLDEACTGGALAWVPGRTPQFGQLVYPAGGAQDRLHFQEVVLTPGDNPQFLGKPGRIQLQGPVRQVVTCTVQGETLLAVRSDYHCAVWKFGKQWQPTLLQAMQVEKGATGISLSPHLPGELAICSRSGAVCLWSPEDGLRQIYRDPETLVFRDSSSWRWADFTAHPRVLTVGDRTGVKMLDTQVRAGGRGPT

SEQ ID NO: 846908 - protein, 80 aa, Homo sapiens
LSNSIQATTDEEGSVSNIATEIKDGEKSGTVSSQKKPALKATSDEKDSFSNITREKKDGEISRTGISKQVSKVINSGLFH

SEQ ID NO: 846909 - protein, 305 aa, Homo sapiens
MKCKDCVHLLKIKNTFCLWKRLIKLKDNHCEQLRVKIRKLKNKASVLQKRISEKEEIKSQLKHEILELEKELCSLRFAIQQEKKKRRNVEEVHQKVREKLRITEEQYRIEADVTKPIKPALKSAEVELKTGGNNSNQVSETDEKEDLLHENRLMQDEIARLRLEKDTIKNQNLEKKYLKDFEIVKRKHEDLQKALKRNGETLAKTIACYSGQLAALTDENTTLRSKLEKQRESRQRLETEMQSYHCRLNAARCDHDQSHSSKRDQELAFQGTVDKCRHLQENLNSHVLILSLQLSKAESKSRVLK

SEQ ID NO: 846910 - protein, 317 aa, Homo sapiens
PQVMRKDSFSNITREKKDGEISGTVSSQKPPALKAASDKTDSALNTATEIKDGLQCGTVSSQKQQALKATTDEEGSVSNIATEIKDGEKSGTVSSQKKPALKATSDKKDSVPNMATETKDEQISGTVSSQKQPALKATSDKKDSVSNIPTEIKDGQQSGTVSSQKQPAWKATSVKKDSVSNIATEIKDGQIRGTVSSQRRPALKTTGDEKDSVSNIAREIKDGEKSGTVSPQKQSAQKVIFKKKVSLLNIATRITGGGKSGTEYPENLRTLKATIENKDSVTHRGFHHVGLAVPQCLYCMENIDNILPFHHFNNDAY

SEQ ID NO: 846911 - protein, 338 aa, Homo sapiens
MYILVQRMNEYMLKMHSPLYPKIYSCILSLLCFFLVTDCVHLLKIKNTFCLWKRLIKLKDNHCEQLRVKIRKLKNKASVLQKRISEKEEIKSQLKHEILELEKELCSLRFAIQQEKKKRRNVEEVHQKVREKLRITEEQYRIEADVTKPIKPALKSAEVELKTGGNNSNQVSETDEKEDLLHENRLMQDEIARLRLEKDTIKNQNLEKKYLKDFEIVKRKHEDLQKALKRNGETLAKTIACYSGQLAALTDENTTLRSKLEKQRESRQRLETEMQSYHCRLNAARCDHDQSHSSKRDQELAFQGTVDKCRHLQENLNSHVLILSLQLSKAESKSRVLK

SEQ ID NO: 846912 - protein, 635 aa, Homo sapiens
PQVMRKDSFSNITREKKDGEISGTVSSQKPPALKAASDKTDSALNTATEIKDGLQCGTVSSQKQQALKATTDEEGSVSNIATEIKDGEKSGTVSSQKKPALKATSDKKDSVPNMATETKDEQISGTVSSQKQPALKATSDKKDSVSNIPTEIKDGQQSGTVSSQKQPAWKATSVKKDSVSNIATEIKDGQIRGTVSPQKQSAQKVIFKKKVSLLNIATRITGGGKSGTEYPENLPTLKATIENKNSVLNTATKMKDVQTSTPAEQDLEMASEGEQKRLEEYENNQPQVKNQIHSRDDLDDIIQSSQTVSEDGDSLCCNCKNVILLIDQHEMKCKDCVHLLKIKNTFCLWKRLIKLKDNHCEQLRVKIRKLKNKASVLQKRISEKEEIKSQLKHEILELEKELCSLRFAIQQEKKKRRNVEEVHQKVREKLRITEEQYRIEADVTKPIKPALKSAEVELKTGGNNSNQVSETDEKEDLLHENRLMQDEIARLRLEKDTIKNQNLEKKYLKDFEIVKRKHEDLQKALKRNGETLAKTIACYSGQLAALTDENTTLRSKLEKQRESRQRLETEMQSYHCRLNAARCDHDQSHSSKRDQELAFQGTVDKCRHLQENLNSHVLILSLQLSKAESKSRVLK

SEQ ID NO: 846913 - protein, 424 aa, Homo sapiens
PQVMRKDSFSNITREKKDGEISGTVSSQKPPALKAASDKTDSALNTATEIKDGLQCGTVSSQKQQALKATTDEEGSVSNIATEIKDGEKSGTVSSQKKPALKATSDKKDSVPNMATETKDEQISGTVSSQKQPALKATSDKKDSVSNIPTEIKDGQQSGTVSSQKQPAWKATSVKKDSVSNIATEIKDGQIRGTVSPQKQSAQKVIFKKKVSLLNIATRITGGGKSGTEYPENLPTLKATIENKNSVLNTATKMKDVQTSTPAEQDLEMASEGEQKRLEEYENNQPQVKNQIHSRDDLDDIIQSSQTVSEDGDSLCCNCKNVILLIDQHEMKCKDCVHLLKIKNTFCLWKRLIKLKDNHCEQLRVKIRKLKNKASVLQKRISEKEEIKSQLKHEILELEKELCSLRYDLVLNKCLNCLFYIKDV

SEQ ID NO: 846914 - protein, 774 aa, Homo sapiens
MEPEREGTERHPRKVRESRQAPNKLVGAAEAMKAGWDLEESQPEAKKARLSTILFTDNCEVTHDQLCELLKYAVLGKSNVPKPSWCQLFHQNHLNNVVVFVLQGMSQLHFYRFYLEFGCLRKAFRHKFRLPPPSSDFLADVVGLQTEQRAGDLPKTMEGPLPSNAKAAINLQDDPIIQKYGSKKVGLTRCLLTKEEMRTFHFPLQGFPDCENFLLTKCNGSIADNSPLFGLDCEMCLTSKGRELTRISLVAEGGCCVMDELVKPENKILDYLTSFSGITKKILNPVTTKLKDVQRQLKALLPPDAVLVGHSLDLDLRALKMIHPYVIDTSLLYVREQGRRFKLKFLAKVILGKDIQCPDRLGHDATEDARTILELARYFLKHGPKKIAELNLEALANHQEIQAAGQEPKNTAEVLQHPNTSVLECLDSVGQKLLFLTRETDAGELPSSRNCQTIKCLSNKEVLEQARVEIPLFPFSIVQFSFKAFSPVLTEEMNKRMRIKWTEISTVYAGPFSKNCNLRALKRLFKSFGPVQSMTFVLETRQPHLCIQYEVLEAAQLAIESLDGILVDGICIKVQRPVTELTLDCDTLVNELEGDSENQGSIYLSGVSETFKEQLLQEPRLFLGLEAVILPKDLKSGKQKKYCFLKFKSFGSAQQALNILTGKDWKLKGRHALTPRHLHAWLRGLPPESTRLPGLRVVPPPFEQEALQTLKLDHPKIAAWRWSRKIGKLYNSLCPGTLCLILLPGTKSTHGSLSGLGLMGIKEEEESAGPGLCS

SEQ ID NO: 846915 - protein, 774 aa, Homo sapiens; identical to SEQ ID NO: 846914

SEQ ID NO: 846916 - protein, 774 aa, Homo sapiens; identical to SEQ ID NO: 846914

SEQ ID NO: 846917 - protein, 774 aa, Homo sapiens; identical to SEQ ID NO: 846914

SEQ ID NO: 846918 - protein, 670 aa, Homo sapiens [sequence omitted]

SEQ ID NO: 846919 - protein, 628 aa, Homo sapiens
MQFWANPMFQNPGPLPSNAKAAINLQDDPIIQKYGSKKVGLTRCLLTKEEMRTFHFPLQGFPDCENFLLTKCNGSIADNSPLFGLDCEMCLTSKGRELTRISLVAEGGCCVMDELVKPENKILDYLTSFSGITKKILNPVTTKLKDVQRQLKALLPPDAVLVGHSLDLDLRALKMIHPYVIDTSLLYVREQGRRFKLKFLAKVILGKDIQCPDRLGHDATEDARTILELARYFLKHGPKKIAELNLEALANHQEIQAAGQEPKNTAEVLQHPNTSVLECLDSVGQKLLFLTRETDAGELPSSRNCQTIKCLSNKEVLEQARVEIPLFPFSIVQFSFKAFSPVLTEEMNKRMRIKWTEISTVYAGPFSKNCNLRALKRLFKSFGPVQSMTFVLETRQPHLCIQYEVLEAAQLAIESLDGILVDGICIKVQRPVTELTLDCDTLVNELEGDSENQGSIYLSGVSETFKEQLLQEPRLFLGLEAVILPKDLKSGKQKKYCFLKFKSFGSAQQALNILTGKDWKLKGRHALTPRHLHAWLRGLPPESTRLPGLRVVPPPFEQEALQTLKLDHPKIAAWRWSRKIGKLYNSLCPGTLCLILLPGTKSTHGSLSGLGLMGIKEEEESAGPGLCS

SEQ ID NO: 846920 - protein, 517 aa, Homo sapiens
MDELVKPENKILDYLTSFSGITKKILNPVTTKLKDVQRQLKALLPPDAVLVGHSLDLDLRALKMIHPYVIDTSLLYVREQGRRFKLKFLAKVILGKDIQCPDRLGHDATEDARTILELARYFLKHGPKKIAELNLEALANHQEIQAAGQEPKNTAEVLQHPNTSVLECLDSVGQKLLFLTRETDAGELPSSRNCQTIKCLSNKEVLEQARVEIPLFPFSIVQFSFKAFSPVLTEEMNKRMRIKWTEISTVYAGPFSKNCNLRALKRLFKSFGPVQSMTFVLETRQPHLCIQYEVLEAAQLAIESLDGILVDGICIKVQRPVTELTLDCDTLVNELEGDSENQGSIYLSGVSETFKEQLLQEPRLFLGLEAVILPKDLKSGKQKKYCFLKFKSFGSAQQALNILTGKDWKLKGRHALTPRHLHAWLRGLPPESTRLPGLRVVPPPFEQEALQTLKLDHPKIAAWRWSRKIGKLYNSLCPGTLCLILLPGTKSTHGSLSGLGLMGIKEEEESAGPGLCS

SEQ ID NO: 846921 - protein, 517 aa, Homo sapiens; identical to SEQ ID NO: 846920

SEQ ID NO: 846922 - protein, 528 aa, Homo sapiens
MLVFQCLTSKGRELTRISLVAEGGCCVMDELVKPENKILDYLTSFSGITKKILNPVTTKLKDVQRQLKALLPPDAVLVGHSLDLDLRALKQGRRFKLKFLAKVILGKDIQCPDRLGHDATEDARTILELARYFLKHGPKKIAELNLEALANHQEIQAAGQEPKNTAEVLQHPNTSVLECLDSVGQKLLFLTRETDAGELPSSRNCQTIKCLSNKEVLEQARVEIPLFPFSIVQFSFKAFSPVLTEEMNKRMRIKWTEISTVYAGPFSKNCNLRALKRLFKSFGPVQSMTFVLETRQPHLCIQYEVLEAAQLAIESLDGILVDGICIKVQRPVTELTLDCDTLVNELEGDSENQGSIYLSGVSETFKEQLLQEPRLFLGLEAVILPKDLKSGKQKKYCFLKFKSFGSAQQALNILTGKDWKLKGRHALTPRHLHAWLRGLPPESTRLPGLRVVPPPFEQEALQTLKLDHPKIAAWRWSRKIGKLYNSLCPGTLCLILLPGTKSTHGSLSGLGLMGIKEEEESAGPGLCS

SEQ ID NO: 846923 - protein, 743 aa, Homo sapiens
MEPEREGTERHPRKVRESRQAPNKLVGAAEAMKAGWDLEESQPEAKKARLSTILFTDNCEVTHDQLCELLKYAVLGKSNVPKPSWCQLFHQNHLNNVVVFVLQGMSQLHFYRFYLEFGCLRKAFRHKFRLPPPSSDFLADVVGLQTEQRAGDLPKTMEGPLPSNAKAAINLQDDPIIQKYGSKKVGLTRCLLTKEEMRTFHFPLQGFPDCENFLLTKCNGSIADNSPLFGLDCEMCLTSKGRELTRISLVAEGGCCVMDELVKPENKILDYLTSFSGITKKILNPVTTKLKDVQRQLKALLPPDAVLVGHSLDLDLRALKMIHPYVIDTSLLYVREQGRRFKLKFLAKVILGKDIQCPDRLGHDATEDARTILELARYFLKHGPKKIAELNLEALANHQEIQAAGQEPKNTAEVLQHPNTSVLECLDSVGQKLLFLTRETDAGELPSSRNCQTIKCLSNKEVLEQARVEIPLFPFSIVQFSFKAFSPVLTEEMNKRMRIKWTEISTVYAGPFSKNCNLRALKRLFKSFGPVQSMTFVLETRQVQRPVTELTLDCDTLVNELEGDSENQGSIYLSGVSETFKEQLLQEPRLFLGLEAVILPKDLKSGKQKKYCFLKFKSFGSAQQALNILTGKDWKLKGRHALTPRHLHAWLRGLPPESTRLPGLRVVPPPFEQEALQTLKLDHPKIAAWRWSRKIGKLYNSLCPGTLCLILLPGTKSTHGSLSGLGLMGIKEEEESAGPGLCS

SEQ ID NO: 846924 - protein, 517 aa, Homo sapiens; identical to SEQ ID NO: 846920

SEQ ID NO: 846925 - protein, 708 aa, Homo sapiens
MEPEREGTERHPRKVRESRQAPNKLVGAAEAMKAGWDLEESQPEAKKARLSTILFTDNCEVTHDQLCELLKYAVLGKSNVPKPSWCQLFHQNHLNNVVVFVLQGMSQLHFYRFYLEFGCLRKAFRHKFRLPPPSSDFLADVVGLQTEQRAGDLPKTMEGPLPSNAKAAINLQDDPIIQKYGSKKVGLTRCLLTKEEMRTFHFPLQGFPDCENFLLTKCNGSIADNSPLFGLDCEMCLTSKGRELTRISLVAEGGCCVMDELVKPENKILDYLTSFSGITKKILNPVTTKLKDVQRQLKALLPPDAVLVGHSLDLDLRALKMIHPYVIDTSLLYVREQGRRFKLKFLAKVILGKDIQCPDRLGHDATEDARTILELARYFLKHGPKKIAELNLEALANHQEIQAAGQEPKNTAEVLQHPNTSVLECLDSVGQKLLFLTRETDAGELPSSRNCQTIKCLSNKEMRIKWTEISTVYAGPFSKNCNLRALKRLFKSFGPVQSMTFVLETRQVQRPVTELTLDCDTLVNELEGDSENQGSIYLSGVSETFKEQLLQEPRLFLGLEAVILPKDLKSGKQKKYCFLKFKSFGSAQQALNILTGKDWKLKGRHALTPRHLHAWLRGLPPESTRLPGLRVVPPPFEQEALQTLKLDHPKIAAWRWSRKIGKLYNSLCPGTLCLILLPGTKSTHGSLSGLGLMGIKEEEESAGPGLCS

SEQ ID NO: 846926 - protein, 670 aa, Homo sapiens [sequence omitted]

SEQ ID NO: 846927 - protein, 544 aa, Homo sapiens
MLVFQCLTSKGRELTRISLVAEGGCCVMDELVKPENKILDYLTSFSGITKKILNPVTTKLKDVQRQLKALLPPDAVLVGHSLDLDLRALKMIHPYVIDTSLLYVREQGRRFKLKFLAKVILGKDIQCPDRLGHDATEDARTILELARYFLKHGPKKIAELNLEALANHQEIQAAGQEPKNTAEVLQHPNTSVLECLDSVGQKLLFLTRETDAGELPSSRNCQTIKCLSNKEVLEQARVEIPLFPFSIVQFSFKAFSPVLTEEMNKRMRIKWTEISTVYAGPFSKNCNLRALKRLFKSFGPVQSMTFVLETRQPHLCIQYEVLEAAQLAIESLDGILVDGICIKVQRPVTELTLDCDTLVNELEGDSENQGSIYLSGVSETFKEQLLQEPRLFLGLEAVILPKDLKSGKQKKYCFLKFKSFGSAQQALNILTGKDWKLKGRHALTPRHLHAWLRGLPPESTRLPGLRVVPPPFEQEALQTLKLDHPKIAAWRWSRKIGKLYNSLCPGTLCLILLPGTKSTHGSLSGLGLMGIKEEEESAGPGLCS

SEQ ID NO: 846928 - protein, 216 aa, Homo sapiens
MEPEREGTERHPRKVRESRQAPNKLVGAAEAMKAGWDLEESQPEAKKARLSTILFTDNCEVTHDQLCELLKYAVLGKSNVPKPSWCQLFHQNHLNNVVVFVLQGMSQLHFYRFYLEFGCLRKAFRHKFRLPPPSSDFLADVVGLQTEQRAGDLPKTMEGPLPSNAKAAINLQDDPIIQKYGSKKVGLTRCLLTKEEMRTFHFPLQGLAEAYSDIAN

SEQ ID NO: 846929 - protein, 151 aa, Homo sapiens
MSGRAGFFQLRLPTLPSYPGGCAAPRGISITAKEKTLGVQVPFAPGVDSPAGVHTPTGAPSGHPPQSVPHAHPPSKEGFSLFSSWGKEERRGGKKREAADGKRRINVHLVLPAKSREGTHRGAAKRELPIKTGTESPGSGGGGGAGRVTSP

SEQ ID NO: 846930 - protein, 151 aa, Homo sapiens; identical to SEQ ID NO: 846929

SEQ ID NO: 846931 - protein, 151 aa, Homo sapiens; identical to SEQ ID NO: 846929

SEQ ID NO: 846932 - protein, 151 aa, Homo sapiens; identical to SEQ ID NO: 846929

SEQ ID NO: 846933 - protein, 151 aa, Homo sapiens; identical to SEQ ID NO: 846929

SEQ ID NO: 846934 - protein, 150 aa, Homo sapiens
MLILTYHPTVHSWNPTAGQTMPRAAYVKTGICPYCREPASHAWRPRAGARRHRTVLLPLRPLRTETDHRLGAGVSVRAAGRASEGEEGEGEGRSPGRGGITAQAADTRAWGGLGPRKERNVYRIYLPDSSDRDPVGHSPSPHFHLPTQTL

SEQ ID NO: 846935 - protein, 151 aa, Homo sapiens; identical to SEQ ID NO: 846929

SEQ ID NO: 846936 - protein, 151 aa, Homo sapiens; identical to SEQ ID NO: 846929

SEQ ID NO: 846937 - protein, 72 aa, Homo sapiens
  misc_feature (6)..(6): Xaa can be any naturally occurring amino acid
SREMPXGPQVAQQLFAVANACRTAQAADTRAWGGLGPRKERNVYRIYLPDSSDRDPVGHSPSPHFHLPTQTL

SEQ ID NO: 846938 - protein, 1303 aa, Homo sapiens
MGDPAPARSLDDIDLSALRDPAGIFELVEVVGNGTYGQVYKGRHVKTGQLAAIKVMDVTEDEEEEIKQEINMLKKYSHHRNIATYYGAFIKKSPPGNDDQLWLVMEFCGAGSVTDLVKNTKGNALKEDCIAYICREILRGLAHLHAHKVIHRDIKGQNVLLTENAEVKLVDFGVSAQLDRTVGRRNTFIGTPYWMAPEVIACDENPDATYDYRSDIWSLGITAIEMAEGAPPLCDMHPMRALFLIPRNPPPRLKSKKWSKKFIDFIDTCLIKTYLSRPPTEQLLKFPFIRDQPTERQVRIQLKDHIDRSRKKRGEKEETEYEYSGSEEEDDSHGEEGEPSSIMNVPGESTLRREFLRLQQENKSNSEALKQQQQLQQQQQRDPEAHIKHLLHQRQRRIEEQKEERRRVEEQQRREREQRKLQEKEQQRRLEDMQALRREEERRQAEREQEYKRKQLEEQRQSERLQRQLQQEHAYLKSLQQQQQQQQLQKQQQQQLLPGDRKPLYHYGRGMNPADKPAWAREVEERTRMNKQQNSPLAKSKPGSTGPEPPIPQASPGPPGPLSQTPPMQRPVEPQEGPHKSLVAHRVPLKPYAAPVPRSQSLQDQPTRNLAAFPASHDPDPAIPAPTATPSARGAVIRQNSDPTSEGPGPSPNPPAWVRPDNEAPPKVPQRTSSIATALNTSGAGGSRPAQAVRASNPDLRRSDPGWERSDSVLPASHGHLPQAGSLERNRVGVSSKPDSSPVLSPGNKAKPDDHRSRPGRPASYKRAIGEDFVLLKERTLDEAPRPPKKAMDYSSSSEEVESSEDDEEEGEGGPAEGSRDTPGGRSDGDTDSVSTMVVHDVEEITGTQPPYGGGTMVVQRTPEEERNLLHADSNGYTNLPDVVQPSHSPTENSKGQSPPSKDGSGDYQSRGLVKAPGKSSFTMFVDLGIYQPGGSGDSIPITALVGGEGTRLDQLQYDVRKGSVVNVNPTNTRAHSETPEIRKYKKRFNSEILCAALWGVNLLVGTENGLMLLDRSGQGKVYGLIGRRRFQQMDVLEGLNLLITISGKRNKLRVYYLSWLRNKILHNDPEVEKKQGWTTVGDMEGCGHYRVVKYERIKFLVIALKSSVEVYAWAPKPYHKFMAFKSFADLPHRPLLVDLTVEEGQRLKVIYGSSAGFHAVDVDSGNSYDIYIPVHIQSQITPHAIIFLPNTDGMEMLLCYEDEGVYVNTYGRIIKDVVLQWGEMPTSVAYICSNQIMGWGEKAIEIRSVETGHLDGVFMHKRAQRLKFLCERNDKVFFASVRSGGSSQVYFMTLNRNCIMNW

SEQ ID NO: 846939 - protein, 288 aa, Homo sapiens
LQRRAERGTPKPPGPPAQPPGPPNASSNPDLRRSDPGWERSDSVLPASHGHLPQAGSLERNRVGVSSKPDSSPVLSPGNKAKPDDHRSRPGRPAVSHLVAGMACLILVWGLASGCWVSGVGSPLIYREGLWGWRELVLLMVLTFPNLSPNLSPNLSSGSFFPCGPSQSYKRAIGEVSEMGLLVGAPPVALLGCPGTLCLPPPRPSFSLPLSGSSLQDFVLLKERTLDEAPRPPKKAMDYSSSSEEVESSEDDEEEGEGGPAEGSRDTPGGRYGIGSGALPLQGTGREG

SEQ ID NO: 846940 - protein, 1295 aa, Homo sapiens
MGDPAPARSLDDIDLSALRDPAGIFELVEVVGNGTYGQVYKGRHVKTGQLAAIKVMDVTEDEEEEIKQEINMLKKYSHHRNIATYYGAFIKKSPPGNDDQLWLVMEFCGAGSVTDLVKNTKGNALKEDCIAYICREILRGLAHLHAHKVIHRDIKGQNVLLTENAEVKLVDFGVSAQLDRTVGRRNTFIGTPYWMAPEVIACDENPDATYDYRSDIWSLGITAIEMAEGAPPLCDMHPMRALFLIPRNPPPRLKSKKWSKKFIDFIDTCLIKTYLSRPPTEQLLKFPFIRDQPTERQVRIQLKDHIDRSRKKRGEKEETEYEYSGSEEEDDSHGEEGEPSSIMNVPGESTLRREFLRLQQENKSNSEALKQQQQLQQQQQRDPEAHIKHLLHQRQRRIEEQKEERRRVEEQQRREREQRKLQEKEQQRRLEDMQALRREEERRQAEREQEYKRKQLEEQRQSERLQRQLQQEHAYLKSLQQQQQQQQLQKQQQQQLLPGDRKPLYHYGRGMNPADKPAWAREVEERTRMNKQQNSPLAKSKPGSTGPEPPIPQASPGPPGPLSQTPPMQRPVEPQEGPHKSLVAHRVPLKPYAAPVPRSQSLQDQPTRNLAAFPASHDPDPAIPAPTATPSARGAVIRQNSDPTSEGPGPSPNPPAWVRPDNEAPPKVPQRTSSIATALNTSGAGGSRPAQAVRASNPDLRRSDPGWERSDSVLPASHGHLPQAGSLERNRVGVSSKPDSSPVLSPGNKAKPDDHRSRPGRPADFVLLKERTLDEAPRPPKKAMDYSSSSEEVESSEDDEEEGEGGPAEGSRDTPGGRSDGDTDSVSTMVVHDVEEITGTQPPYGGGTMVVQRTPEEERNLLHADSNGYTNLPDVVQPSHSPTENSKGQSPPSKDGSGDYQSRGLVKAPGKSSFTMFVDLGIYQPGGSGDSIPITALVGGEGTRLDQLQYDVRKGSVVNVNPTNTRAHSETPEIRKYKKRFNSEILCAALWGVNLLVGTENGLMLLDRSGQGKVYGLIGRRRFQQMDVLEGLNLLITISGKRNKLRVYYLSWLRNKILHNDPEVEKKQGWTTVGDMEGCGHYRVVKYERIKFLVIALKSSVEVYAWAPKPYHKFMAFKSFADLPHRPLLVDLTVEEGQRLKVIYGSSAGFHAVDVDSGNSYDIYIPVHIQSQITPHAIIFLPNTDGMEMLLCYEDEGVYVNTYGRIIKDVVLQWGEMPTSVAYICSNQIMGWGEKAIEIRSVETGHLDGVFMHKRAQRLKFLCERNDKVFFASVRSGGSSQVYFMTLNRNCIMNW

SEQ ID NO: 846941 - protein, 1295 aa, Homo sapiens; identical to SEQ ID NO: 846940

SEQ ID NO: 846942 - protein, 1295 aa, Homo sapiens; identical to SEQ ID NO: 846940

SEQ ID NO: 846943 - protein, 1295 aa, Homo sapiens; identical to SEQ ID NO: 846940

SEQ ID NO: 846944 - protein, 1401 aa, Homo sapiens
MGDPAPARSLDDIDLSALRDPAGIFELVEVVGNGTYGQVYKGRHVKTGQLAAIKVMDVTEDEEEEIKQEINMLKKYSHHRNIATYYGAFIKKSPPGNDDQLWLVMEFCGAGSVTDLVKNTKGNALKEDCIAYICREILRGLAHLHAHKVIHRDIKGQNVLLTENAEVKLVDFGVSAQLDRTVGRRNTFIGTPYWMAPEVIACDENPDATYDYRSDIWSLGITAIEMAEGAPPLCDMHPMRALFLIPRNPPPRLKSKKWSKKFIDFIDTCLIKTYLSRPPTEQLLKFPFIRDQPTERQVRIQLKDHIDRSRKKRGEKEETEYEYSGSEEEDDSHGEEGEPSSIMNVPGESTLRREFLRLQQENKSNSEALKQQQQLQQQQQRDPEAHIKHLLHQRQRRIEEQKEERRRVEEQQRREREQRKLQEKEQQRRLEDMQALRREEERRQAEREQEYIRHRLEEEQRQLEILQQQLLQEQALLLVTGPSASSGKMLFRASLLERDGNTSREGIHPGHQGNTSPLQAVGEKRGHACSNSQGHTLLSPLSYPWAQEYKRKQLEEQRQSERLQRQLQQEHAYLKSLQQQQQQQQLQKQQQQQLLPGDRKPLYHYGRGMNPADKPAWAREVEERTRMNKQQNSPLAKSKPGSTGPEPPIPQASPGPPGPLSQTPPMQRPVEPQEGPHKSLVAHRVPLKPYAAPVPRSQSLQDQPTRNLAAFPASHDPDPAIPAPTATPSARGAVIRQNSDPTSEGPGPSPNPPAWVRPDNEAPPKVPQRTSSIATALNTSGAGGSRPAQAVRASNPDLRRSDPGWERSDSVLPASHGHLPQAGSLERNRVGVSSKPDSSPVLSPGNKAKPDDHRSRPGRPASYKRAIGEDFVLLKERTLDEAPRPPKKAMDYSSSSEEVESSEDDEEEGEGGPAEGSRDTPGGRSDGDTDSVSTMVVHDVEEITGTQPPYGGGTMVVQRTPEEERNLLHADSNGYTNLPDVVQPSHSPTENSKGQSPPSKDGSGDYQSRGLVKAPGKSSFTMFVDLGIYQPGGSGDSIPITALVGGEGTRLDQLQYDVRKGSVVNVNPTNTRAHSETPEIRKYKKRFNSEILCAALWGVNLLVGTENGLMLLDRSGQGKVYGLIGRRRFQQMDVLEGLNLLITISGKRNKLRVYYLSWLRNKILHNDPEVEKKQGWTTVGDMEGCGHYRVVKYERIKFLVIALKSSVEVYAWAPKPYHKFMAFKSFADLPHRPLLVDLTVEEGQRLKVIYGSSAGFHAVDVDSGNSYDIYIPVHIQSQITPHAIIFLPNTDGMEMLLCYEDEGVYVNTYGRIIKDVVLQWGEMPTSVAYICSNQIMGWGEKAIEIRSVETGHLDGVFMHKRAQRLKFLCERNDKVFFASVRSGGSSQVYFMTLNRNCIMNW

SEQ ID NO: 846945 - protein, 1324 aa, Homo sapiens
MGDPAPARSLDDIDLSALRDPAGIFELVEVVGNGTYGQVYKGRHVKTGQLAAIKVMDVTEDEEEEIKQEINMLKKYSHHRNIATYYGAFIKKSPPGNDDQLWLVMEFCGAGSVTDLVKNTKGNALKEDCIAYICREILRGLAHLHAHKVIHRDIKGQNVLLTENAEVKLVDFGVSAQLDRTVGRRNTFIGTPYWMAPEVIACDENPDATYDYRSDIWSLGITAIEMAEGAPPLCDMHPMRALFLIPRNPPPRLKSKKWSKKFIDFIDTCLIKTYLSRPPTEQLLKFPFIRDQPTERQVRIQLKDHIDRSRKKRGEKEETEYEYSGSEEEDDSHGEEGEPSSIMNVPGESTLRREFLRLQQENKSNSEALKQQQQLQQQQQRDPEAHIKHLLHQRQRRIEEQKEERRRVEEQQRREREQRKLQEKEQQRRLEDMQALRREEERRQAEREQEYIRHRLEEEQRQLEILQQQLLQEQALLLEYKRKQLEEQRQSERLQRQLQQEHAYLKSLQQQQQQQQLQKQQQQQLLPGDRKPLYHYGRGMNPADKPAWAREVEERTRMNKQQNSPLAKSKPGSTGPEPPIPQASPGPPGPLSQTPPMQRPVEPQEGPHKSLVAHRVPLKPYAAPVPRSQSLQDQPTRNLAAFPASHDPDPAIPAPTATPSARGAVIRQNSDPTSEGPGPSPNPPAWVRPDNEAPPKVPQRTSSIATALNTSGAGGSRPAQAVRASNPDLRRSDPGWERSDSVLPASHGHLPQAGSLERNRVGVSSKPDSSPVLSPGNKAKPDDHRSRPGRPADFVLLKERTLDEAPRPPKKAMDYSSSSEEVESSEDDEEEGEGGPAEGSRDTPGGRSDGDTDSVSTMVVHDVEEITGTQPPYGGGTMVVQRTPEEERNLLHADSNGYTNLPDVVQPSHSPTENSKGQSPPSKDGSGDYQSRGLVKAPGKSSFTMFVDLGIYQPGGSGDSIPITALVGGEGTRLDQLQYDVRKGSVVNVNPTNTRAHSETPEIRKYKKRFNSEILCAALWGVNLLVGTENGLMLLDRSGQGKVYGLIGRRRFQQMDVLEGLNLLITISGKRNKLRVYYLSWLRNKILHNDPEVEKKQGWTTVGDMEGCGHYRVVKYERIKFLVIALKSSVEVYAWAPKPYHKFMAFKSFADLPHRPLLVDLTVEEGQRLKVIYGSSAGFHAVDVDSGNSYDIYIPVHIQSQITPHAIIFLPNTDGMEMLLCYEDEGVYVNTYGRIIKDVVLQWGEMPTSVAYICSNQIMGWGEKAIEIRSVETGHLDGVFMHKRAQRLKFLCERNDKVFFASVRSGGSSQVYFMTLNRNCIMNW

SEQ ID NO: 846946 - protein, 626 aa, Homo sapiens
LQRRAERGTPKPPGPPAQPPGPPNASSNPDLRRSDPGWERSDSVLPASHGHLPQAGSLERNRVGVSSKPDSSPVLSPGNKAKPDDHRSRPGRPADFVLLKERTLDEAPRPPKKAMDYSSSSEEVESSEDDEEEGEGGPAEGSRDTPGGRSDGDTDSVSTMVVHDVEEITGTQPPYGGGTMVVQRTPEEERNLLHADSNGYTNLPDVVQPSHSPTENSKGQSPPSKDGSGDYQSRGLVKAPGKSSFTMFVDLGIYQPGGSGDSIPITALVGGEGTRLDQLQYDVRKGSVVNVNPTNTRAHSETPEIRKYKKRFNSEILCAALWGVNLLVGTENGLMLLDRSGQGKVYGLIGRRRFQQMDVLEGLNLLITISGKRNKLRVYYLSWLRNKILHNDPEVEKKQGWTTVGDMEGCGHYRVVKYERIKFLVIALKSSVEVYAWAPKPYHKFMAFKSFADLPHRPLLVDLTVEEGQRLKVIYGSSAGFHAVDVDSGNSYDIYIPVHIQSQITPHAIIFLPNTDGMEMLLCYEDEGVYVNTYGRIIKDVVLQWGEMPTSVAYICSNQIMGWGEKAIEIRSVETGHLDGVFMHKRAQRLKFLCERNDKVFFASVRSGGSSQVYFMTLNRNCIMNW

SEQ ID NO: 846947 - protein, 382 aa, Homo sapiens [sequence omitted]

SEQ ID NO: 846948 - protein, 1278 aa, Homo sapiens
MGDPAPARSLDDIDLSALRDPAGIFELVEVVGNGTYGQVYKGRHVKTGQLAAIKVMDVTEDEEEEIKQEINMLKKYSHHRNIATYYGAFIKKSPPGNDDQLWLVMEFCGAGSVTDLVKNTKGNALKEDCIAYICREILRGLAHLHAHKVIHRDIKGQNVLLTENAEVKLVDFGVSAQLDRTVGRRNTFIGTPYWMAPEVIACDENPDATYDYRSDIWSLGITAIEMAEGAPPLCDMHPMRALFLIPRNPPPRLKSKKWSKKFIDFIDTCLIKTYLSRPPTEQLLKFPFIRDQPTERQVRIQLKDHIDRSRKKRGEKEETEYEYSGSEEEDDSHGEEGEPSSIMNVPGESTLRREFLRLQQENKSNSEALKQQQQLQQQQQRDPEAHIKHLLHQRQRRIEEQKEERRRVEEQQRREREQRKLQEKEQQRRLEDMQALRREEERRQAEREQEYKRKQLEEQRQSERLQRQLQQEHAYLKSLQQQQQQQQLQKQQQQQLLPGDRKPLYHYGRGMNPADKPAWAREVEERTRMNKQQNSPLAKSKPGSTGPEPPIPQASPGPPGPLSQTPPMQRPVEPQEGPHKSLVAHRVPLKPYAAPVPRSQSLQDQPTRNLAAFPASHDPDPAIPAPTATPSARGAVIRQNSDPTSEGPGPSPNPPAWVRPDNEAPPKVPQRTSSIATALNTSGAGGSRPAQAVRASNPDLRRSDPGWERSDSVLPASHGHLPQAGSLERNRVGVSSKPDSSPVLSPGNKAKPDDHRSRPGRPADFVLLKERTLDEAPRPPKKAMDYSSSSEEVESSEDDEEEGEGGPAEGSRDTPGGRSDGDTDSVSTMVVHDVEEITGTQPPYGGGTMVVQRTPEEERNLLHADSNGYTNLPDVVQPSHSPTENSKGQSPPSKDGSGDYQSRGLVKAPGKSSFTMFVDLGIYQPGGSGDSIPITALVGGEGTRLDQLQYDVRKGSVVNVNPTNTRAHSETPEIRKYKKRFNSEILCAALWGVNLLVGTENGLMLLDRSGQGKVYGLIGRRRFQQMDVLEGLNLLITISGKRNKLRVYYLSWLRNKILHNDPEVEKKQGWTTVGDMEGCGHYRVVKYERIKFLVIALKSSVEVYAWAPKPYHKFMAFKSFADLPHRPLLVDLTVEEGQRLKVIYGSSAGFHAVDVDSGNSYDIYIPVHIQSQITPHAIIFLPNTDGMEMLLCYEDEGVYVNTYGRIIKDVVLQWGEMPTSVAYICSNQIMGWGEKAIEIRSVETGHLDGVFMHKRAQRLKFLCERNDKLRHPPNLSPW

SEQ ID NO: 846949 - protein, 752 aa, Homo sapiens
MGDPAPARSLDDIDLSALRDPAGIFELVEVVGNGTYGQVYKGRHVKTGQLAAIKVMDVTEDEEEEIKQEINMLKKYSHHRNIATYYGAFIKKSPPGNDDQLWLVMEFCGAGSVTDLVKNTKGNALKEDCIAYICREILRGLAHLHAHKVIHRDIKGQNVLLTENAEVKLVDFGVSAQLDRTVGRRNTFIGTPYWMAPEVIACDENPDATYDYRSDIWSLGITAIEMAEGAPPLCDMHPMRALFLIPRNPPPRLKSKKWSKKFIDFIDTCLIKTYLSRPPTEQLLKFPFIRDQPTERQVRIQLKDHIDRSRKKRGEKEETEYEYSGSEEEDDSHGEEGEPSSIMNVPGESTLRREFLRLQQENKSNSEALKQQQQLQQQQQRDPEAHIKHLLHQRQRRIEEQKEERRRVEEQQRREREQRKLQEKEQQRRLEDMQALRREEERRQAEREQEYKRKQLEEQRQSERLQRQLQQEHAYLKSLQQQQQQQQLQKQQQQQLLPGDRKPLYHYGRGMNPADKPAWAREVEERTRMNKQQNSPLAKSKPGSTGPEPPIPQASPGPPGPPWAPKPYHKFMAFKSFADLPHRPLLVDLTVEEGQRLKVIYGSSAGFHAVDVDSGNSYDIYIPVHIQSQITPHAIIFLPNTDGMEMLLCYEDEGVYVNTYGRIIKDVVLQWGEMPTSVAYICSNQIMGWGEKAIEIRSVETGHLDGVFMHKRAQRLKFLCERNDKVFFASVRSGGSSQVYFMTLNRNCIMNW

SEQ ID NO: 846950 - protein, 1249 aa, Homo sapiens
MGDPAPARSLDDIDLSALRDPAGIFELVEVVGNGTYGQVYKGRHVKTGQLAAIKVMDVTEDEEEEIKQEINMLKKYSHHRNIATYYGAFIKKSPPGNDDQLWLVMEFCGAGSVTDLVKNTKGNALKEDCIAYICREILRGLAHLHAHKVIHRDIKGQNVLLTENAEVKLVDFGVSAQLDRTVGRRNTFIGTPYWMAPEVIACDENPDATYDYRSDIWSLGITAIEMAEGAPPLCDMHPMRALFLIPRNPPPRLKSKKWSKKFIDFIDTCLIKTYLSRPPTEQLLKFPFIRDQPTERQVRIQLKDHIDRSRKKRGEKEETEYEYSGSEEEDDSHGEEGEPSSIMNVPGESTLRREFLRLQQENKSNSEALKQQQQLQQQQQRDPEAHIKHLLHQRQRRIEEQKEERRRVEEQQRREREQRKLQEKEQQRRLEDMQALRREEERRQAEREQEYKRKQLEEQRQSERLQRQLQQEHAYLKSLQQQQQQQQLQKQQQQQLLPGDRKPLYHYGRGMNPADKPAWAREVEERTRMNKQQNSPLAKSKPGSTGPEPPIPQASPGPPGPLSQTPPMQRPVEPQEGPHKSLVAHRVPLKPYAAPVPRSQSLQDQPTRNLAAFPASHDPDPAIPAPTATPSARGAVIRQNSDPTSEGPGPSPNPPAWVRPDNEAPPKVPQRTSSIATALNTSGAGGSRPAQAVRASNPDLRRSDPGWERSDSVLPASHGHLPQAGSLERNRVGVSSKPDSSPVLSPGNKAKPDDHRSRPGRPADFVLLKERTLDEAPRPPKKAMDYSSSSEEVESSEDDEEEGEGGPAEGSRDTPGGRSDGDTDSVSTMVVHDVEEITGTQPPYGGGTMVVQRTPEEERNLLHADSNGYTNLPDVVQPSHSPTENSKGQSPPSKDGSGDYQSRGLVKAPGKSSFTMFVDLGIYQPGGSGDSIPITALVGGEGTRLDQLQYDVRKGSVVNVNPTNTRAHSETPEIRKYKKRFNSEILCAALWGVNLLVGTENGLMLLDRSGQGKVYGLIGRRRFQQMDVLEGLNLLITISGKRNKLRVYYLSWLRNKILHNDPEVEKKQGWTTVGDMEGCGHYRVVKYERIKFLVIALKSSVEVYAWAPKPYHKFMAFKSFADLPHRPLLVDLTVEEGQRLKVIYGSSAGFHAVDVDSGNSYDIYIPVHIQSQITPHAIIFRTTTKTLVQSAYLRLRLNRNIRYHLLSSTLQPPHYQALRRITVEYNLENHAKGDPKPRRDTHSQADSSL

SEQ ID NO: 846951 - protein, 257 aa, Homo sapiens
MGDPAPARSLDDIDLSALRDPAGIFELVEVVGNGTYGQVYKGRHVKTGQLAAIKVMDVTEDEEEEIKQEINMLKKYSHHRNIATYYGAFIKKSPPGNDDQLWLVMEFCGAGSVTDLVKNTKGNALKEDCIAYICREILRGLAHLHAHKVIHRDIKGQNVLLTENAEVKLVDFGVSAQLDRTVGRRNTFIGTPYWMAPEVIACDENPDATYDYRSDIWSLGITAIEMAEGAPPLCDMHPMRALFLIPRNPPPRLKSKK

SEQ ID NO: 846952 - protein, 164 aa, Homo sapiens
IRSRGSRGITMSEVIDRSALRDPAGIFELVEVVGNGTYGQVYKGRHVKTGQLAAIKVMDVTEDEEEEIKQEINMLKKYSHHRNIATYYGAFIKKSPPGNDDQLWLVMEFCGAGSVTDLVKNTKGNALKEDCIAYICREILRGLAHLHAHKDPSFPGGEPHIQDR

SEQ ID NO: 846953 - protein, 93 aa, Homo sapiens
MDLGARDLGPGWGSVVTDHGEAPVAQEGKSQHPSSLPPPVKYERIKFLVIALKSSVEVYAWAPKPYHKFMAFKVIPASVPNTIWSPSASPRAP

SEQ ID NO: 846954 - protein, 104 aa, Homo sapiens
MEGGPATTMNSKGQYPTQPTYPVQPPGNPVYPQTLHLPQAPPYTDAPPAYSELYRPSFVHPGAATVPTMSAAFPGASLYLPMAQSVAVGPLGSTIPMAYYPFIK

SEQ ID NO: 846955 - protein, 185 aa, Homo sapiens
  misc_feature (182)..(182): Xaa can be any naturally occurring amino acid
IRSRGSRGITMSEVIDRSALRDPAGIFELVEVVGNGTYGQVYKGRHVKTGQLAAIKVMDVTEDEEEEIKQEINMLKKYSHHRNIATYYGAFIKKSPPGNDDQLWLVMEFCGAGSVTDLVKNTKGNALKEDCIAYICREILRGLAHLHAHKVIHRDIKGQNVLLTENAEVKLVDLGVSVSWTXRGR

SEQ ID NO: 846956 - protein, 1295 aa, Homo sapiens; identical to SEQ ID NO: 846940

SEQ ID NO: 846957 - protein, 1295 aa, Homo sapiens; identical to SEQ ID NO: 846940

SEQ ID NO: 846958 - protein, 1295 aa, Homo sapiens; identical to SEQ ID NO: 846940

SEQ ID NO: 846959 - protein, 1295 aa, Homo sapiens; identical to SEQ ID NO: 846940

SEQ ID NO: 846960 - protein, 1275 aa, Homo sapiens
MGDPAPARSLDDIDLSALRDPAGIFELVEVVGNGTYGQVYKGRHVKTGQLAAIKVMDVTEDEEEEIKQEINMLKKYSHHRNIATYYGAFIKKSPPGNDDQLWLVMEFCGAGSVTDLVKNTKGNALKEDCIAYICREILRGLAHLHAHKVIHRDIKGQNVLLTENAEVKLVDFGVSAQLDRTVGRRNTFIGTPYWMAPEVIACDENPDATYDYRSDIWSLGITAIEMAEGAPPLCDMHPMRALFLIPRNPPPRLKSKKWSKKFIDFIDTCLIKTYLSRPPTEQLLKFPFIRDQPTERQVRIQLKDHIDRSRKKRGEKEETEYEYSGSEEEDDSHGEEGEPSSIMNVPGESTLRREFLRLQQENKSNSEALKQQQQLQQQQQRDPEAHIKHLLHQRQRRIEEQKEERRRVEEQQRREREQRKLQEKEQQRRLEDMQALRREEERRQAEREQEYKRKQLEEQRQSERLQRQLQQEHAYLKSLQQQQQQQQLQKQQQQQLLPGDRKPLYHYGRGMNPADKPAWAREVEERTRMNKQQNSPLAKSKPGSTGPEPPIPQASPGPPGPLSQTPPMQRPVEPQEGPHKSLQDQPTRNLAAFPASHDPDPAIPAPTATPSARGAVIRQNSDPTSEGPGPSPNPPAWVRPDNEAPPKVPQRTSSIATALNTSGAGGSRPAQAVRASNPDLRRSDPGWERSDSVLPASHGHLPQAGSLERNRVGVSSKPDSSPVLSPGNKAKPDDHRSRPGRPADFVLLKERTLDEAPRPPKKAMDYSSSSEEVESSEDDEEEGEGGPAEGSRDTPGGRSDGDTDSVSTMVVHDVEEITGTQPPYGGGTMVVQRTPEEERNLLHADSNGYTNLPDVVQPSHSPTENSKGQSPPSKDGSGDYQSRGLVKAPGKSSFTMFVDLGIYQPGGSGDSIPITALVGGEGTRLDQLQYDVRKGSVVNVNPTNTRAHSETPEIRKYKKRFNSEILCAALWGVNLLVGTENGLMLLDRSGQGKVYGLIGRRRFQQMDVLEGLNLLITISGKRNKLRVYYLSWLRNKILHNDPEVEKKQGWTTVGDMEGCGHYRVVKYERIKFLVIALKSSVEVYAWAPKPYHKFMAFKSFADLPHRPLLVDLTVEEGQRLKVIYGSSAGFHAVDVDSGNSYDIYIPVHIQSQITPHAIIFLPNTDGMEMLLCYEDEGVYVNTYGRIIKDVVLQWGEMPTSVAYICSNQIMGWGEKAIEIRSVETGHLDGVFMHKRAQRLKFLCERNDKVFFASVRSGGSSQVYFMTLNRNCIMNW

SEQ ID NO: 846961 - protein, 707 aa, Homo sapiens
LQRRAERGTPKPPGPPAQPPGPPNASSNPDLRRSDPGWERSDSVLPASHGHLPQAGSLERNRVGVSSKPDSSPVLSPGNKAKPDDHRSRPGRPAVSHLVAGMACLILVWGLASGCWVSGVGSPLIYREGLWGWRELVLLMVLTFPNLSPNLSPNLSSGSFFPCGPSQSYKRAIGEDFVLLKERTLDEAPRPPKKAMDYSSSSEEVESSEDDEEEGEGGPAEGSRDTPGGRSDGDTDSVSTMVVHDVEEITGTQPPYGGGTMVVQRTPEEERNLLHADSNGYTNLPDVVQPSHSPTENSKGQSPPSKDGSGDYQSRGLVKAPGKSSFTMFVDLGIYQPGGSGDSIPITALVGGEGTRLDQLQYDVRKGSVVNVNPTNTRAHSETPEIRKYKKRFNSEILCAALWGVNLLVGTENGLMLLDRSGQGKVYGLIGRRRFQQMDVLEGLNLLITISGKRNKLRVYYLSWLRNKILHNDPEVEKKQGWTTVGDMEGCGHYRVVKYERIKFLVIALKSSVEVYAWAPKPYHKFMAFKSFADLPHRPLLVDLTVEEGQRLKVIYGSSAGFHAVDVDSGNSYDIYIPVHIQSQITPHAIIFLPNTDGMEMLLCYEDEGVYVNTYGRIIKDVVLQWGEMPTSVAYICSNQIMGWGEKAIEIRSVETGHLDGVFMHKRAQRLKFLCERNDKVFFASVRSGGSSQVYFMTLNRNCIMNW

SEQ ID NO: 846962 - protein, 1283 aa, Homo sapiens
MGDPAPARSLDDIDLSALRDPAGIFELVEVVGNGTYGQVYKGRHVKTGQLAAIKVMDVTEDEEEEIKQEINMLKKYSHHRNIATYYGAFIKKSPPGNDDQLWLVMEFCGAGSVTDLVKNTKGNALKEDCIAYICREILRGLAHLHAHKVIHRDIKGQNVLLTENAEVKLVDFGVSAQLDRTVGRRNTFIGTPYWMAPEVIACDENPDATYDYRSDIWSLGITAIEMAEGAPPLCDMHPMRALFLIPRNPPPRLKSKKWSKKFIDFIDTCLIKTYLSRPPTEQLLKFPFIRDQPTERQVRIQLKDHIDRSRKKRGEKEETEYEYSGSEEEDDSHGEEGEPSSIMNVPGESTLRREFLRLQQENKSNSEALKQQQQLQQQQQRDPEAHIKHLLHQRQRRIEEQKEERRRVEEQQRREREQRKLQEKEQQRRLEDMQALRREEERRQAEREQEYKRKQLEEQRQSERLQRQLQQEHAYLKSLQQQQQQQQLQKQQQQQLLPGDRKPLYHYGRGMNPADKPAWAREVEERTRMNKQQNSPLAKSKPGSTGPEPPIPQASPGPPGPLSQTPPMQRPVEPQEGPHKSLVAHRVPLKPYAAPVPRSQSLQDQPTRNLAAFPASHDPDPAIPAPTATPSARGAVIRQNSDPTSEGPGPSPNPPAWVRPDNEAPPKVPQRTSSIATALNTSGAGGSRPAQAVRASNPDLRRSDPGWERSDSVLPASHGHLPQAGSLERNRVGVSSKPDSSPVLSPGNKAKPDDHRSRPGRPADFVLLKERTLDEAPRPPKKAMDYSSSSEEVESSEDDEEEGEGGPAEGSRDTPGGRSDGDTDSVSTMVVHDVEEITGTQPPYGGGTMVVQRTPEEERNLLHADSNGYTNLPDVVQPSHSPTENSKGQSPPSKDGSGDYQSRGLVKAPGKSSFTMFVDLGIYQPGGSGDSIPITALVGGEGTRLDQLQYDVRKGSVVNVNPTNTRAHSETPEIRKYKKRFNSEILCAALWGVNLLVGTENGLMLLDRSGQGKVYGLIGRRRFQQMDVLEGLNLLITISGKRNKLRVYYLSWLRNKILHNDPEVEKKQGWTTVGDMEGCGHYRVVKYERIKFLVIALKSSVEVYAWAPKPYHKFMAFKSFADLPHRPLLVDLTVEEGQRLKVIYGSSAGFHAVDVDSGNSYDIYIPVHIQSQITPHAIIFLPNTDGMEMLLCYEDEGVYVNTYGRIIKDVVLQWGEMPTSVAYICSNQIMGWGEKAIEIRSVETGHLDGVFMHKRAQRLKFLCERNDKVGGSFPLKALLSRLP

SEQ ID NO: 846963 - protein, 1283 aa, Homo sapiens; identical to SEQ ID NO: 846962

SEQ ID NO: 846964 - protein, 1181 aa, Homo sapiens
MGDPAPARSLDDIDLSALRDPAGIFELVEVVGNGTYGQVYKGRHVKTGQLAAIKVMDVTEDEEEEIKQEINMLKKYSHHRNIATYYGAFIKKSPPGNDDQLWLVMEFCGAGSVTDLVKNTKGNALKEDCIAYICREILRGLAHLHAHKVIHRDIKGQNVLLTENAEVKLVDFGVSAQLDRTVGRRNTFIGTPYWMAPEVIACDENPDATYDYRSDIWSLGITAIEMAEGAPPLCDMHPMRALFLIPRNPPPRLKSKKWSKKFIDFIDTCLIKTYLSRPPTEQLLKFPFIRDQPTERQVRIQLKDHIDRSRKKRGEKEETEYEYSGSEEEDDSHGEEGEPSSIMNVPGESTLRREFLRLQQENKSNSEALKQQQQLQQQQQRDPEAHIKHLLHQRQRRIEEQKEERRRVEEQQRREREQRKLQEKEQQRRLEDMQALRREEERRQAEREQEYKRKQLEEQRQSERLQRQLQQEHAYLKSLQQQQQQQQLQKQQQQQLLPGDRKPLYHYGRGMNPADKPAWAREVEERTRMNKQQNSPLAKSKPGSTGPEPPIPQASPGPPGPLSQTPPMQRPVEPQEGPHKSLVAHRVPLKPYAAPVPRSQSLQDQPTRNLAAFPASHDPDPAIPAPTATPSARGAVIRQNSDPTSEGPGPSPNPPAWVRPDNEAPPKVPQRTSSIATALNTSGAGGSRPAQAVRASNPDLRRSDPGWERSDSVLPASHGHLPQAGSLERNRVGVSSKPDSSPVLSPGNKAKPDDHRSRPGRPADFVLLKERTLDEAPRPPKKAMDYSSSSEEVESSEDDEEEGEGGPAEGSRDTPGGRSDGDTDSVSTMVVHDVEEITGTQPPYGGGTMVVQRTPEEERNLLHADSNGYTNLPDVVQPSHSPTENSKGQSPPSKDGSGDYQSRGLVKAPGKSSFTMFVDLGIYQPGGSGDSIPITALVGGEGTRLDQLQYDVRKGSVVNVNPTNTRAHSETPEIRKYKKRFNSEILCAALWGVNLLVGTENGLMLLDRSGQGKVYGLIGRRRFQQMDVLEGLNLLITISGKRNKLRVYYLSWLRNKILHNDPEVEKKQGWTTVGDMEGCGHYRVVKYERIKFLVIALKSSVEVYAWAPKPYHKFMAFKSFADLPHRPLLVDLTVEEGQRLKVIYGSHLRPPAHTNAQAHTHTQHTHANAAHTNTAHTAHTR

SEQ ID NO: 846965 - protein, 113 aa, Homo sapiens
WLPSAAFGTSVATGRTWRGPTFLSHSSDGDTDSVSTMVVHDVEEITGTQPPYGGGTMVVQRVSEPLLPPLYLCVPSSAPRQPCPLSCRPLKRSGTCCMLTAMGTQTCLTWSSP

SEQ ID NO: 846966 - protein, 509 aa, Homo sapiens
MAAIGVHLGCTSACVAVYKDGRAGVVANDAGDRVTPAVVAYSENEEIVGLAAKQSRIRNISNTVMKVKQILGRSSSDPQAQKYIAESKCLVIEKNGKLRYEIDTGEETKFVNPEDVARLIFSKMKETAHSVLGSDANDVVITVPFDFGEKQKNALGEAARAAGFNVLRLIHEPSAALLAYGIGQDSPTGKSNILVFKLGGTSLSLSVMEVNSGIYRVLSTNTDDNIGGAHFTETLAQYLASEFQRSFKHDVRGNARAMMKLTNSAEVAKHSLSTLGSANCFLDSLYEGQDFDCNVSRARFELLCSPLFNKCIEAIRGLLDQNGFTADDINKVVLCGGSSRIPKLQQLIKDLFPAVELLNSIPPDEVIPIGAAIEAGILIGKENLLVEDSLMIECSARDILVKGVDESGASRFTVLFPSGTPLPARRQHTLQAPGSISSVCLELYESDGKNSAKEETKFAQVVLQDLDKKENGLRDILAVLTMKRDGSLHVTCTDQETGKCEAISIEIAS

SEQ ID NO: 846967 - protein, 361 aa, Homo sapiens
MASANSSAGIRWSRQETRTLLSILGEAEYIQRLQTVHHNADVYQAVSKRMQQEGFRRTERQCRSKFKVLKALYLKAYVAHATSMGEPPHCPFYDTLDQLLRNQIVTDPDNLMEDAAWAKHCDQNLVASDAPGEEGTGILKSKRTQAADHQPILKTVKASDEDCQLRISDRIRETSDLEDSWDESSGAGCSQGTPSYSSSHSLFRGAVAPCQSSPMARLGVSGEPSPCTSTNRSTPGVASTPQTPVSSSRAGFVSGGDRPLTSEPPPRWARRRRRSVARTIAAELAENRRLARELSKREEEKLDRLIAIGEEASAQQDTANELRRDAVIAVRRLATAVEEATGAFQLGLEKLLQRLISNTKS

SEQ ID NO: 846968 - protein, 341 aa, Homo sapiens
MASANSSAGIRWSRQETRTLLSILGEAEYIQRLQTVHHNADVYQAVSKRMQQEGFRRTERQCRSKFKVLKALYLKAYVAHATSMGEPPHCPFYDTLDQLLRNQIVTDPDNLMEDAAWAKHCDQNLVASDAPGEEGTGILKSKRTQAADHQPILKTVKASDEDCQLRISDRIRETSDLEDSWDESSGAGCSQGTPSYSSSHSLFRGAVAPCQSSPMARLGVSGEPSPCTSTNRSTPGVASTPQTPVSSSRAGFVSGGDRPLTSEPPPRWARRRRRSVARTIAAELAENRRLARELSKREEEKLDRLIAIGEEASAQQDTANELRRDAVIAVRRLATAVEVAH

SEQ ID NO: 846969 - protein, 250 aa, Homo sapiens
MEDAAWAKHCDQNLVASDAPGEEGTGILKSKRTQAADHQPILKTVKASDEDCQLRISDRIRETSDLEDSWDESSGAGCSQGTPSYSSSHSLFRGAVAPCQSSPMARLGVSGEPSPCTSTNRSTPGVASTPQTPVSSSRAGFVSGGDRPLTSEPPPRWARRRRRSVARTIAAELAENRRLARELSKREEEKLDRLIAIGEEASAQQDTANELRRDAVIAVRRLATAVEEATGAFQLGLEKLLQRLISNTKS

SEQ ID NO: 846970 - protein, 449 aa, Homo sapiens
MAAIGVHLGCTSACVAVYKDGRAGVVANDAGDRVTPAVVAYSENEEIVGLAAKQSRIRNISNTVMKVKQILGRSSSDPQAQKYIAESKCLVIEKNGKLRYEIDTGEETKFVNPEDVARLIFSKMKETAHSVLGSDANDVVITVPFDFGEKQKNALGEAARAAGFNVLRLIHEPSAALLAYGIGQDSPTGKSNILVFKLGGTSLSLSVMEVNSGIYRVLSTNTDDNIGGAHFTETLAQYLASEFQRSFKHDVRGNARAMMKLTNSAEVAKHSLSTLGSANCFLDSLYEGQDFDCNVSRARFELLCSPLFNKCIEAIRGLLDQNGFTADDINKVVLCGGSSRIPKLQQLIKDLFPAVELLNSIPPDEVIPIGAAIEAGILIGKENLLVEDSLMIECSARDILVKGLLCQLEDNTHCKPLEAYLQCALNSMSLMGRTLPKRKPSLHRLYSRI

SEQ ID NO: 846971 - protein, 374 aa, Homo sapiens
RFVTISRAVCAMRKADEVVVLVVAGPVPHTVSVTLEALCESALSMRNNGISESSASVLLASSVTMHLWSASRVEVNSGIYRVLSTNTDDNIGGAHFTETLAQYLASEFQRSFKHDVRGNARAMMKLTNSAEVAKHSLSTLGSANCFLDSLYEGQDFDCNVSRARFELLCSPLFNKCIEAIRGLLDQNGFTADDINKVVLCGGSSRIPKLQQLIKDLFPAVELLNSIPPDEVIPIGAAIEAGILIGKENLLVEDSLMIECSARDILVKGVDESGASRFTVLFPSGTPLPARRQHTLQAPGSISSVCLELYESDGKNSAKEETKFAQVVLQDLDKKENGLRDILAVLTMKRDGSLHVTCTDQETGKCEAISIEIAS

SEQ ID NO: 846972 - protein, 66 aa, Homo sapiens
SKRTQAADHQPILKTVKASDEDCQLRISDRIRETSDLEDSWDESSGAGNSQACEGVGSQSLVALNI

SEQ ID NO: 846973 - protein, 509 aa, Homo sapiens; identical to SEQ ID NO: 846966

SEQ ID NO: 846974 - protein, 250 aa, Homo sapiens; identical to SEQ ID NO: 846969

SEQ ID NO: 846975 - protein, 361 aa, Homo sapiens; identical to SEQ ID NO: 846967

SEQ ID NO: 846976 - protein, 509 aa, Homo sapiens; identical to SEQ ID NO: 846966

SEQ ID NO: 846977 - protein, 313 aa, Homo sapiens
MELDKTPLLEKVEVNSGIYRVLSTNTDDNIGGAHFTETLAQYLASEFQRSFKHDVRGNARAMMKLTNSAEVAKHSLSTLGSANCFLDSLYEGQDFDCNVSRARFELLCSPLFNKCIEAIRGLLDQNGFTADDINKVVLCGGSSRIPKLQQLIKDLFPAVELLNSIPPDEVIPIGAAIEAGILIGKENLLVEDSLMIECSARDILVKGVDESGASRFTVLFPSGTPLPARRQHTLQAPGSISSVCLELYESDGKNSAKEETKFAQVVLQDLDKKENGLRDILAVLTMKRDGSLHVTCTDQETGKCEAISIEIAS

SEQ ID NO: 846978 - protein, 302 aa, Homo sapiens [sequence omitted]

SEQ ID NO: 846979 - protein, 139 aa, Homo sapiens
MAAIGVHLGCTSACVAVYKDGRAGVVANDAGDRVTPAVVAYSENEEIVGLAAKQSRIRNISNTVMKVKQILGRSSSDPQAQKYIAESKCLVIEKNGKLRYEIDTGEETKFVNPEDVARLIFSKMKGAYSPWSQSNSEDG

SEQ ID NO: 846980 - protein, 1154 aa, Homo sapiens [sequence omitted]

SEQ ID NO: 846981 - protein, 1154 aa, Homo sapiens [sequence omitted]

SEQ ID NO: 846982 - protein, 91 aa, Homo sapiens
SPASSGLRTPARAARSPLPALQPLGGRRPSEDGSGPGGTEGLVAWRKPEACVEEAPRAAGWRSMSAPDPKHCKSRCNGSLAQGTTRSSRKV

SEQ ID NO: 846983 - protein, 1268 aa, Homo sapiens
MPGGGPEMDDYMETLKDEEDALWENVECNRHMLSRYINPAKLTPYLRQCKVIDEQDEDEVLNAPMLPSKINRAGRLLDILHTKGQRGYVVFLESLEFYYPELYKLVTGKEPTRRFSTIVVEEGHEGLTHFLMNEVIKLQQQMKAKDLQRCELLARLRQLEDEKKQMTLTRVELLTFQERYYKMKEERDSYNDELVKVKDDNYNLAMRYAQLSEEKNMAVMRSRDLQLEIDQLKHRLNKMEEECKLERNQSLKLKNDIENRPKKEQVLELERENEMLKTKNQELQSIIQAGKRSLPDSDKAILDILEHDRKEALEDRQELVNRIYNLQEEARQAEELRDKYLEEKEDLELKCSTLGKDCEMYKHRMNTVMLQLEEVERERDQAFHSRDEAQTQYSQCLIEKDKYRKQIRELEEKNDEMRIEMVRREACIVNLESKLRRLSKDSNNLDQSLPRNLPVTIISQDFGDASPRTNGQEADDSSTSEESPEDSKYFLPYHPPQRRMNLKGIQLQRAKSPISLKRTSDFQAKGHEEEGTDASPSSCGSLPITNSFTKMQPPRSRSSIMSITAEPPGNDSIVRRYKEDAPHRSTVEEDNDSGGFDALDLDDDSHERYSFGPSSIHSSSSSHQSEGLDAYDLEQVNLMFRKFSLERPFRPSVTSVGHVRGPGPSVQHTTLNGDSLTSQLTLLGGNARGSFVHSVKPGSLAEKAGLREGHQLLLLEGCIRGERQSVPLDTCTKEEAHWTIQRCSGPVTLHYKVNHEGYRKLVKDMEDGLITSGDSFYIRLNLNISSQLDACTMSLKCDDVVHVRDTMYQDRHEWLCARVDPFTDHDLDMGTIPSYSRIYETITPHLRPVLEGKHHHTRFTEEETVAQRGSATLLQPHSKPVLEVGSKHRYKEPHLLPGRPLGSERTPATGPSLRRVGHAPHPCQCGAAAPLASRCLAPEFQPLRLLSSLPRAQQLLLVKLQRLMHRGSREEVDGTHHTLRALRNTLQPEEALSTSDPRVSPRLSRASFLFGQLLQFVSRSENKYKRMNSNERVRIISGSPLGSLARSSLDATKLLTEKQEELDPESELGKNLSLIPYSLVRAFYCERRRPVLFTPTVLAKTLVQRLLNSGGAMEFTICKSDIVTRDEFLRRQKTETIIYSREKNPNAFECIAPANIEAVAAKNKHCLLEAGIGCTRDLIKSNIYPIVLFIRVCEKNIKRFRKLLPRPETEEEFLRVCRLKEKELEALPCLYATVEPDMWGSVEELLRVVKDKIGEEQRKTIWVDEDQL

SEQ ID NO: 846984 - protein, 125 aa, Homo sapiens
GLSTSLLQPRSPLIAGSLPPCRLSRRRARFCIELSPCVCNIYAPVTCVCLCLKQPPRSRSSIMSITAEPPGNDSIVRRYKEDAPHRRWVAGEGGLGFCPVPPCQASLPRLWASPRLLTQLSSKQP

SEQ ID NO: 846985 - protein, 392 aa, Homo sapiens [sequence omitted]

SEQ ID NO: 846986 - protein, 381 aa, Homo sapiens
MATAAQGPLSLLWGWLWSERFWLPENVSWADLEGPADGYGYPRGRHILSVFPLAAGIFFVRLLFERFIAKPCALRIGIEDSGPYQAQPNAILEKVFISITKYPDKKRLEGLSKQLDWNVRKIQCWFRHRRNQDKPPTLTKFCESMWRFTFYLCIFCYGIRFLWSSPWFWDIRQCWHNYPFQPLSSGLYHYYIMELAFYWSLMFSQFTDIKRKDFLIMFVHHLVTIGLISFSYINNMVRVGTLIMCLHDVSDFLLEAAKLANYAKYQRLCDTLFVIFSAVFMVTRLGIYPFWILNTTLFESWEIIGPYASWWLLNGLLLTLQLLHVIWSYLIARIALKALIRGKVTCPGRIRPCTFHSFLTSFLFSMPGGSWTVSSLACIEG

SEQ ID NO: 846987 - protein, 400 aa, Homo sapiens
MATAAQGPLSLLWGWLWSERFWLPENVSWADLEGPADGYGYPRGRHILSVFPLAAGIFFVRLLFERFIAKPCALRIGIEDSGPYQAQPNAILEKVFISITKYPDKKRLEGLSKQLDWNVRKIQCWFRHRRNQDKPPTLTKFCESMWRFTFYLCIFCYGIRFLWSSPWFWDIRQCWHNYPFQPLSSGLYHYYIMELAFYWSLMFSQFTDIKRKDFLIMFVHHLVTIGLISFSYINNMVRVGTLIMCLHDVSDFLLELNLSSFLQAAKLANYAKYQRLCDTLFVIFSAVFMVTRLGIYPFWILNTTLFESWEIIGPYASWWLLNGLLLTLQLLHVIWSYLIARIALKALIRGKVSKDDRSDVESSSEEEDVTTCTKSPCDSSSSNGANRVNGHMGGSYWAEE

SEQ ID NO: 846988 - protein, 392 aa, Homo sapiens [sequence omitted]

SEQ ID NO: 846989 - protein, 286 aa, Homo sapiens
MMKPRPKRFIAKPCALRIGIEDSGPYQAQPNAILEKVFISITKYPDKKRLEGLSKQLDWNVRKIQCWFRHRRNQDKPPTLTKFCESMWRFTFYLCIFCYGIRFLWSDFLIMFVHHLVTIGLISFSYINNMVRVGTLIMCLHDVSDFLLEAAKLANYAKYQRLCDTLFVIFSAVFMVTRLGIYPFWILNTTLFESWEIIGPYASWWLLNGLLLTLQLLHVIWSYLIARIALKALIRGKVSKDDRSDVESSSEEEDVTTCTKSPCDSSSSNGANRVNGHMGGSYWAEE

SEQ ID NO: 846990 - protein, 233 aa, Homo sapiens
EVTLRIPSGLCIDSAGINYPFQPLSSGLYHYYIMELAFYWSLMFSQFTDIKRKDFLIMFVHHLVTIGLISFSYINNMVRVGTLIMCLHDVSDFLLEAAKLANYAKYQRLCDTLFVIFSAVFMVTRLGIYPFWILNTTLFESWEIIGPYASWWLLNGLLLTLQLLHVIWSYLIARIALKALIRGKVSKDDRSDVESSSEEEDVTTCTKSPCDSSSSNGANRVNGHMGGSYWAEE

SEQ ID NO: 846991 - protein, 392 aa, Homo sapiens [sequence omitted]

SEQ ID NO: 846992 - protein, 393 aa, Homo sapiens
MATAAQGPLSLLWGWLWSERFWLPENVSWADLEGPADGYGYPRGRHILSVFPLAAGIFFVRLLFERFIAKPCALRIGIEDSGPYQAQPNAILEKVFISITKYPDKKRLEGLSKQLDWNVRKIQCWFRHRRNQDKPPTLTKFCESMWRFTFYLCIFCYGIRFLWSSPWFWDIRQCWHNYPFQPLSSGLYHYYIMELAFYWSLMFSQFTDIKRKDFLIMFVHHLVTIGLISFSYINNMVRVGTLIMCLHDVSDFLLEAAKLANYAKYQRLCDTLFVIFSAVFMVTRLGIYPFWILNTTLFESWEIIGPYASWWLLNGLLLTLQLLHVIWSYLIARIALKALIRGKVRMKDGFFLLGMEDRDYSTDVLSPSNLVSPIYSSRPSKKPRAPSLIRVPT

SEQ ID NO: 846993 - protein, 111 aa, Homo sapiens
MATAAQGPLSLLWGWLWSERFWLPENVSWADLEGPADGYGYPRGRHILSVFPLAAGIFFVRLLFELETGFHYVDQAGLQLLTLCSSCLSLPKCWDYRREPPRPAFLFFLKI

SEQ ID NO: 846994 - protein, 115 aa, Homo sapiens
MMKPRPKRFIAKPCALRIGIEDSGPYQAQPNAILEKVFISITKVSGQRNREEYSHKALLHGAGEDREHVPLRVRIGWDGPSYLSSPCSYMESFIPSGKTFGPYVCQVYVRSRFEF

SEQ ID NO: 846995 - protein, 426 aa, Homo sapiens
IPAAKCKQSRLWVKALVMKNKKKKIPKHFLTLVLKKTPSPKVCFSFNFLDFARLSGCKLPTLFWMDRDKFLNKDCVLSTSPSHHHHPAPRRHNYRGSFERFIAKPCALRIGIEDSGPYQAQPNAILEKVFISITKYPDKKRLEGLSKQLDWNVRKIQCWFRHRRNQDKPPTLTKFCESMWRFTFYLCIFCYGIRFLWSSPWFWDIRQCWHNYPFQPLSSGLYHYYIMELAFYWSLMFSQFTDIKRKDFLIMFVHHLVTIGLISFSYINNMVRVGTLIMCLHDVSDFLLEAAKLANYAKYQRLCDTLFVIFSAVFMVTRLGIYPFWILNTTLFESWEIIGPYASWWLLNGLLLTLQLLHVIWSYLIARIALKALIRGKVSKDDRSDVESSSEEEDVTTCTKSPCDSSSSNGANRVNGHMGGSYWAEE

SEQ ID NO: 846996 - protein, 333 aa, Homo sapiens
MKPRPKRFIAKPCALRIGIEDSGPYQAQPNAILEKVFISITKYPDKKRLEGLSKQLDWNVRKIQCWFRHRRNQDKPPTLTKFCESMWRFTFYLCIFCYGIRFLWSSPWFWDIRQCWHNYPFQPLSSGLYHYYIMELAFYWSLMFSQFTDIKRKDFLIMFVHHLVTIGLISFSYINNMVRVGTLIMCLHDVSDFLLEAAKLANYAKYQRLCDTLFVIFSAVFMVTRLGIYPFWILNTTLFESWEIIGPYASWWLLNGLLLTLQLLHVIWSYLIARIALKALIRGKVSKDDRSDVESSSEEEDVTTCTKSPCDSSSSNGANRVNGHMGGSYWAEE

SEQ ID NO: 846997 - protein, 195 aa, Homo sapiens [sequence omitted]

SEQ ID NO: 846998 - protein, 111 aa, Homo sapiens; identical to SEQ ID NO: 846993

SEQ ID NO: 846999 - protein, 154 aa, Homo sapiens
MMKPRPKRFIAKPCALRIGIEDSGPYQAQPNAILEKVFISITKYPDKKRLEGLSKQLDWNVRKIQCWFRHRRNQDKPPTLTKFCESMWRFTFYLCIFCYGIRFLWSPPGVWDIRKWWVINYPLQASFRWGYISYYLMDWPSMGPYVPTVPPYTH

SEQ ID NO: 847000 - protein, 405 aa, Homo sapiens [sequence omitted]

SEQ ID NO: 847001 - protein, 181 aa, Homo sapiens
MQWSKEEEAAARKKVKENSAVRVLLEEQVKYEREASKYWDTFYKIHKNKFFKDRNWLLREFPEILPVDQKPEEKARESSWDHVKTSATNRFSRMHCPTVPDEKNHYEKSSGSSEGQSKTESDFSNLDSEKHKKGPMETGLFPGSNATFRILEVGCGAGNSVFPILNTLEGSPQYVLQSQFR

SEQ ID NO: 847002 - protein, 241 aa, Homo sapiens
MQWSKEEEAAARKKVKENSAVRVLLEEQVKYEREASKYWDTFYKIHKNKFFKDRNWLLREFPEILPVDQKPEEKARESSWDHVKTSATNRFSRMHCPTVPDEKNHYEKSSGSSEGQSKTESDFSNLDSEKHKKGPMETGLFPGSNATFRILEVGCGAGNSVFPILNTLENSPESFLYCCDFASGAVELVKSHSSYRATQCFAFVHDVCDDGLPYPFPDGILDVILLVFVLSSIHPDRTLFI

SEQ ID NO: 847003 - protein, 405 aa, Homo sapiens [sequence omitted]

SEQ ID NO: 847004 - protein, 357 aa, Homo sapiens
MQWSKEEEAAARKKVKENSAVRVLLEEQVKYEREASKYWDTFYKIHKNKFFKDRNWLLREFPEILPVDQKPEEKARESSWDHVKTSATNRFSRMHCPTVPDEKNHYEKSSGSSEGQSKTESDFSNLDSEKHKKGPMETGLFPGSNATFRILEVGCGAGNSVFPILNTLENSPESFLYCCDFASGAVELVKSHSSYRATQCFAFVHDVCDDGLPYPFPDGILDVILLVFVLSSIHPDRMQGVVNRLSKLLKPGGMLLFRDYGRYDKTQLRFKKGHCLSENFYVRGDGTRAYFFTKGEVHSMFCKASLDEKQNLVDRRLQVNRKKQVKMHRVWIQGKFQKPLHQTQNSSNMVSTLLSQD

SEQ ID NO: 847005 - protein, 496 aa, Homo sapiens
GSSAELRASASSSPAAARRSRASPRGRRRGRKAGSLVTCPLQSRNSSGGEETFPNIRGIKKSPPQLSSSSSRLSKNILSTTGKTVHQTRDDDQPRDFFKKRNRVNESHQKSSNMNAGPSWNKVQHSKNSSGKRQSKSQVPHASSQPRSSLTAVTQPTEEKLKESISPEARRKRNPLGSRCQGASGNKLFLDFQSMKIIKENADEDSASDLSDSERIPIPPSPLTPPDLNLRAEEIDPVYFDLHPGQGHTKPEYYYPNFLPSPFSSWDLRDMALLLNAENKTEAVPRVGGLLGKYIDRLIQLEWLQVQTVQCEKAKGGKARPPTAPGTSGALKSPGRSKLIASALSKPLPHQEGASKSGPSRKKAFHHEEIHPSHYAFETSPRPIDVLGGTRFCSQRQTLEMRTEEKKKKSSKSTKLQRWDLSGSGSSSKVETSGHIRVPKQAAVILDSADSCKASKTQAHAHPRKKGKAESCGHATVSSEKKLKTNGVKQNTYKLK

SEQ ID NO: 847006 - protein, 383 aa, Homo sapiens
MNAGPSWNKVQHSKNSSGKRQSKSQVPHASSQPRSSLTAVTQPTEEKLKESISPEARRKRNPLGSRCQGASGNKLFLDFQSMKIIKENADEDSASDLSDSERIPIPPSPLTPPDLNLRAEEIDPVYFDLHPGQGHTKPEYYYPNFLPSPFSSWDLRDMALLLNAENKTEAVPRVGGLLGKYIDRLIQLEWLQVQTVQCEKAKGGKARPPTAPGTSGALKSPGRSKLIASALSKPLPHQEGASKSGPSRKKAFHHEEIHPSHYAFETSPRPIDVLGGTRFCSQRQTLEMRTEEKKKKSSKSTKLQRWDLSGSGSSSKVETSGHIRVPKQAAVILDSADSCKASKTQAHAHPRKKGKAESCGHATVSSEKKLKTNGVKQNTYKLK

SEQ ID NO: 847007 - protein, 496 aa, Homo sapiens; identical to SEQ ID NO: 847005

SEQ ID NO: 847008 - protein, 496 aa, Homo sapiens; identical to SEQ ID NO: 847005

SEQ ID NO: 847009 - protein, 383 aa, Homo sapiens; identical to SEQ ID NO: 847006

SEQ ID NO: 847010 - protein, 344 aa, Homo sapiens
GSSAELRASASSSPAAARRSRASPRGRRRGRKAGSLVTCPLQSRNSSGGEETFPNIRGIKKSPPQLSSSSSRLSKNILSTTGKTVHQTRDDDQPRDFFKKRNRVNESHQKSSSWDLRDMALLLNAENKTEAVPRVGGLLGKYIDRLIQLEWLQVQTVQCEKAKGGKARPPTAPGTSGALKSPGRSKLIASALSKPLPHQEGASKSGPSRKKAFHHEEIHPSHYAFETSPRPIDVLGGTRFCSQRQTLEMRTEEKKKKSSKSTKLQRWDLSGSGSSSKVETSGHIRVPKQAAVILDSADSCKASKTQAHAHPRKKGKAESCGHATVSSEKKLKTNGVKQNTYKLK

SEQ ID NO: 847011 - protein, 300 aa, Homo sapiens
GSSAELRASASSSPAAARRSRASPRGRRRGRKAGSLVTCPLQSRNSSGGEETFPNIRGIKKSPPQLSSSSSRLSKNILSTTGKTVHQTRDDDQPRDFFKKRNRVNESHQKSSNMNAGPSWNKVQHSKNSSGKRQSKSQVPHASSQPRSSLTAVTQPTEEKLKESISPEARRKRNPLGSRCQGASGNKLFLDFQSMKIIKENADEDSASDLSDSERIPIPPSPLTPPDLNLRAEEIDPVYFDLHPGQGHTKPEYYYPNFLPSPFSSWDLRDMALLLNAENKTEAVPRVGGLLGKYIDRFLN

SEQ ID NO: 847012 - protein, 105 aa, Homo sapiens
MEFVDSLHGQPKMPEWLSTHPSHGNRVEYLDRLIPQALKIREMCNCPPLSNPDPRLLFKLSTKHFLEESEKEDLNITKKQKMDTLPIQKQEQIPLTYIVEKRTGS

SEQ ID NO: 847013 - protein, 136 aa, Homo sapiens
  misc_feature (14)..(15): Xaa can be any naturally occurring amino acid
GGPALAKQGFVFFXXFPSCDPLQTSSVFWQQMEFVDSLHGQPKMPEWLSTHPSHGNRVEYLDRLIPQALKIREMCNCPPLSNPDPRLLFKLSTKHFLEESEKEDLNITKKQKMDTLPIQKQEQIPLTYIVEKRTGS

SEQ ID NO: 847014 - protein, 524 aa, Homo sapiens
MSFICGLQSAARNHVFFRFNSLSNWRKCNTLASTSRGCHQVQVNHIVNKYQGLGVNQCDRWSFLPGNFHFYSTFNNKRTGGLSSTKSKEIWRITSKCTVWNDAFSRQLLIKEVTAVPSLSVLHPLSPASIRAIRNFHTSPRFQAAPVPLLLMILKPVQKLFAIIVGRGIRKWWQALPPNKKEVVKENIRKNKWKLFLGLSSFGLLFVVFYFTHLEVSPITGRSKLLLLGKEQFRLLSELEYEAWMEEFKNDMLTEKDARYLAVKEVLCHLIECNKDVPGISQINWVIHVVDSPIINAFVLPNGQMFVFTGFLNSVTDIHQLSFLLGHEIAHAVLGHAAEKAGMVHLLDFLGMIFLTMIWAICPRDSLALLCQWIQSKLQEYMFNRPYSRKLEAEADKIGLLLAAKACADIRASSVFWQQMEFVDSLHGQPKMPEWLSTHPSHGNRVEYLDRLIPQALKIREMCNCPPLSNPDPRLLFKLSTKHFLEESEKEDLNITKKQKMDTLPIQKQEQIPLTYIVEKRTGS

SEQ ID NO: 847015 - protein, 524 aa, Homo sapiens; identical to SEQ ID NO: 847014

SEQ ID NO: 847016 - protein, 280 aa, Homo sapiens [sequence omitted]

SEQ ID NO: 847017 - protein, 524 aa, Homo sapiens; identical to SEQ ID NO: 847014

SEQ ID NO: 847018 - protein, 524 aa, Homo sapiens; identical to SEQ ID NO: 847014

SEQ ID NO: 847019 - protein, 485 aa, Homo sapiens
MSFICGLQSAARNHVFFRFNSLSNWRKCNTLASTSRGCHQVQVNHIVNKYQGLGVNQCDRWSFLPGNFHFYSTFNNKRTGGLSSTKSKEIWRITSKCTVWNDAFSRQLLIKEVTAVPSLSVLHPLSPASIRAIRNFHTSPRFQAAPVPLLLMILKPVQKLFAIIVGRGIRKWWQALPPNKKEVVKENIRKNKWKLFLGLSSFGLLFVVFYFTHLEVSPITGRSKLLLLGKEQFRLLSELEYEAWMEEFKNDMLTEKDARYLAVKEVLCHLIECNKDVPGISQINWVIHVVDSPIINAFVLPNGQMFVFTGFLNSVTDIHQLSFLLGHEIAHAVLGHAAEKAGMVHLLDFLGMIFLTMIWAICPRDSLALLCQWIQSKLQEYMFNRPYSRKLEAEADKIGLLLAAKACADIRASSVFWQQMEFVDSLHGQPKMPEWLSTHPSHGNRVEYLDRLIPQDMHVSPRAARDFERAQWNLHLSGNGILSFY

SEQ ID NO: 847020 - protein, 187 aa, Homo sapiens
MEEFKNDMLTEKDARYLAVKEVLCHLIECNKDVPGISQINWVIHVVDSPIINAFVLPNGQMFVFTGFLNSVTDIHQLSFLLGHEIAHAVLGHAYMFNRPYSRKLEAEADKIGLLLAAKALKIREMCNCPPLSNPDPRLLFKLSTKHFLEESEKEDLNITKKQKMDTLPIQKQEQIPLTYIVEKRTGS

SEQ ID NO: 847021 - protein, 524 aa, Homo sapiens; identical to SEQ ID NO: 847014

SEQ ID NO: 847022 - protein, 524 aa, Homo sapiens; identical to SEQ ID NO: 847014

SEQ ID NO: 847023 - protein, 481 aa, Homo sapiens
MSFICGLQSAARNHVFFRFNSLSNWRKCNTLASTSRGCHQVQVNHIVNKYQGLGVNQCDRWSFLPGNFHFYSTFNNKRTGGLSSTKSKEIWRITSKCTVWNDAFSRQLLIKEVTAVPSLSVLHPLSPASIRAIRNFHTSPRFQAAPVPLLLMILKPVQKLFAIIVGRGIRKWWQALPPNKKEVVKENIRKNKWKLFLGLSSFGLLFVVFYFTHLEVSPITGRSKLLLLGKEQFRLLSELEYEAWMEEFKNDMLTEKDARYLAVKEVLCHLIECNKDVPGISQINWVIHVVDSPIINAFVLPNGQMFVFTGFLNSVTDIHQLSFLLGHEIAHAVLGHAYMFNRPYSRKLEAEADKIGLLLAAKACADIRASSVFWQQMEFVDSLHGQPKMPEWLSTHPSHGNRVEYLDRLIPQALKIREMCNCPPLSNPDPRLLFKLSTKHFLEESEKEDLNITKKQKMDTLPIQKQEQIPLTYIVEKRTGS

SEQ ID NO: 847024 - protein, 524 aa, Homo sapiens; identical to SEQ ID NO: 847014

SEQ ID NO: 847025 - protein, 474 aa, Homo sapiens
MSFICGLQSAARNHVFFRFNSLSNWRKCNTLASTSRGCHQVQVNHIVNKYQGLGVNQCDRWSFLPGNFHFYSTFNNKRTGGLSSTKSKEIWRITSKCTVWNDAFSRQLLIKEVTAVPSLSVLHPLSPASIRAIRNFHTSPRFQAAPVPLLLMILKPVQKLFAIIVGRGIRKWWQALPPNKKEVVKENIRKNKWKLFLGLSSFGLLFVVFYFTHLEVSPITGRSKLLLLGKEQFRLLSELEYEAWMEEFKNDMLTEKDARYLAVKEVLCHLIECNKDVPGISQINWVIHVVDSPIINAFVLPNGQMFVFTGFLNSVTDIHQLSFLLGHEIAHAVLGHAAEKAGMVHLLDFLGMIFLTMIWAICPRDSLALLCQWIQSKLQEYMFNRPYSRKLEAEADKIGLLLAAKALKIREMCNCPPLSNPDPRLLFKLSTKHFLEESEKEDLNITKKQKMDTLPIQKQEQIPLTYIVEKRTGS

SEQ ID NO: 847026 - protein, 488 aa, Homo sapiens
MSFICGLQSAARNHVFFRFNSLSNWRKCNTLASTSRGCHQVQVNHIVNKYQGLGVNQCDRWSFLPGNFHFYSTFNNKRTGGLSSTKSKEIWRITSKCTVWNDAFSRQLLIKEVTAVPSLSVLHPLSPASIRAIRNFHTSPRFQAAPVPLLLMILKPVQKLFAIIVGRGIRKWWQALPPNKKEVVKENIRKNKWKLFLGLSSFGLLFVVFYFTHLEVSPITGRSKLLLLGKEQFRLLSELEYEAWMEEFKNDMLTEKDARYLAVKEVLCHLIECNKDVPGISQINWVIHVVDSPIINAFVLPNGQMFVFTGFLNSVTDIHQLSFLLGHEIAHAVLGHAAEKAGMVHLLDFLGMIFLTMIWAICPRDSLALLCQWIQSKLQEYMFNRPYSRKLEAEADKIGLLLAAKACADIRASSVFWQQMEFVDSLHGQPKMPEWLSTHPSHGNRVEYLDRLIPQRRKLKHIRSNEQPEVTCLIRSLAKLYAIEVKGI

SEQ ID NO: 847027 - protein, 124 aa, Homo sapiens
MQFNFELSFKYVLYSSYSWLKLDHTIADCMVFTWTPCRMLDYLYSSYANMLWAGEMKSSSHQDLLFKWLDNWATKELELHLLGFELFWNTLLHFGKSKSSASGALSIENLPSFALKDVLFFIYT

SEQ ID NO: 847028 - protein, 124 aa, Homo sapiens; identical to SEQ ID NO: 847027

SEQ ID NO: 847029 - protein, 124 aa, Homo sapiens; identical to SEQ ID NO: 847027

SEQ ID NO: 847030 - protein, 638 aa, Homo sapiens
MPVLSARRRELADHAGSGRRSGPSPTARSGPHLSALRAQPARAAHLSGRGTYVRRDTAGGGPGQARPLGPPGTSLLGRGARRSGEGWCPGAFESGARAARPPSRVEPRLATAASREGAGLPRAEVAAGSGRGARSGEWGLAAAGAWETMHHCKRYRSPEPDPYLSYRWKRRRSYSREHEGRLRYPSRREPPPRRSRSRSHDRLPYQRRYRERRDSDTYRCEERSPSFGEDYYGPSRSRHRRRSRERGPYRTRKHAHHCHKRRTRSCSSASSRSQQSSKRSSRSVEDDKEGHLVCRIGDWLQERYEIVGNLGEGTFGKVVECLDHARGKSQVALKIIRNVGKYREAARLEINVLKKIKEKDKENKFLCVLMSDWFNFHGHMCIAFELLGKNTFEFLKENNFQPYPLPHVRHMAYQLCHALRFLHENQLTHTDLKPENILFVNSEFETLYNEHKSCEEKSVKNTSIRVADFGSATFDHEHHTTIVATRHYRPPEVILELGWAQPCDVWSIGCILFEYYRGFTLFQTHENREHLVMMEKILGPIPSHMIHRTRKQKYFYKGGLVWDENSSDGRYVKENCKPLKSYMLQDSLEHVQLFDLMRRMLEFDPAQRITLAEALLHPFFAGLTPEERSFHTSRNPSR

SEQ ID NO: 847031 - protein, 269 aa, Homo sapiens
MSDWFNFHGHMCIAFELLGKNTFEFLKENNFQPYPLPHVRHMAYQLCHALRFLHENQLTHTDLKPENILFVNSEFETLYNEHKSCEEKSVKNTSIRVADFGSATFDHEHHTTIVATRHYRPPEVILELGWAQPCDVWSIGCILFEYYRGFTLFQTHENREHLVMMEKILGPIPSHMIHRTRKQKYFYKGGLVWDENSSDGRYVKENCKPLKSYMLQDSLEHVQLFDLMRRMLEFDPAQRITLAEALLHPFFAGLTPEERSFHTSRNPSR

SEQ ID NO: 847032 - protein, 363 aa, Homo sapiens
MPVLSARRRELADHAGSGRRSGPSPTARSGPHLSALRAQPARAAHLSGRGTYVRRDTAGGGPGQARPLGPPGTSLLGRGARRSGEGWCPGAFESGARAARPPSRVEPRLATAASREGAGLPRAEVAAGSGRGARSGEWGLAAAGAWETMHHCKRYRSPEPDPYLSYRWKRRRSYSREHEGRLRYPSRREPPPRRSRSRSHDRLPYQRRYRERRDSDTYRCEERSPSFGEDYYGPSRSRHRRRSRERGPYRTRKHAHHCHKRRTRSCSSASSRSQQSSKRSSRSVEDDKEGHLVCRIGDWLQERYEIVGNLGEGTFGKVVECLDHARGKSQVALKIIRNVGKYREAARLEINVLKKIKEKKQEA

SEQ ID NO: 847033 - protein, 269 aa, Homo sapiens; identical to SEQ ID NO: 847031

SEQ ID NO: 847034 - protein, 691 aa, Homo sapiens
MPVLSARRRELADHAGSGRRSGPSPTARSGPHLSALRAQPARAAHLSGRGTYVRRDTAGGGPGQARPLGPPGTSLLGRGARRSGEGWCPGAFESGARAARPPSRVEPRLATAASREGAGLPRAEVAAGSGRGARSGEWGLAAAGAWETMHHCKRYRSPEPDPYLSYRWKRRRSYSREHEGRLRYPSRREPPPRRSRSRSHDRLPYQRRYRERRDSDTYRCEERSPSFGEDYYGPSRSRHRRRSRERGPYRTRKHAHHCHKRRTRSCSSASSLCLMKCWDLENPTNQPTGSSPSPPLPLTDTSICQSEPPTMRLVGWRFGGRCMQRSQQSSKRSSRSVEDDKEGHLVCRIGDWLQERYEIVGNLGEGTFGKVVECLDHARGKSQVALKIIRNVGKYREAARLEINVLKKIKEKDKENKFLCVLMSDWFNFHGHMCIAFELLGKNTFEFLKENNFQPYPLPHVRHMAYQLCHALRFLHENQLTHTDLKPENILFVNSEFETLYNEHKSCEEKSVKNTSIRVADFGSATFDHEHHTTIVATRHYRPPEVILELGWAQPCDVWSIGCILFEYYRGFTLFQTHENREHLVMMEKILGPIPSHMIHRTRKQKYFYKGGLVWDENSSDGRYVKENCKPLKSYMLQDSLEHVQLFDLMRRMLEFDPAQRITLAEALLHPFFAGLTPEERSFHTSRNPSR

SEQ ID NO: 847035 - protein, 343 aa, Homo sapiens [sequence omitted]

SEQ ID NO: 847036 - protein, 343 aa, Homo sapiens [sequence omitted]

SEQ ID NO: 847037 - protein, 406 aa, Homo sapiens
MKGDCDTRPEGSLPHEDLGPEAMTACPTRGGTGSAVTAIHTGVKSGAHPLERTTMDLHVLVIVGDRGRGGHTGPASMPTTATNAAPGLVAAPPRGKSQVALKIIRNVGKYREAARLEINVLKKIKEKDKENKFLCVLMSDWFNFHGHMCIAFELLGKNTFEFLKENNFQPYPLPHVRHMAYQLCHALRFLHENQLTHTDLKPENILFVNSEFETLYNEHKSCEEKSVKNTSIRVADFGSATFDHEHHTTIVATRHYRPPEVILELGWAQPCDVWSIGCILFEYYRGFTLFQTHENREHLVMMEKILGPIPSHMIHRTRKQKYFYKGGLVWDENSSDGRYVKENCKPLKSYMLQDSLEHVQLFDLMRRMLEFDPAQRITLAEALLHPFFAGLTPEERSFHTSRNPSR

SEQ ID NO: 847038 - protein, 638 aa, Homo sapiens; identical to SEQ ID NO: 847030

SEQ ID NO: 847039 - protein, 490 aa, Homo sapiens
MHHCKRYRSPEPDPYLSYRWKRRRSYSREHEGRLRYPSRREPPPRRSRSRSHDRLPYQRRYRERRDSDTYRCEERSPSFGEDYYGPSRSRHRRRSRERGPYRTRKHAHHCHKRRTRSCSSASSRSQQSSKRSSRSVEDDKEGHLVCRIGDWLQERYEIVGNLGEGTFGKVVECLDHARGKSQVALKIIRNVGKYREAARLEINVLKKIKEKDKENKFLCVLMSDWFNFHGHMCIAFELLGKNTFEFLKENNFQPYPLPHVRHMAYQLCHALRFLHENQLTHTDLKPENILFVNSEFETLYNEHKSCEEKSVKNTSIRVADFGSATFDHEHHTTIVATRHYRPPEVILELGWAQPCDVWSIGCILFEYYRGFTLFQTHENREHLVMMEKILGPIPSHMIHRTRKQKYFYKGGLVWDENSSDGRYVKENCKPLKSYMLQDSLEHVQLFDLMRRMLEFDPAQRITLAEALLHPFFAGLTPEERSFHTSRNPSR

SEQ ID NO: 847040 - protein, 490 aa, Homo sapiens; identical to SEQ ID NO: 847039

SEQ ID NO: 847041 - protein, 652 aa, Homo sapiens
MPVLSARRRELADHAGSGRRSGPSPTARSGPHLSALRAQPARAAHLSGRGTYVRRDTAGGGPGQARPLGPPGTSLLGRGARRSGEGWCPGAFESGARAARPPSRVEPRLATAASREGAGLPRAEVAAGSGRGARSGEWGLAAAGAWETMHHCKRYRSPEPDPYLSYRWKRRRSYSREHEGRLRYPSRREPPPRRSRSRSKDPADQRPHPPFGSHDRLPYQRRYRERRDSDTYRCEERSPSFGEDYYGPSRSRHRRRSRERGPYRTRKHAHHCHKRRTRSCSSASSRSQQSSKRSSRSVEDDKEGHLVCRIGDWLQERYEIVGNLGEGTFGKVVECLDHARGKSQVALKIIRNVGKYREAARLEINVLKKIKEKDKENKFLCVLMSDWFNFHGHMCIAFELLGKNTFEFLKENNFQPYPLPHVRHMAYQLCHALRFLHENQLTHTDLKPENILFVNSEFETLYNEHKSCEEKSVKNTSIRVADFGSATFDHEHHTTIVATRHYRPPEVILELGWAQPCDVWSIGCILFEYYRGFTLFQTHENREHLVMMEKILGPIPSHMIHRTRKQKYFYKGGLVWDENSSDGRYVKENCKPLKSYMLQDSLEHVQLFDLMRRMLEFDPAQRITLAEALLHPFFAGLTPEERSFHTSRNPSR

SEQ ID NO: 847042 - protein, 269 aa, Homo sapiens; identical to SEQ ID NO: 847031

SEQ ID NO: 847043 - protein, 406 aa, Homo sapiens; identical to SEQ ID NO: 847037

SEQ ID NO: 847044 - protein, 269 aa, Homo sapiens; identical to SEQ ID NO: 847031

SEQ ID NO: 847045 - protein, 269 aa, Homo sapiens; identical to SEQ ID NO: 847031

SEQ ID NO: 847046 - protein, 395 aa, Homo sapiens
MAAEATAVAGSGAVGGCLAKDGLQQSKCPDTTPKRRRASSLSRDAERRAYQWCREYLGGAWRRVQPEELRVYPVSGGLSNLLFRCSLPDHLPSVGEEPREVLLRLYGAILQGVDSLVLESVMFAILAERSLGPQLYGVFPEGRLEQYIPSRPLKTQELREPVLSAAIATKMAQFHGMEMPFTKEPHWLFGTMERYLKQIQDLPPTGLPEMNLLEMYSLKDEMGNLRKLLESTPSPVVFCHNDIQEGNILLLSEPENADSLMLVDFEYSSYNYRGFDIGNHFCEWVYDYTHEEWPFYKARPTDYPTQEQQLHFIRHYLAEAKKGETLSQEEQRKLEEDLLVEVSRYALASHFFWGLWSILQASMSTIEFGYLDYAQSRFQFYFQQKGQLTSVHSSS

SEQ ID NO: 847047 - protein, 424 aa, Homo sapiens
MAAEATAVAGSGAVGGCLAKDGLQQSKCPDTTPKRRRASSLSRDAERRAYQWCREYLGGAWRRVQPEELRVYPVSGGLSNLLFRCSLPDHLPSVGEEPREVLLRLYGAILQGVDSLVLESVMFAILAERSLGPQLYGVFPEGRLEQYIPSRPLKTQELREPVLSAAIATKMAQFHGMEMPFTKEPHWLFGTMERYLKQIQDLPPTGLPEMNLLEMYSLKDEMGNLRKLLESTPSPVVFCHNDIQEGRRRHLSLLTQDGRARGLWSEQNLTTIPPGNILLLSEPENADSLMLVDFEYSSYNYRGFDIGNHFCEWVYDYTHEEWPFYKARPTDYPTQEQQLHFIRHYLAEAKKGETLSQEEQRKLEEDLLVEVSRYALASHFFWGLWSILQASMSTIEFGYLDYAQSRFQFYFQQKGQLTSVHSSS

SEQ ID NO: 847048 - protein, 330 aa, Homo sapiens
MAAEATAVAGSGAVGGCLAKDGLQQSKCPDTTPKRRRASSLSRDAERRAYQWCREYLGGAWRRVQPEELRVYPVSGGLSNLLFRCSLPDHLPSVGEEPREVLLRLYGAILQGVDSLVLESVMFAILAERSLGPQLYGVFPEGRLEQYIPSRPLKTQELREPVLSAAIATKMAQFHGMEMPFTKEPHWLFGTMERYLKQIQDLPPTGLPEMNLLEMYSLKDEMGNLRKLLESTPSPVVFCHNDIQEGNILLLSEPENADSLMLVDFEYSSYNYRGFDIGNHFCEWVYDYTHEEWPFYKARPTDYPTQEQQRQRKVRPSPKRSRENWKKICW

SEQ ID NO: 847049 - protein, 395 aa, Homo sapiens; identical to SEQ ID NO: 847046

SEQ ID NO: 847050 - protein, 403 aa, Homo sapiens
MAAEATAVAGSGAVGGCLAKDGLQQSKCPDTTPKRRRASSLSRDAERRAYQWCREYLGGAWRRVQPEELRVYPVSGGLSNLLFRCSLPDHLPSVGEEPREVLLRLYGAILQGVDSLVLESVMFAILAERSLGPQLYGVFPEGRLEQYIPSRPLKTQELREPVLSAAIATKMAQFHGMEMPFTKEPHWLFGTMERYLKQIQDLPPTGLPEMNLLEMYSLKDEMGNLRKLLESTPSPVVFCHNDIQEGNILLLSEPENADSLMLVDFEYSSYNYRGFDIGNHFCEWVYDYTHEEWPFYKARPTDYPTQEQQLHFIRHYLAEAKKGETLSQEEQRKLEEDLLVEVSRYALASHFFWGLWSILQASMSTIEFGYLDYAQSRFQFYSLRAQVVEVGLEQEGNFDFFFS

SEQ ID NO: 847051 - protein, 395 aa, Homo sapiens; identical to SEQ ID NO: 847046

SEQ ID NO: 847052 - protein, 395 aa, Homo sapiens; identical to SEQ ID NO: 847046

SEQ ID NO: 847053 - protein, 395 aa, Homo sapiens; identical to SEQ ID NO: 847046

SEQ ID NO: 847054 - protein, 89 aa, Homo sapiens
GTVATAGVWYLLEGEEYRMSGECQSAVSISVVSGSTSTGGISGGLGSGSGFGLSSGFGSGSGSGFGFGGSVSGSSSSKIISTTTLNKRR

SEQ ID NO: 847055 - protein, 69 aa, Homo sapiens
RPPTTTKFAAASTGGERSADILPIPGGSPGPNQEVATKLQEAESKMTRSVISRIIGVTYVPSQSNAISH

SEQ ID NO: 847056 - protein, 69 aa, Homo sapiens; identical to SEQ ID NO: 847055

SEQ ID NO: 847057 - protein, 458 aa, Homo sapiens
MSRVLNRPRVVGAAVRSFGTGGFGGGFGGSFSGKGGPGFPVCPAGGIQEVTINQSLLTPLHVEIDPEIQKVRTEEREQIKLLNNKFASFIDKVQFLEQQNKVLETKWNLLQQQTTTTSSKNLEPLFETYLSVLRKQLDTLGNDKGRLQSELKTMQDSVEDFKTKYEEEINKRTAAENDFVVLKKDVDAAYLNKVELEAKVDSLNDEINFLKVLYDAELSQMQTHVSDTSVVLSMDNNRNLDLDSIIAEVRAQYEEIAQRSKAEAEALYQTKVQQLQISVDQHGDNLKNTKSEIAELNRMIQRLRAEIENIKKQCQTLQVSVADAEQRGENALKDAHSKRVELEAALQQAKEELARMLREYQELMSVKLALDIEIATYRKLLEGEEYRMSGECQSAVSISVVSGSTSTGGISGGLGSGSGFGLSSGFGSGSGSGFGFGGSVSGSSSSKIISTTTLNKRR

SEQ ID NO: 847058 - protein, 338 aa, Homo sapiens
PQMSMSGARCLNRPKQLDTLGNDKGRLQSELKTMQDSVEDFKTKYEEEINKRTAAENDFVVLKKDVDAAYLNKVELEAKVDSLNDEINFLKVLYDAELSQMQTHVSDTSVVLSMDNNRNLDLDSIIAEVRAQYEEIAQRSKAEAEALYQTKVQQLQISVDQHGDNLKNTKSEIAELNRMIQRLRAEIENIKKQCQTLQVSVADAEQRGENALKDAHSKRVELEAALQQAKEELARMLREYQELMSVKLALDIEIATYRKLLEGEEYRMSGECQSAVSISVVSGSTSTGGISGGLGSGSGFGLSSGFGSGSGSGFGFGGSVSGSSSSKIISTTTLNKRR

SEQ ID NO: 847059 - protein, 458 aa, Homo sapiens; identical to SEQ ID NO: 847057

SEQ ID NO: 847060 - protein, 458 aa, Homo sapiens; identical to SEQ ID NO: 847057

SEQ ID NO: 847061 - protein, 546 aa, Homo sapiens
PLILPSGPSAAMRSSVSRQTYSTKGGFSSNSASGGSGSQARTSFSSVTVSRSSGSGGGAHCGPGTGGFGSRSLYNLGGHKSISVSVAGGALSGRALGGFGFGSRAFMGQGAGRQTFGPACPPGGIQEVTVNQSLLTPLHVEIDPEIQRVRTQEREQIKTLNNKFASFIDKVRFLEQQNKVLETKWALLQEQGQNLGVTRNNLEPLFEAYLGSMRSTLDRLQSERGRLDSELRNVQDLVEDFKNKYEDEINKHTAAENEFVVLKKDVDAAYMGRMDLHGKVGTLTQEIDFLQQLYEMELSQVQTHVSNTNVVLSMDNNRNLDLDSIIAEVKAQYELIAQRSRAEAEAWYQTKYEELQVTAGKHGDNLRDTKNEIAELTRTIQRLQGEADAAKKQCQQLQTAIAEAEQRGELALKDAQKKLGDLDVALHQAKEDLTRLLRDYQELMNVKLALDVEIATYRKLLESEESRMSGECPSAVSISVTGNSTTVCGGGAASFGGGISLGGSGGATKGGFSTNVGYSTVKGGPVSAGTSILRKTTTVKTSSQRY

SEQ ID NO: 847062 - protein, 544 aa, Homo sapiens
PLILPSGPSAAMRSSVSRQTYSTKGGFSSNSASGGSGSQARTSFSSVTVSRSSGSGGGAHCGPGTGGFGSRSLYNLGGHKSISVSVAGGALSGRALGGFGFGSRAFMGQGAGRQTFGPACPPGGIQEVTVNQSLLTPLHVEIDPEIQRVRTQEREQIKTLNNKFASFIDKVRFLEQQNKVLETKWALLQEQGQNLGVTRNNLEPLFEAYLGSMRSTLDRLQSERGRLDSELRNVQDLVEDFKNKYEDEINKHTAAENEFVVLKKDVDAAYMGRMDLHGKVGTLTQEIDFLQQLYEMELSQVQTHVSNTNVVLSMDNNRNLDLDSIIAEVKAQYELIAQRSRAEAEAWYQTKYEELQVTAGKHGDNLRDTKNEIAELTRTIQRLQGEADAAKKQCQQLQTAIAEAEQRGELALKDAQKKLGDLDVALHQAKEDLTRLLRDYQELMNVKLALDVEIATYRKLLESEESRMSGECPSAVSICEYLLPTSCSTPGQAPELCSVYATCTCPKACSPPFEPLETGSEGPSSGLLYPFPIALLLDFVLIPH

SEQ ID NO: 847063 - protein, 307 aa, Homo sapiens
MSQCSQHLYEEEINKRTAAENDFVVLKKDVDAAYLNKVELEAKVDSLNDEINFLKVLYDAELSQVQTHVSNTNVVLSMDNNRNLDLDSIIAEVKAQYELIAQRSRAEAEAWYQTKPAAPDLVDQHGDNLKNTKSEIAELNRMIQRLRAEIENIKKQCQTLQVSVADAEQRGELALKDAQKKLGDLDVALHQAKEDLTRLLRDYQELMNVKLALDVEIATYRKLLESEESRMSGECPSAVSICEYLLPTSCSTPGQAPELCSVYATCTCPKACSPPFEPLETGSEGPSSGLLYPFPIALLLDFVLIPH

SEQ ID NO: 847064 - protein, 554 aa, Homo sapiens
ALTGLGPVTSLIAPSSLSAAMIARQQCVRGGPRGFSCGSAIVGGGKRGAFSSVSMSGGAGRCSSGGFGSRSLYNLRGNKSISMSVAGSRQGACFGGAGGWHWWLWCRRLRSWFLGTGGFGGGFGGSFSGKGGPGFPVCPAGGIQEVTINQSLLTPLHVEIDPEIQKVRTEEREQIKLLNNKFASFIDKVQFLEQQNKVLETKWNLLQQQTTTTSSKNLEPLFETYLSVLRKQLDTLGNDKGRLQSELKTMQDSVEDFKTKYEEEINKRTAAENDFVVLKKDVDAAYLNKVELEAKVDSLNDEINFLKVLYDAELSQMQTHVSDTSVVLSMDNNRNLDLDSIIAEVRAQYEEIAQRSKAEAEALYQTKVQQLQISVDQHGDNLKNTKSEIAELNRMIQRLRAEIENIKKQCQTLQVSVADAEQRGENALKDAHSKRVELEAALQQAKEELARMLREYQELMSVKLALDIEIATYRKLLEGEEYRMSGECQSAVSISVVSGSTSTGGISGGLGSGSGFGLSSGFGSGSGSGFGFGGSVSGSSSSKIISTTTLNKRR

SEQ ID NO: 847065 - protein, 67 aa, Homo sapiens
SGRLLLLNSRPRRRELLLDLGLVTHLEWEGCQLTSHLPWAEKKMTRSVISRIIGVTYVPSQSNAISH

SEQ ID NO: 847066 - protein, 540 aa, Homo sapiens
ALTGLGPVTSLIAPSSLSAAMIARQQCVRGGPRGFSCGSAIVGGGKRGAFSSVSMSGGAGRCSSGGFGSRSLYNLRGNKSISMSVAGSRQGACFGGAGGFGTGGFGGGFGGSFSGKGGPGFPVCPAGGIQEVTINQSLLTPLHVEIDPEIQKVRTEEREQIKLLNNKFASFIDKVQFLEQQNKVLETKWNLLQQQTTTTSSKNLEPLFETYLSVLRKQLDTLGNDKGRLQSELKTMQDSVEDFKTKYEEEINKRTAAENDFVVLKKDVDAAYLNKVELEAKVDSLNDEINFLKVLYDAELSQMQTHVSDTSVVLSMDNNRNLDLDSIIAEVRAQYEEIAQRSKAEAEALYQTKVQQLQISVDQHGDNLKNTKSEIAELNRMIQRLRAEIENIKKQCQTLQVSVADAEQRGENALKDAHSKRVELEAALQQAKEELARMLREYQELMSVKLALDIEIATYRKLLEGEEYRMSGECQSAVSISVVSGSTSTGGISGGLGSGSGFGLSSGFGSGSGSGFGFGGSVSGSSSSKIISTTTLNKRR

SEQ ID NO: 847067 - protein, 128 aa, Homo sapiens
AREAVLNRTRPGGAALQQAKEELARMLREYQELMSVKLALDIEIATYRKLLEGEEYRMSGECQSAVSISVVSGSTSTGGISGGLGSGSGFGLSSGFGSGSGSGFGFGGSVSGSSSSKIISTTTLNKRR

SEQ ID NO: 847068 - protein, 89 aa, Homo sapiens; identical to SEQ ID NO: 847054

SEQ ID NO: 847069 - protein, 77 aa, Homo sapiens
LIGSQDYLGSRFQQQDHLYHHPEQETIEETRSLQLTVSSWAQHWCLCASFTSPPSSVSGAHLTSIPSTIPWALSAPG

SEQ ID NO: 847070 - protein, 164 aa, Homo sapiens [sequence omitted]

SEQ ID NO: 847071 - protein, 566 aa, Homo sapiens
MFVSDFRKEFYEVVQSQRVLLFVASDVDALCACKILQALFQCDHVQYTLVPVSGWQELETAFLEHKEQFHYFILINCGANVDLLDILQPDEDTIFFVCDTHRPVNVVNVYNDTQIKLLIKQDDDLEVPAYEDIFRDEEEDEEHSGNDSDGSEPSEKRTRLEEEIVEQTMRRRQRREWEARRRDILFDYEQYEYHGTSSAMVMFELAWMLSKDLNDMLWWAIVGLTDQWVQDKITQMKYVTDVGVLQRHVSRHNHRNEDEENTLSVDCTRISFEYDLRLVLYQHWSLHDSLCNTSYTAARFKLWSVHGQKRLQEFLADMGLPLKQVKQKFQAMDISLKENLREMIEESANKFGMKDMRVQTFSIHFGFKHKFLASDVVFATMSLMESPEKDGSGTDHFIQALDSLSRSNLDKLYHGLELAKKQLRATQQTIASCLCTNLVISQGPFLYCSLMEGTPDVMLFSRPASLSLLSKHLLKSFVCSTKNRRCKLLPLVMAAPLSMEHGTVTVVGIPPETDSSDRKNFFGRAFEKAAESTSSRMLHNHFDLSVIELKAEDRSKFLDALISLLS

SEQ ID NO: 847072 - protein, 67 aa, Homo sapiens
LIKQDDDLEVPAYEDIFRDEEEDEEHSGNDSDGSEPSEKRTRLEEVSLGLSQLSQRNLHSQRSEVIL

SEQ ID NO: 847073 - protein, 248 aa, Homo sapiens
MFVSDFRKEFYEVVQSQRVLLFVASDVDALCACKILQALFQCDHVQYTLVPVSGWQELETAFLEHKEQFHYFILINCGANVDLLDILQPDEDTIFFVCDTHRPVNVVNVYNDTQIKLLIKQDDDLEVPAYEDIFRDEEEDEEHSGNDSDGSEPSEKRTRLEEEIVEQTMRRRQRREWEARSGSGSEPVAAALEKSSRLFAGPMSDRTAPRSPRYMPSIRDHGPGSLFLSSFSNVDTLIYKLFIRSALK

SEQ ID NO: 847074 - protein, 189 aa, Homo sapiens
MRRDLRLIEVTETICKRLLDYSLHKERTGSNRFAKGMSETFETLHNLVHKGVKVVMDIPYELWNETSAEVADLKKQCDVLVEEFEEVIEDWYRNHQEEDLTEFLCANHVLKGKDTSCLAEQWSGKKGDTAALGGKKSKKKSSRAKAAGGRSSSSKQRKELGGLEGDPSPEEDEGIQKASPLTHSPPDEL

SEQ ID NO: 847075 - protein, 87 aa, Homo sapiens
GLVRLRVWDGKDTSCLAEQWSGKKGDTAALGGKKSKKKSSRAKAAGGRSSSSKQRKELGGLEGDPSPEEDEGIQKASPLTHSPPDEL

SEQ ID NO: 847076 - protein, 275 aa, Homo sapiens
MPEPASRCLLLLPLLLLLLLLLPAPELGPSQAGAEENDWVRLPSKCEVCKYVAVELKSAFEETGKTKEVIGTGYGILDQKASGVKYTKSDLRLIEVTETICKRLLDYSLHKERTGSNRFAKGMSETFETLHNLVHKGVKVVMDIPYELWNETSAEVADLKKQCDVLVEEFEEVIEDWYRNHQEEDLTEFLCANHVLKGKDTSCLAEQWSGKKGDTAALGGKKSKKKSSRAKAAGGRSSSSKQRKELGGLEGDPSPEEDEGIQKASPLTHSPPDEL

SEQ ID NO: 847077 - protein, 275 aa, Homo sapiens; identical to SEQ ID NO: 847076

SEQ ID NO: 847078 - protein, 275 aa, Homo sapiens; identical to SEQ ID NO: 847076

SEQ ID NO: 847079 - protein, 153 aa, Homo sapiens [sequence omitted]

SEQ ID NO: 847080 - protein, 212 aa, Homo sapiens
MPEPASRCLLLLPLLLLLLLLLPAPELGPSQAGAEENDWVRLPSKCEVCKYVAVELKSAFEETGKTKEVIGTGYGILDQKASGVKYTKSDLRLIEVTETICKRLLDYSLHKERTGSNRFAKGMSETFETLHNLVHKGVKVVMDIPYELWNETSAEVADLKKQCDVLVEEFEERSSSSKQRKELGGLEGDPSPEEDEGIQKASPLTHSPPDEL

SEQ ID NO: 847081 - protein, 153 aa, Homo sapiens [sequence omitted]

SEQ ID NO: 847082 - protein, 153 aa, Homo sapiens [sequence omitted]

SEQ ID NO: 847083 - protein, 282 aa, Homo sapiens
YIITAKSIFPSKVPFISQLSTSKTRQQQQQQQQQGKKQKTAEENDWVRLPSKCEVCKYVAVELKSAFEETGKTKEVIGTGYGILDQKASGVKYTKSDLRLIEVTETICKRLLDYSLHKERTGSNRFAKGMSETFETLHNLVHKGVKVVMDIPYELWNETSAEVADLKKQCDVLVEEFEEVIEDWYRNHQEEDLTEFLCANHVLKGKDTSCLAEQWSGKKGDTAALGGKKSKKKSSRAKAAGGRSSSSKQRKELGGLEGDPSPEEDEGIQKASPLTHSPPDEL

SEQ ID NO: 847084 - protein, 218 aa, Homo sapiens
MCRCWGTGLEGQTTNPLRLGGELSSSSSCLGRDLRLIEVTETICKRLLDYSLHKERTGSNRFAKGMSETFETLHNLVHKGVKVVMDIPYELWNETSAEVADLKKQCDVLVEEFEEVIEDWYRNHQEEDLTEFLCANHVLKGKDTSCLAEQWSGKKGDTAALGGKKSKKKSSRAKAAGGRSSSSKQRKELGGLEGDPSPEEDEGIQKASPLTHSPPDEL

SEQ ID NO: 847085 - protein, 148 aa, Homo sapiens
MPEPASRCLLLLPLLLLLLLLLPAPELGPSQAGAEENDWVRLPSKCEVCKYVAVELKSAFEETGKTKEVIGTGYGILDQKASGVKYTKSDLRLIEVTETICKRLLDYSLHKERTGSNRFAKVGFGIVLHPLWGQACMYLSVSAGVSVI

SEQ ID NO: 847086 - protein, 148 aa, Homo sapiens
MRRDLRLIEVTETICKRLLDYSLHKERTGSNRFAKCDVLVEEFEEVIEDWYRNHQEEDLTEFLCANHVLKGKDTSCLAEQWSGKKGDTAALGGKKSKKKSSRAKAAGGRSSSSKQRKELGGLEGDPSPEEDEGIQKASPLTHSPPDEL

SEQ ID NO: 847087 - protein, 107 aa, Homo sapiens
MHEGLGLFMRVLLQSQTQAEMLHSCCPRGNLKTLERGELSKIHDVQKGGGLGEVSEDTSVGVTAQSHLWVHTAPPTTPLGCPCDGPCTQYVYECFSLWRMSCLQQGP

SEQ ID NO: 847088 - protein, 87 aa, Homo sapiens; identical to SEQ ID NO: 847075

SEQ ID NO: 847089 - protein, 208 aa, Homo sapiens
MPEPASRCLLLLPLLLLLLLLLPAPELGPSQAGAEENDWVRLPSKCEVCKYVAVELKSAFEETGKTKEVIGTGYGILDQKASGVKYTKSDLRLIEVTETICKRLLDYSLHKERTGSNRFAKQEEDLTEFLCANHVLKGKDTSCLAEQWSGKKGDTAALGGKKSKKKSSRAKAAGGRSSSSKQRKELGGLEGDPSPEEDEGIQKASPLS

SEQ ID NO: 847090 - protein, 113 aa, Homo sapiens
MPEPASRCLLLLPLLLLLLLLLPAPELGPSQAGAEENDWVRLPSKCEVCKYVAVELKSAFEETGKTKEVIGTGYGILDQKASGVKYTKSISDPPDQMTYLPSSSESLPIGTCG

SEQ ID NO: 847091 - protein, 275 aa, Homo sapiens; identical to SEQ ID NO: 847076

SEQ ID NO: 847092 - protein, 135 aa, Homo sapiens
FDLKHSDIFPNDSFHILSWPAGQYGCGAEENDWVRLPSKCEVCKYVAVELKSAFEETGKTKEVIGTGYGILDQKASGVKYTKSTCRFPQSQKAQHHQRLERGPSGTAEPPEPPLLLHLILGLVMAGVQSSAPHPY

SEQ ID NO: 847093 - protein, 275 aa, Homo sapiens; identical to SEQ ID NO: 847076

SEQ ID NO: 847094 - protein, 275 aa, Homo sapiens; identical to SEQ ID NO: 847076

SEQ ID NO: 847095 - protein, 275 aa, Homo sapiens; identical to SEQ ID NO: 847076

SEQ ID NO: 847096 - protein, 329 aa, Homo sapiens
MPEPASRCLLLLPLLLLLLLLLPAPELGPSQAGAEENDWVRLPSKCEVCKYVAVELKSAFEETGKTKEVIGTGYGILDQKASGVKYTKSISDPPDQMTYLPSSSESLPIGEMCRCWGTGLEGQTTNPLRLGGELSSSSSCLGRDLRLIEVTETICKRLLDYSLHKERTGSNRFAKGMSETFETLHNLVHKGVKVVMDIPYELWNETSAEVADLKKQCDVLVEEFEEVIEDWYRNHQEEDLTEFLCANHVLKGKDTSCLAEQWSGKKGDTAALGGKKSKKKSSRAKAAGGRSSSSKQRKELGGLEGDPSPEEDEGIQKASPLTHSPPDEL

SEQ ID NO: 847097 - protein, 153 aa, Homo sapiens [sequence omitted]

SEQ ID NO: 847098 - protein, 219 aa, Homo sapiens
ELCRVSSFLEQACAGTLRRTRDLVPVPLEFTHWDLRLIEVTETICKRLLDYSLHKERTGSNRFAKGMSETFETLHNLVHKGVKVVMDIPYELWNETSAEVADLKKQCDVLVEEFEEVIEDWYRNHQEEDLTEFLCANHVLKGKDTSCLAEQWSGKKGDTAALGGKKSKKKSSRAKAAGGRSSSSKQRKELGGLEGDPSPEEDEGIQKASPLTHSPPDEL

SEQ ID NO: 847099 - protein, 113 aa, Homo sapiens; identical to SEQ ID NO: 847090

SEQ ID NO: 847100 - protein, 229 aa, Homo sapiens
MPEPASRCLLLLPLLLLLLLLLPAPELGPSQAGAEENDWVRLPSKCEGLRRDAAADERSGPVCKYVAVELKSAFEETGKTKEVIGTGYGILDQKASGVKYTKSDLRLIEVTETICKRLLDYSLHKERTGSNRFAKQEEDLTEFLCANHVLKGKDTSCLAEQWSGKKGDTAALGGKKSKKKSSRAKAAGGRSSSSKQRKELGGLEGDPSPEEDEGIQKASPLTHSPPDEL

SEQ ID NO: 847101 - protein, 168 aa, Homo sapiens
MPEPASRCLLLLPLLLLLLLLLPAPELGPSQAGAEENDWVRLPSKCEVCKYVAVELKSAFEETGKTKEVIGTGYGILDQKASGVKYTKSDLRLIEVTETICKRLLDYSLHKERTGSNRFAKGMSETFETLHNLVHKGVKVVKDTSPRKNSEPSWVAHAVLSPPQVFLS

SEQ ID NO: 847102 - protein, 123 aa, Homo sapiens
LPSSLHLCAAAGCAIQHPDSSTGRGPPLRLQGPCPSETAGMSSEKSGLPDSVPHTSPPPYNAPQPPAEPPAPPPQAAPSSHHHHHHHYHQSGTATLPRLGAGGLASSAATAQRGPSSSATLPR

SEQ ID NO: 847103 - protein, 395 aa, Homo sapiens
MPGTQTPAPAEDPHSGCRDPVPARPQACHPKSQETRFEGPLPPPPPAAAAPPPPAPAQTAQAPGFVVPTHAGTVGTLPLGGYVAPGYPLQLQPCTAYVPVYPVGTPYAGGTPGGTGVTSTLPPPPQGPGLALLEPRRPPHDYMPIAVLTTICCFWPTGIIAIFKAVQVRTALARGDMVSAEIASREARNFSFISLAVGIAAMVLCTILTVVIIIAAQQPRELLGSLKTPLVRPHSAPLDLPGSFCSHTADPMGALHTRFWGRQTWIHRKLRLHGTSRLASKLGIQFLRNPSKTHTPRDAAFRDPGQTPDPQSLQAPSPSKCSAPNRATSVWSLKPRLLYKHRPSSDKTPPPGRQAPPSFLLRGVIQSSDWVCGSRPRPQTDRPLPFFRQKDRALG

SEQ ID NO: 847104 - protein, 370 aa, Homo sapiens
MPPDPYLQETRFEGPLPPPPPAAAAPPPPAPAQTAQAPGFVVPTHAGTVGTLPLGGYVAPGYPLQLQPCTAYVPVYPVGTPYAGGTPGGTGVTSTLPPPPQGPGLALLEPRRPPHDYMPIAVLTTICCFWPTGIIAIFKAVQVRTALARGDMVSAEIASREARNFSFISLAVGIAAMVLCTILTVVIIIAAQQPRELLGSLKTPLVRPHSAPLDLPGSFCSHTADPMGALHTRFWGRQTWIHRKLRLHGTSRLASKLGIQFLRNPSKTHTPRDAAFRDPGQTPDPQSLQAPSPSKCSAPNRATSVWSLKPRLLYKHRPSSDKTPPPGRQAPPSFLLRGVIQSSDWVCGSRPRPQTDRPLPFFRQKDRALG

SEQ ID NO: 847105 - protein, 395 aa, Homo sapiens; identical to SEQ ID NO: 847103

SEQ ID NO: 847106 - protein, 336 aa, Homo sapiens
LPSSLHLCAAAGCAIQHPDSSTGRGPPLRLQGPCPSETAGMSSEKSAICRRDPGGNRSDLHSPPAAPGPRAGPTGAEAPATRLHAHRGADHHLLLLAYWHHCHLQGRAGAHGLGPRRHGVGRDRFTRGPELLLHLPGRGHRGHGALYHPHRSHHHRRAAPRELLGSLKTPLVRPHSAPLDLPGSFCSHTADPMGALHTRFWGRQTWIHRKLRLHGTSRLASKLGIQFLRNPSKTHTPRDAAFRDPGQTPDPQSLQAPSPSKCSAPNRATSVWSLKPRLLYKHRPSSDKTPPPGRQAPPSFLLRGVIQSSDWVCGSRPRPQTDRPLPFFRQKDRALG

SEQ ID NO: 847107 - protein, 264 aa, Homo sapiens
MLVTYIYSMISQSRLESRTRCSAPSDGFKPRERSGGEQAQDWDALPPKRPRLGAGNKIGGRRLIVVLEGASLETVKVGKTYELLNCDKHKSILLKNGRDPGEARPDITHQSLLMLMDSPLNRAGLLQVYIHTQKNVLIEVNPQTRIPRTFDRFCGLMVQLLHKLSVRAADGPQKLLKVIKNPVSDHFPVGCMKVGTSFSIPVVSDVRELVPSSDPIVFVVGAFAHGKVSVEYTEKMVSISNYPLSAALTCAKLTTAFEEVWGVI

SEQ ID NO: 847108 - protein, 197 aa, Homo sapiens
MDSSLVNEAVGKTYELLNCDKHKSILLKNGRDPGEARPDITHQSLLMLMDSPLNRAGLLQVYIHTQKNVLIEVNPQTRIPRTFDRFCGLMVQLLHKLSVRAADGPQKLLKVIKNPVSDHFPVGCMKVGTSFSIPVVSDVRELVPSSDPIVFVVGAFAHGKVSVEYTEKMVSISNYPLSAALTCAKLTTAFEEVWGVI

SEQ ID NO: 847109 - protein, 396 aa, Homo sapiens
TQIRAHRRPRRRPPATASGPCPCPGARRAAVPPSPSSSGPCLILRPAALEVRRGCRPASTPLRLRYCTLHTRVRARKAGERKGSGSALPLKPSPLAHYGPELRAQESRIRKSRPFLEGCPPREGSARQQVISISWPTFKMAAGRKFVIRSRLFLFKSVQRNFRYCCKMAAPSDGFKPRERSGGEQAQDWDALPPKRPRLGAGNKIGGRRLIVVLEGASLETVKVGKTYELLNCDKHKSILLKNGRDPGEARPDITHQSLLMLMDSPLNRAGLLQVYIHTQKNVLIEVNPQTRIPRTFDRFCGLMVQLLHKLSVRAADGPQKLLKVIKNPVSDHFPVGCMKVGTSFSIPVVSDVRELVPSSDPIVFVVGAFAHGKVRSGLNPEILGRAELSIEFPEQ

SEQ ID NO: 847110 - protein, 308 aa, Homo sapiens
TQIRAHRRPRRRPPATASGPCPCPGARRAAVPPSPSSSGPCLILRPAALEVRRGCRPASTPLRLRYCTLHTRVRARKAGERKGSGSALPLKPSPLAHYGPELRAQESRIRKSRPFLEGCPPREGSARQQVISISWPTFKMAAGRKFVIRSRLFLFKSVQRNFRYCCKMAAPSDGFKPRERSGGEQAQDWDALPPKRPRLGAGNKIGGRRLIVVLEGASLETVKVGKTYELLNCDKHKSILLKNGRDPGEARPDITHQSLLMLMDSPLNRAGLLQVYIHTQKNVLIEVNPQTRIPRTFDRFCGLMGKKP

SEQ ID NO: 847111 - protein, 390 aa, Homo sapiens
TQIRAHRRPRRRPPATASGPCPCPGARRAAVPPSPSSSGPCLILRPAALEVRRGCRPASTPLRLRYCTLHTRVRARKAGERKGSGSALPLKPSPLAHYGPELRAQESRIRKSRPFLEGCPPREGSARQQVISISWPTFKMAAGRKFVIRSRLFLFKSVQRNFRYCCKMAAPSDGFKPRERSGGEQAQDWDALPPKRPRLGAGNKIGGRRLIVVLEGASLETVKVGKTYELLNCDKHKSILLKNGRDPGEARPDITHQSLLMLMDSPLNRAGLLQVYIHTQKNVLIEVNPQTRIPRTFDRFCGLMVQLLHKLSVRAADGPQKLLKVIKNPVSDHFPVGCMKVGTSFSIPVVSDVRELVPSSDPIVFVVGAFAHGKRCDLLCCPDLSAVAQS

SEQ ID NO: 847112 - protein, 308 aa, Homo sapiens; identical to SEQ ID NO: 847110

SEQ ID NO: 847113 - protein, 361 aa, Homo sapiens
TQIRAHRRPRRRPPATASGPCPCPGARRAAVPPSPSSSGPCLILRPAALEVRRGCRPASTPLRLRYCTLHTRVRARKAGERKGSGSALPLKPSPLAHYGPELRAQESRIRKSRPFLEGCPPREGSARQQVISISWPTFKMAAGRKFVIRSRLFLFKSVQRNFRYCCKMAAPSDGFKPRERSGGEQAQDWDALPPKRPRLGAGNKIGGRRLIVVLEGASLETVKVGKTYELLNCDKHKSILLKNGRDPGEARPDITHQSLLMLMDSPLNRAGLLQVYIHTQKNVLIEVNPQTRIPRTFDRFCGLMVQLLHKLSVRAADGPQKLLKVSVEYTEKMVSISNYPLSAALTCAKLTTAFEEVWGVI

SEQ ID NO: 847114 - protein, 411 aa, Homo sapiens
TQIRAHRRPRRRPPATASGPCPCPGARRAAVPPSPSSSGPCLILRPAALEVRRGCRPASTPLRLRYCTLHTRVRARKAGERKGSGSALPLKPSPLAHYGPELRAQESRIRKSRPFLEGCPPREGSARQQVISISWPTFKMAAGRKFVIRSRLFLFKSVQRNFRYCCKMAAPSDGFKPRERSGGEQAQDWDALPPKRPRLGAGNKIGGRRLIVVLEGASLETVKVGKTYELLNCDKHKSILLKNGRDPGEARPDITHQSLLMLMDSPLNRAGLLQVYIHTQKNVLIEVNPQTRIPRTFDRFCGLMVQLLHKLSVRAADGPQKLLKVIKNPVSDHFPVGCMKVGTSFSIPVVSDVRELVPSSDPIVFVVGAFAHGKVSVEYTEKMVSISNYPLSAALTCAKLTTAFEEVWGVI

SEQ ID NO: 847115 - protein, 411 aa, Homo sapiens; identical to SEQ ID NO: 847114

SEQ ID NO: 847116 - protein, 185 aa, Homo sapiens
CLEDPIGRMCTSSNMEECAGPWGSAADITHQSLLMLMDSPLNRAGLLQVYIHTQKNVLIEVNPQTRIPRTFDRFCGLMVQLLHKLSVRAADGPQKLLKVIKNPVSDHFPVGCMKVGTSFSIPVVSDVRELVPSSDPIVFVVGAFAHGKVSVEYTEKMVSISNYPLSAALTCAKLTTAFEEVWGVI

SEQ ID NO: 847117 - protein, 159 aa, Homo sapiens
MLGNCLFLTFQESSLDIKHTGNSSYPWGFPCSMTGQKDCGLHLALNSFFPLLVQLLHKLSVRAADGPQKLLKVIKNPVSDHFPVGCMKVGTSFSIPVVSDVRELVPSSDPIVFVVGAFAHGKVSVEYTEKMVSISNYPLSAALTCAKLTTAFEEVWGVI

SEQ ID NO: 847118 - protein, 327 aa, Homo sapiens
TQIRAHRRPRRRPPATASGPCPCPGARRAAVPPSPSSSGPCLILRPAALEVRRGCRPASTPLRLRYCTLHTRVRARKAGERKGSGSALPLKPSPLAHYGPELRAQESRIRKSRPFLEGCPPREGSARQQVISISWPTFKMAAGRKFVIRSRLFLFKSVQRNFRYCCKMAAPSDGFKPRERSGGEQAQDWDALPPKRPRLGAGNKIGGRRLIVVLEGASLETVKVGKTYELLNCDKHKSILLKNGRDPGEARPDITHQSLLMLMDSPLNRAGLLQVYIHTQKNVLIEVNPQTRIPRTFDRFCGLMVQLLHKLSVRAADGPQKLLKVRY

SEQ ID NO: 847119 - protein, 327 aa, Homo sapiens; identical to SEQ ID NO: 847118

SEQ ID NO: 847120 - protein, 652 aa, Homo sapiens
MFIQQIFMQRSQEHTTMAEKGRDAERAECGRAKPEPERGRRRRAGSGRAEMPYKLKKEKEPPKVAKCTAKPSSSGKDGGGENTEEAQPQPQPQPQPQAQSQPPSSNKRPSNSTPPPTQLSKIKYSGGPQIVKKERRQSSSRFNLSKNRELQKLPALKDSPTQEREELFIQKLRQCCVLFDFVSDPLSDLKFKEVKRAGLNEMVEYITHSRDVVTEAIYPEAVTMFSVNLFRTLPPSSNPTGAEFDPEEDEPTLEAAWPHLQLVYEFFLRFLESPDFQPNIAKKYIDQKFVLALLDLFDSEDPRERDFLKTILHRIYGKFLGLRAYIRRQINHIFYRFIYETEHHNGIAELLEILGSIINGFALPLKEEHKMFLIRVLLPLHKVKSLSVYHPQLAYCVVQFLEKESSLTEPVIVGLLKFWPKTHSPKEVMFLNELEEILDVIEPSEFSKVMEPLFRQLAKCVSSPHFQVAERALYYWNNEYIMSLISDNAARVLPIMFPALYRNSKSHWNKTIHGLIYNALKLFMEMNQKLFDDCTQQYKAEKQKGRFRMKEREEMWQKIEELARLNPQYPMFRAPPPLPPVYSMETETPTAEDIQLLKRTVETEAVQMLKDIKKEKVLLRRKSELPQDVYTIKALEAHKRAEEFLTASQEAL

SEQ ID NO: 847121 - protein, 646 aa, Homo sapiens
AQAPLDPGAARRRWRRDAERAECGRAKPEPERGRRRRAGSGRAEMPYKLKKEKEPPKVAKCTAKPSSSGKDGGGENTEEAQPQPQPQPQPQAQSQPPSSNKRPSNSTPPPTQLSKIKYSGGPQIVKKERRQSSSRFNLSKNRELQKLPALKDSPTQEREELFIQKLRQCCVLFDFVSDPLSDLKFKEVKRAGLNEMVEYITHSRDVVTEAIYPEAVTMFSVNLFRTLPPSSNPTGAEFDPEEDEPTLEAAWPHLQLVYEFFLRFLESPDFQPNIAKKYIDQKFVLALLDLFDSEDPRERDFLKTILHRIYGKFLGLRAYIRRQINHIFYRFIYETEHHNGIAELLEILGSIINGFALPLKEEHKMFLIRVLLPLHKVKSLSVYHPQLAYCVVQFLEKESSLTEPVIVGLLKFWPKTHSPKEVMFLNELEEILDVIEPSEFSKVMEPLFRQLAKCVSSPHFQVAERALYYWNNEYIMSLISDNAARVLPIMFPALYRNSKSHWNKTIHGLIYNALKLFMEMNQKLFDDCTQQYKAEKQKGRFRMKEREEMWQKIEELARLNPQYPMFRAPPPLPPVYSMETETPTAEDIQLLKRTVETEAVQMLKDIKKEKVLLRRKSELPQDVYTIKALEAHKRAEEFLTASQEAL

SEQ ID NO: 847122 - protein, 646 aa, Homo sapiens; identical to SEQ ID NO: 847121

SEQ ID NO: 847123 - protein, 646 aa, Homo sapiens; identical to SEQ ID NO: 847121

SEQ ID NO: 847124 - protein, 646 aa, Homo sapiens; identical to SEQ ID NO: 847121

SEQ ID NO: 847125 - protein, 646 aa, Homo sapiens; identical to SEQ ID NO: 847121

SEQ ID NO: 847126 - protein, 646 aa, Homo sapiens; identical to SEQ ID NO: 847121

SEQ ID NO: 847127 - protein, 646 aa, Homo sapiens; identical to SEQ ID NO: 847121

SEQ ID NO: 847128 - protein, 628 aa, Homo sapiens
AQAPLDPGAARRRWRRDAERAECGRAKPEPERGRRRRAGSGRAEMPYKLKKEKEPPKVAKCTAKPSSSGKDGGGENTEEAQPQPQPQPQPQAQSQPPSSNKRPSNSTPPPTQLSKIKYSGGPQIVKKERRQSSSRFNLSKNRELQKLPALKDSPTQEREELFIQKLRQCCVLFDFVSDPLSDLKFKEVKRAGLNEMVEYITHSRDVVTEAIYPEAVTMFSVNLFRTLPPSSNPTGAEFDPEEDEPTLEAAWPHLQLVYEFFLRFLESPDFQPNIAKKYIDQKFVLALLDLFDSEDPRERDFLKTILHRIYGKFLGLRAYIRRQINHIFYRFIYETEHHNGIAELLEILGSIINGFALPLKEEHKMFLIRVLLPLHKVKSLSVYHPQVIVGLLKFWPKTHSPKEVMFLNELEEILDVIEPSEFSKVMEPLFRQLAKCVSSPHFQVAERALYYWNNEYIMSLISDNAARVLPIMFPALYRNSKSHWNKTIHGLIYNALKLFMEMNQKLFDDCTQQYKAEKQKGRFRMKEREEMWQKIEELARLNPQYPMFRAPPPLPPVYSMETETPTAEDIQLLKRTVETEAVQMLKDIKKEKVLLRRKSELPQDVYTIKALEAHKRAEEFLTASQEAL

SEQ ID NO: 847129 - protein, 646 aa, Homo sapiens; identical to SEQ ID NO: 847121

SEQ ID NO: 847130 - protein, 682 aa, Homo sapiens
LQAPLDPGAARRRWRRDAERAECGRAKPEPERGRRRRAGSGRAEMPYKLKKEKEPPKVAKCTAKPSSSGKDGGGENTEEAQPQPQPQPQPQAQSQPPSSNKRPSNSTPPPTQLSKIKYSGGPQIVKKERRQSSSRFNLSKNRELQKLPALKDSPTQEREELFIQKLRQCCVLFDFVSDPLSDLKFKEVKRAGLNEMVEYITHSRDVVTEAIYPEAVTMFSVNLFRTLPPSSNPTGAEFDPEEDEPTLEAAWPHLQVPGQGGRLAVAAGSGALGGLQVLGNIPSVACLFPYQLVYEFFLRFLESPDFQPNIAKKYIDQKFVLALLDLFDSEDPRERDFLKTILHRIYGKFLGLRAYIRRQINHIFYRFIYETEHHNGIAELLEILGSIINGFALPLKEEHKMFLIRVLLPLHKVKSLSVYHPQLAYCVVQFLEKESSLTEPVIVGLLKFWPKTHSPKEVMFLNELEEILDVIEPSEFSKVMEPLFRQLAKCVSSPHFQVAERALYYWNNEYIMSLISDNAARVLPIMFPALYRNSKSHWNKTIHGLIYNALKLFMEMNQKLFDDCTQQYKAEKQKGRFRMKEREEMWQKIEELARLNPQYPMFRAPPPLPPVYSMETETPTAEDIQLLKRTVETEAVQMLKDIKKEKVLLRRKSELPQDVYTIKALEAHKRAEEFLTASQEAL

SEQ ID NO: 847131 - protein, 646 aa, Homo sapiens; identical to SEQ ID NO: 847121

SEQ ID NO: 847132 - protein, 546 aa, Homo sapiens
MFIQQIFMQRSQEHTTMAEKGRDAERAECGRAKPEPERGRRRRAGSGRAEMPYKLKKEKELFIQKLRQCCVLFDFVSDPLSDLKFKEVKRAGLNEMVEYITHSRDVVTEAIYPEAVTMFSVNLFRTLPPSSNPTGAEFDPEEDEPTLEAAWPHLQLVYEFFLRFLESPDFQPNIAKKYIDQKFVLALLDLFDSEDPRERDFLKTILHRIYGKFLGLRAYIRRQINHIFYRFIYETEHHNGIAELLEILGSIINGFALPLKEEHKMFLIRVLLPLHKVKSLSVYHPQLAYCVVQFLEKESSLTEPVIVGLLKFWPKTHSPKEVMFLNELEEILDVIEPSEFSKVMEPLFRQLAKCVSSPHFQVAERALYYWNNEYIMSLISDNAARVLPIMFPALYRNSKSHWNKTIHGLIYNALKLFMEMNQKLFDDCTQQYKAEKQKGRFRMKEREEMWQKIEELARLNPQYPMFRAPPPLPPVYSMETETPTAEDIQLLKRTVETEAVQMLKDIKKEKVLLRRKSELPQDVYTIKALEAHKRAEEFLTASQEAL

SEQ ID NO: 847133 - protein, 711 aa, Homo sapiens
AQAPLDPGAARRRWRRDAERAECGRAKPEPERGRRRRAGSGRAEMPYKLKKEKEPPKVAKCTAKPSSSGKDGGGENTEEAQPQPQPQPQPQAQSQPPSSNKRPSNSTPPPTQLSKIKYSGGPQIVKKERRQSSSRFNLSKNRELQKLPALKDSPTQEREELFIQKLRQCCVLFDFVSDPLSDLKFKEVKRAGLNEMVEYITHSRDVVTEAIYPEAVTMVGTGKGQQGGLVRGSGEAQVELYTGPTPQFSVNLFRTLPPSSNPTGAEFDPEEDEPTLEAAWPHLQVPGQGGRLAVAAGSGALGGLQVLGNIPSVACLFPYQLVYEFFLRFLESPDFQPNIAKKYIDQKFVLALLDLFDSEDPRERDFLKTILHRIYGKFLGLRAYIRRQINHIFYRFIYETEHHNGIAELLEILGSIINGFALPLKEEHKMFLIRVLLPLHKVKSLSVYHPQLAYCVVQFLEKESSLTEPVIVGLLKFWPKTHSPKEVMFLNELEEILDVIEPSEFSKVMEPLFRQLAKCVSSPHFQVAERALYYWNNEYIMSLISDNAARVLPIMFPALYRNSKSHWNKTIHGLIYNALKLFMEMNQKLFDDCTQQYKAEKQKGRFRMKEREEMWQKIEELARLNPQYPMFRAPPPLPPVYSMETETPTAEDIQLLKRTVETEAVQMLKDIKKEKVLLRRKSELPQDVYTIKALEAHKRAEEFLTASQEAL

SEQ ID NO: 847134 - protein, 285 aa, Homo sapiens
MVSSLKGKQNLYTPRKQIQGKETGSWLRSPKLCPPGWGREQVGVIVGLLKFWPKTHSPKEVMFLNELEEILDVIEPSEFSKVMEPLFRQLAKCVSSPHFQVAERALYYWNNEYIMSLISDNAARVLPIMFPALYRNSKSHWNKTIHGLIYNALKLFMEMNQKLFDDCTQQYKAEKQKGRFRMKEREEMWQKIEELARLNPQYPMFRAPPPLPPVYSMETETPTAEDIQLLKRTVETEAVQMLKDIKKEKVLLRRKSELPQDVYTIKALEAHKRAEEFLTASQEAL

SEQ ID NO: 847135 - protein, 584 aa, Homo sapiens
AQAPLDPGAARRRWRRDAERAECGRAKPEPERGRRRRAGSGRAEMPYKLKKEKEPPKVAKCTAKPSSSGKDGGGENTEEAQPQPQPQPQPQAQSQPPSSNKRPSNSTPPPTQLSKIKYSGGPQIVKKERRQSSSRFNLSKNRELQKLPALKDSPTQEREELFIQKLRQCCVLFDFVSDPLSDLKFKEVKRAGLNEMVEYITHSRDVVTEAIYPEAVTMFSVNLFRTLPPSSNPTGAEFDPEEDEPTLEAAWPHLQLVYEFFLRFLESPDFQPNIAKKYIDQKFVLALLDLFDSEDPRERDFLKTILHRIYGKFLGLRAYIRRQINHIFYRFIYETEHHNGIAELLEILGSIINGFALPLKEEHKMFLIRVLLPLHKVKSLSVYHPQLAYCVVQFLEKESSLTEPVIVGLLKFWPKTHSPKEVMFLNELEEILDVIEPSEFSKVMEPLFRQLAKCVSSPHFQVAERALYYWNNEYIMSLISDNAARVLPIMFPALYRNSKSHWNKTIHGLIYNALKLFMEMNQKLFDDCTQQYKAEKQKGRFRMKEREEMWQKIEELARLNPQYPKFRARPGSELRQSKRTTILN

SEQ ID NO: 847136 - protein, 110 aa, Homo sapiens
AVLYGVKVAKLGGLGVADAKRHQEGESAAAEEVGAAPGRVHHQGTGGAQAGGRVPNCQPGGSLTPHVPTTGPQPTQPWDTALALHTLLPTGCLGGRQRLSSYSREGDVGT

SEQ ID NO: 847137 - protein, 337 aa, Homo sapiens
AQAPLDPGAARRRWRRDAERAECGRAKPEPERGRRRRAGSGRAEMPYKLKKEKEPPKVAKCTAKPSSSGKDGGGENTEEAQPQPQPQPQPQAQSQPPSSNKRPSNSTPPPTQLSKIKYSGGPQIVKKERRQSSSRFNLSKNRELQKLPALKDSPTQEREELFIQKLRQCCVLFDFVSDPLSDLKFKEVKRAGLNEMVEYITHSRDVVTEAIYPEAVTMVGTGKDTGGTGEGLWRSPGGALTGPTPQFSVNLFRTLPPSSNPTGAEFDPEEDEPTLEAAWPHLQVPGQGGRLAVAAGSGALGGLQVLGNIPSVACLFPYSSCMSSSYVSLSLLISSQT

SEQ ID NO: 847138 - protein, 273 aa, Homo sapiens
LVLSLCRPALVVVCCSCSSSAWLRCCVLSLRRLLVAVLVLVFFLGGVSPCVCFAACCVRCLLCLLLLFSSRGLSVILLRCVVPLLVVFRLLLTSMCLLRILVCCVTNTRRGYLVCRRFYPPVWVLSSELPLNLCWFVLWGTRCCWVWCVPILIVSYLQVSLRCRQFDFASKVLLLFALALSSYRAVRARPRMPAHAQTSMRMHHPPPADSRSVSLVWHGLPLNASYSFSWDGSPPPLSALSLLVLAVAVVLVLLLCSCFCLFWLLVCSFGFFF

SEQ ID NO: 847139 - protein, 614 aa, Homo sapiens
AQAPLDPGAARRRWRRDAERAECGRAKPEPERGRRRRAGSGRAEMPYKLKKEKEPPKVAKCTAKPSSSGKDGGGENTEEAQPQPQPQPQPQAQSQPPSSNKRPSNSTPPPTQLSKIKYSGGPQIVKKELFIQKLRQCCVLFDFVSDPLSDLKFKEVKRAGLNEMVEYITHSRDVVTEAIYPEAVTMFSVNLFRTLPPSSNPTGAEFDPEEDEPTLEAAWPHLQLVYEFFLRFLESPDFQPNIAKKYIDQKFVLALLDLFDSEDPRERDFLKTILHRIYGKFLGLRAYIRRQINHIFYRFIYETEHHNGIAELLEILGSIINGFALPLKEEHKMFLIRVLLPLHKVKSLSVYHPQLAYCVVQFLEKESSLTEPVIVGLLKFWPKTHSPKEVMFLNELEEILDVIEPSEFSKVMEPLFRQLAKCVSSPHFQVAERALYYWNNEYIMSLISDNAARVLPIMFPALYRNSKSHWNKTIHGLIYNALKLFMEMNQKLFDDCTQQYKAEKQKGRFRMKEREEMWQKIEELARLNPQYPMFRAPPPLPPVYSMETETPTAEDIQLLKRTVETEAVQMLKDIKKEKVLLRRKSELPQDVYTIKALEAHKRAEEFLTASQEAL

SEQ ID NO: 847140 - protein, 646 aa, Homo sapiens; identical to SEQ ID NO: 847121

SEQ ID NO: 847141 - protein, 691 aa, Homo sapiens
AQAPLDPGAARRRWRRDAERAECGRAKPEPERGRRRRAGSGRAEMPYKLKKEKEPPKVAKCTAKPSSSGKDGGGENTEEAQPQPQPQPQPQAQSQPPSSNKRPSNSTPPPTQLSKIKYSGGPQIVKKERRQSSSRFNLSKNRELQKLPALKDSPTQEREELFIQKLRQCCVLFDFVSDPLSDLKFKEVKRAGLNEMVEYITHSRDVVTEAIYPEAVTMFSVNLFRTLPPSSNPTGAEFDPEEDEPTLEAAWPHLQLVYEFFLRFLESPDFQPNIAKKYIDQKFVLALLDLFDSEDPRERDFLKTILHRIYGKFLGLRAYIRRQINHIFYSEARSPGLGAKPSATEVGWEQGGGGTVQNAGGTSGVVKRAIFSSLRFIYETEHHNGIAELLEILGSIINGFALPLKEEHKMFLIRVLLPLHKVKSLSVYHPQLAYCVVQFLEKESSLTEPVIVGLLKFWPKTHSPKEVMFLNELEEILDVIEPSEFSKVMEPLFRQLAKCVSSPHFQVAERALYYWNNEYIMSLISDNAARVLPIMFPALYRNSKSHWNKTIHGLIYNALKLFMEMNQKLFDDCTQQYKAEKQKGRFRMKEREEMWQKIEELARLNPQYPMFRAPPPLPPVYSMETETPTAEDIQLLKRTVETEAVQMLKDIKKEKVLLRRKSELPQDVYTIKALEAHKRAEEFLTASQEAL

SEQ ID NO: 847142 - protein, 646 aa, Homo sapiens; identical to SEQ ID NO: 847121

SEQ ID NO: 847143 - protein, 674 aa, Homo sapiens
AQAPLDPGAARRRWRRDAERAECGRAKPEPERGRRRRAGSGRAEMPYKLKKEKEPPKVAKCTAKPSSSGKDGGGENTEEAQPQPQPQPQPQAQSQPPSSNKRPSNSTPPPTQLSKIKYSGGPQIVKKERRQSSSRFNLSKNRELQKLPALKDSPTQEREELFIQKLRQCCVLFDFVSDPLSDLKFKEVKRAGLNEMVEYITHSRDVVTEAIYPEAVTMVGTGKDTGGTGEGLWRSPGGALTGPTPQFSVNLFRTLPPSSNPTGAEFDPEEDEPTLEAAWPHLQLVYEFFLRFLESPDFQPNIAKKYIDQKFVLALLDLFDSEDPRERDFLKTILHRIYGKFLGLRAYIRRQINHIFYRFIYETEHHNGIAELLEILGSIINGFALPLKEEHKMFLIRVLLPLHKVKSLSVYHPQLAYCVVQFLEKESSLTEPVIVGLLKFWPKTHSPKEVMFLNELEEILDVIEPSEFSKVMEPLFRQLAKCVSSPHFQVAERALYYWNNEYIMSLISDNAARVLPIMFPALYRNSKSHWNKTIHGLIYNALKLFMEMNQKLFDDCTQQYKAEKQKGRFRMKEREEMWQKIEELARLNPQYPMFRAPPPLPPVYSMETETPTAEDIQLLKRTVETEAVQMLKDIKKEKVLLRRKSELPQDVYTIKALEAHKRAEEFLTASQEAL

SEQ ID NO: 847144 - protein, 278 aa, Homo sapiens
NSTFTEVQALCSCLPGLQLAYCVVQFLEKESSLTEPVIVGLLKFWPKTHSPKEVMFLNELEEILDVIEPSEFSKVMEPLFRQLAKCVSSPHFQVAERALYYWNNEYIMSLISDNAARVLPIMFPALYRNSKSHWNKTIHGLIYNALKLFMEMNQKLFDDCTQQYKAEKQKGRFRMKEREEMWQKIEELARLNPQYPMFRAPPPLPPVYSMETETPTAEDIQLLKRTVETEAVQMLKDIKKEKVLLRRKSELPQDVYTIKALEAHKRAEEFLTASQEAL

SEQ ID NO: 847145 - protein, 646 aa, Homo sapiens; identical to SEQ ID NO: 847121

SEQ ID NO: 847146 - protein, 309 aa, Homo sapiens
AQAPLDPGAARRRWRRDAERAECGRAKPEPERGRRRRAGSGRAEMPYKLKKEKEPPKVAKCTAKPSSSGKDGGGENTEEAQPQPQPQPQPQAQSQPPSSNKRPSNSTPPPTQLSKIKYSGGPQIVKKERRQSSSRFNLSKNRELQKLPALKDSPTQEREELFIQKLRQCCVLFDFVSDPLSDLKFKEVKRAGLNEMVEYITHSRDVVTEAIYPEAVTMFSVNLFRTLPPSSNPTGAEFDPEEDEPTLEAAWPHLQVPGQGGRLAVAAGSGALGGLQVLGNIPSVACLFPYSSCMSSSYVSLSLLISSQT

SEQ ID NO: 847147 - protein, 69 aa, Homo sapiens
IRGRNNRIHWELVTIPHLVPIHTQMLKDIKKEKVLLRRKSELPQDVYTIKALEAHKRAEEFLTASQEAL

SEQ ID NO: 847148 - protein, 621 aa, Homo sapiens
MESSPESLQPLEHGVAAGPASGTGSSQEGLQETRLAAGDGPGVWAAETSGGNGLGAAAARRSLPDSASPAGSPEVPGPCSSSAGLDLKDSGLESPAAAEAPLRGQYKVTASPETAVAGVGHELGTAGDAGARPDLAGTCQAELTAAGSEEPSSAGGLSSSCSDPSPPGESPSLDSLESFSNLHSFPSSCEFNSEEGAENRVPEEEEGAAVLPGAVPLCKEEEGEETAQVLAASKERFPGQSVYHIKWIQWKEENTPIITQNENGPCPLLAILNVLLLAWKVKLPPMMEIITAEQLMEYLGDYMLDAKPKEISEIQRLNYEQNMSDAMAILHKLQTGLDVNVRFTGVRVFEYTPECIVFDLLDIPLYHGWLVDPQIDDIVKAVGNCSYNQLVEKIISCKQSDNSELVSEGFVAEQFLNNTATQLTYHGLCELTSTVQEGELCVFFRNNHFSTMTKYKGQLYLLVTDQGFLTEEKVVWESLHNVDGDGNFCDSEFHLRPPSDPETVYKGQQDQIDQDYLMALSLQQEQQSQEINWEQIPEGISDLELAKKLQEEEDRRASQYYQEQEQAAAAAAAASTQAQQGQPAQASPSSGRQSGNSERKRKEPREKDKEKEKEKNSCVIL

SEQ ID NO: 847149 - protein, 506 aa, Homo sapiens
MESSPESLQPLEHGVAAGPASGTGSSQEGLQETRLAAGDGPGVWAAETSGGNGLGAAAARRSLPDSASPAGSPEVPGPCSSSAGLDLKDSGLESPAAAEAPLCKEEEGEETAQVLAASKERFPGQSVYHIKWIQWKEENTPIITQNENGPCPLLAILNVLLLAWKVKLPPMMEIITAEQLMEYLGDYMLDAKPKEISEIQRLNYEQNMSDAMAILHKLQTGLDVNVRFTGVRVFEYTPECIVFDLLDIPLYHGWLVDPQIDDIVKAVGNCSYNQLVEKIISCKQSDNSELVSEGFVAEQFLNNTATQLTYHGLCELTSTVQEGELCVFFRNNHFSTMTKYKGQLYLLVTDQGFLTEEKVVWESLHNVDGDGNFCDSEFHLRPPSDPETVYKGQQDQIDQDYLMALSLQQEQQSQEINWEQIPEGISDLELAKKLQEEEDRRASQYYQEQEQAAAAAAAASTQAQQGQPAQASPSSGRQSGNSERKRKEPREKDKEKEKEKNSCVIL

SEQ ID NO: 847150 - protein, 621 aa, Homo sapiens; identical to SEQ ID NO: 847148

SEQ ID NO: 847151 - protein, 397 aa, Homo sapiens
MESSPESLQPLEHGVAAGPASGTGSSQEGLQETRLAAGDGPGVWAAETSGGNGLGAAAARRSLPDSASPAGSPEVPGPCSSSAGLDLKDSGLESPAAAEAPLRGQYKVTASPETAVAGVGHELGTAGDAGARPDLAGTCQAELTAAGSEEPSSAGGLSSSCSDPSPPGESPSLDSLESFSNLHSFPSSCEFNSEEGAENRVPEEEEGAAVLPGAVPLCKEEEGEETAQVLAASKERFPGQSVYHIKWIQWKEENTPIITQNENGPCPLLAILNVLLLAWKVKLPPMMEIITAEQLMEYLGDYMLDAKPKEISEIQRLNYEQNMSDAMAILHKLQTGLDVNVRFTGVRVFEYTPECIVFDLLDIPLYHGWLVDPQIDDIVKAVGNCTWATERDSYISK

SEQ ID NO: 847152 - protein, 123 aa, Homo sapiens
SPGQSDVDDLEADDDLLAELNEVLGEEQKASETPPPVAQPKPEAPHPGLETTLQERLALYQTAIESARQAGDSAKMRRYDRGLKTLENLLASIRTGPGLVRMCGGWEERGQEDEAASLLQGRH

SEQ ID NO: 847153 - protein, 814 aa, Homo sapiens
RGRPGEPSGRAPVRRRPRPEAEVGRPSREARARDRRPRGADEECRTQEGRVRGDRARGRRQGKAGLGGRWSGHPALKMHKRKGPPGPPGRGAAAARQLGLLVDLSPDGLMIPEDGANDEELEAEFLALVGGQPPALEKLKGKGPLPMEAIEKMASLCMRDPDEDEEEGTDEDDLEADDDLLAELNEVLGEEQKASETPPPVAQPKPEAPHPGLETTLQERLALYQTAIESARQAGDSAKMRRYDRGLKTLENLLASIRKGNAIDEADIPPPVAIGKGPASTPTYSPAPTQPAPRIASAPEPRVTLEGPSATAPASSPGLAKPQMPPGPCSPGPLAQLQSRQRDYKLAALHATAQQQLAFLEGRKKQLLQAALRAKQKNDVEGAKMHLRQAKGLEPMLEASRNGLPVDITKVPPAPVNKDDFALVQRPGPGLSQEAARRYGELTKLIRQQHEMCLNHSNQFTQLGNITETTKFEKLAEDCKRSMDILKQAFVRGLPTPTARFEQRTFSVIKIFPDLSSNDMLLFIVKGINLPTPPGLSPGDLDVFVRFDFPYPNVEEAQKDKTSVIKNTDSPEFKEQFKLCINRSHRGFRRAIQTKGIKFEVVHKGGLFKTDRVLGTAQLKLDALEIACEVREILEVLDGRRPTGGRLEVMVRIREPLTAQQLETTTERWLVIDPVPAAVPTQVAGPKGKAPPVPAPARESGNRSARPLHSLSVLAFDQERLERKILALRQARRPVPPEVAQQYQDIMQRSQWQRAQLEQGGVGIRREYAAQLERQLQFYTEAARRLGNDGSRDAAKEALYRRNLVESELQRLRR
